United States Patent Application Publication US 2017/0114356 A1 - sequence listing, part 55

SEQ ID NO: 74174 - DNA, 3305 bp, Zea Mays
acgtactctgtcaaacgatacgccgcgatgcttccagacgagcgccatccccttcctcgcctcacacgccgtcctgttggtcgtgcctctcttcaacctttttttcttgagcattagcgagagccccttacatggtgcagtgctagcatcgttgctggcgacctcggtgaggtcggatctgcaaaggttgcagctagcgcgcctacactacatcaacatggtgtggcatctcctttcgcagatccccaacatgctacgccgccggctgcctcattggaactcctgtgcaccgcttgcctttcttctcccattcaacccgcaggcgttccctggctcaatagcgcaactaggggatgtccgccgctacctccatataggaaacgacagatttagattttcaggtgatgcgtggtcgggatcccggatcaatcaaaataagtgtgaaataagtgtgaaatttgagaggctgttgaacttccagatcaggtaccaaccaaaaaaagtgacccttttgacggcgtattgcgtgggcaaggcatgccagtgcgacaatagagaaactaacggggagctctgttcgttctgctgattgcttatgattaggctcgcagtggtggtagctgggagagcttgggactggccagacgcgaccaactcacccatgtaataagacaacttttatacatagccgacagtacgcaacctcatgcgcaagatccttaatgaaaccaaagagctgcagcagataaccaacgacaagcagaaaaatcaggttgtacgcatccaacattttactttcatatttgctgaagatgtcaacaaacaaaatagacaagcagcccagacaatggagatgatgtatacgataattgcagatgagttcaagtcaatggacaataaggacatgcgccctgaagattacttgaacttcttttgtcttggaaaccgggaagaaccaccatctaatggcagcccagaatcagagaaatctacatataaaagtgcagagatagatatagagttcatgaaaaagaaacttgaggaccttgataagccaatgaagaggaggaatgataagctgctcaaaattgagcatgaattatattgatccagcacaatgccgaggagactggagactaaacttggaggtgctactgaaggatgtgactttgagtcaaagggtagcacatggagagcttgaattgaattcaagcttggatatgattggaaaatatttgtattagatcacctagaagggtgattgatgcttgttattggccaagcagacaataggtagtcagatgaagattgtaaaaaacaagcatgcttaacccttcaagaatgcacagtttgagcttgaatttggaaaggggatatgccacagttcagagttttttgaacagaatttctggagcagttgttcctataaaataatattttaggtcttgaagccaccaccgtttggattgacatgatctgtggtattctggtgatctcattatagcagacttcatttcttattgtgcttatacagtagtgtagcgggaagagaattcacattgcatgaaatcatgttgatagctaagaggtggaagttgaagtaagccgggaagggtgaggtattgggaactgtggcatttaaagttcagtaggcagcagtaaactgtagtggtgtggtcgtgtacataagatgtgcacattttgaactcaggcattctttattgagtgctgctagaattacattgagctccctccacttctgatacttgcctggttttgcgtcaattggatctgtttgtccgtcctcaacactgttgtctgtttttgctaatttgggcattatctatgacagaagaagaacgattatgaattatagattaaattgaacataatgttgttctaagaacaaaaacagattatttcactgaatattttctcatcgcaagatgtactaaatagtaggttcactacagtcttacagaagccaataacccacttgatcttgctataatgatgttcttagaatacttatagatgtgttggctggaacattagctctgacaagatagaagcttgtttgttctgttatttagtcatgtctgcccctcaaactactgaaacctaaaatctgaaactgaaaatctgaaaatataaaactaaaaatatgaaactgaatattgtatgtcatgtttgtgtcatgttttcttagactgcattgaactccaacagagactgagaaacatggaattatagctagaacttggatctatggctgtgatattcttgcttgcggaaactgggaattatagagagacggaaatactttttaaattagaatctaactacaattcgatttagttcaagtcaatattcagagttctactttctggaattattcagagttcagttattcaaagttattaatagctatacttagccacccatgatgtagtcaagaaaaaaataactgaactcttctgcttataatttcaactatattaatagatattgttatcaggtgtttaaaaagaatgtggtcatcttgtgtgacatttgtgttcttaaattgttgctctgcttataaccttttttacaatgtactcatcagttctatactcgcagccaaaatctatagtgggaactcctgcatacattgctcatgaggttcttctgaagaaggaatacaatggaaaggttgctgatgtgtggtcatgcggagtgatgccatacgtgatgctgacgatcaccatccctgagataagaaaccatccatggttcttgaaaaacctcctagctgaccaaatggatgacaatacgatgagtaagcagtacgaggagcctgaacaaccgatgcagagcatgaatgagttcatgcagatcctggttgaggcgaccattccagcagttggttcacgtggactcaatcagtttctgaatgatgacattgacctcgacgatgacatggaggacctagactcagatgccggtcttgacctggaaagcagtggggagatcgtgtatgctatttgacaacattgaatactttgttgtgtcgtaggttaccaagataattagagacaaggggcaggttgttgtgcttgcaagtatctgttgcagctgttgttcatgcctgatgttgatgcctcttttcatactgttgtgtttggatggtgtaccaccagtgttttacaacagtttggcccttggaattgctattgctaaaacttggttcctctgagaagaccttttgtttttgtattcccagtcgagggacggtgaagtacttatattattacaaaattgtt

SEQ ID NO: 74175 - DNA, 1969 bp, Zea Mays
acgtactctgtcaaacgatacgccgcgatgcttccagacgagcgccatccccttcctcgcctcacacgccgtcctgttggtcgtgcctctcttcaacctttttttcttgagcattagcgagagccccttacatggtgcagtgctagcatcgttgctggcgacctcggtgaggtcggatctgcaaaggttgcagctagcgcgcctacactacatcaacatggtgtggcatctcctttcgcagatccccaacatgctacgccgccggctgcctcattggaactcctgtgcaccgcttgcctttcttctcccattcaacccgcaggcgttccctggctcaatagcgcaactaggggatgtccgccgctacctccatataggaaacgacagatttagattttcaggtgatgcgtggtcgggatcccggatcaatcaaaataagtgtgaaataagtgtgaaatttgagaggctgttgaacttccagatcaggtaccaaccaaaaaaagtgacccttttgacggcgtattgcgtgggcaaggcatgccagtgcgacaatagagaaactaacggggagctctgttcgttctgctgattgcttatgattaggctcgcagtggtggtagctgggagagcttgggactggccagacgcgaccaactcacccatgtaataagacaacttttatacatagccgacagtacgcaacctcatgcgcaagatccttaatgaaaccaaagagctgcagcagataaccaacgacaagcagaaaaatcaggttgtacgcatccaacattttactttcatatttgctgaagatgtcaacaaacaaaatagacaagcagcccagacaatggagatgatgtatacgataattgcagatgagttcaagtcaatggacaataaggacatgcgccctgaagattacttgaacttcttttgtcttggaaaccgggaagaaccaccatctaatggcagcccagaatcagagaaatctacatataaaagtgcagagatagatatagagttcatgaaaaagaaacttgaggaccttgataagccaatgaagaggaggaatgataagctgctcaaaattgagcatgaattatattgatccagcacaatgccgaggagactggagactaaacttggaggtgctactgaaggatgtgactttgagtcaaagggtagcacatggagagcttgaattgaattcaagcttggatatgattggaaaatatttgtattagatcacctagaagggtgattgatgcttgttattggccaagcagccaaaatctatagtgggaactcctgcatacattgctcatgaggttcttctgaagaaggaatacaatggaaaggttgctgatgtgtggtcatgcggagtgatgccatacgtgatgctgacgatcaccatccctgagataagaaaccatccatggttcttgaaaaacctcctagctgaccaaatggatgacaatacgatgagtaagcagtacgaggagcctgaacaaccgatgcagagcatgaatgagttcatgcagatcctggttgaggcgaccattccagcagttggttcacgtggactcaatcagtttctgaatgatgacattgacctcgacgatgacatggaggacctagactcagatgccggtcttgacctggaaagcagtggggagatcgtgtatgctatttgacaacattgaatactttgttgtgtcgtaggttaccaagataattagagacaaggggcaggttgttgtgcttgcaagtatctgttgcagctgttgttcatgcctgatgttgatgcctcttttcatactgttgtgtttggatggtgtaccaccagtgttttacaacagtttggcccttggaattgctattgctaaaacttggttcctctgagaagaccttttgtttttgtattcccagtcgagggacggtgaagtacttatattattacaaaattgtt

SEQ ID NO: 74176 - DNA, 3728 bp, Zea Mays
acgtactctgtcaaacgatacgccgcgatgcttccagacgagcgccatccccttcctcgcctcacacgccgtcctgttggtcgtgcctctcttcaacctttttttcttgagcattagcgagagccccttacatggtgcagtgctagcatcgttgctggcgacctcggtgaggtcggatctgcaaaggttgcagctagcgcgcctacactacatcaacatggtgtggcatctcctttcgcagatccccaacatgctacgccgccggctgcctcattggaactcctgtgcaccgcttgcctttcttctcccattcaacccgcaggcgttccctggctcaatagcgcaactaggggatgtccgccgctacctccatataggaaacgacagatttagattttcaggtgatgcgtggtcgggatcccggatcaatcaaaataagtgtgaaataagtgtgaaatttgagaggctgttgaacttccagatcaggtaccaaccaaaaaaagtgacccttttgacggcgtattgcgtgggcaaggcatgccagtgcgacaatagagaaactaacggggagctctgttcgttctgctgattgcttatgattaggctcgcagtggtggtagctgggagagcttgggactggccagacgcgaccaactcacccatgtaataagacaacttttatacatagccgacagtacgcaacctcatgcgcaagatccttaatgaaaccaaagagctgcagcagataaccaacgacaagcagaaaaatcaggcccagacaatggagatgatgtatacgataattgcagatgagttcaagtcaatggacaataaggacatgcgccctgaagattacttgaacttcttttgtcttggaaaccgggaagaaccaccatctaatggcagcccagaatcagagaaatctacatataaaagtgcagagatagtctgtttttgcattttccttattcttaagggtatggcttagctcaacccttctgattacaccaaaactgaatatggttttggcgcacggaccttatgggaagctagagaagcatttgaagacgcagaaattactcatgttgacgatacagtagatcctgttagagacatggaaactattagtgaagagctcagactaaagttttcgttggattttgttgatttacaagatcagctgtacaacacttaaaccttttttcgacactattctgtttctattttctgcaggatatagagttcatgaaaaagaaacttgaggaccttgataagccaatgaagaggaggaatgataagctgctcaaaattgagcatgaattatattgatccagcacaatgccgaggagactggagactaaacttggaggtgctactgaaggatgtgactttgagtcaaagggtagcacatggagagcttgaattgaattcaagcttggatatgattggaaaatatttgtattagatcacctagaagggtgattgatgcttgttattggccaagcagacaataggtagtcagatgaagattgtaaaaaacaagcatgcttaacccttcaagaatgcacagtttgagcttgaatttggaaaggggatatgccacagttcagagttttttgaacagaatttctggagcagttgttcctataaaataatattttaggtcttgaagccaccaccgtttggattgacatgatctgtggtattctggtgatctcattatagcagacttcatttcttattgtgcttatacagtagtgtagcgggaagagaattcacattgcatgaaatcatgttgatagctaagaggtggaagttgaagtaagccgggaagggtgaggtattgggaactgtggcatttaaagttcagtaggcagcagtaaactgtagtggtgtggtcgtgtacataagatgtgcacattttgaactcaggcattctttattgagtgctgctagaattacattgagctccctccacttctgatacttgcctggttttgcgtcaattggatctgtttgtccgtcctcaacactgttgtctgtttttgctaatttgggcattatctatgacagaagaagaacgattatgaattatagattaaattgaacataatgttgttctaagaacaaaaacagattatttcactgaatattttctcatcgcaagatgtactaaatagtaggttcactacagtcttacagaagccaataacccacttgatcttgctataatgatgttcttagaatacttatagatgtgttggctggaacattagctctgacaagatagaagcttgtttgttctgttatttagtcatgtctgcccctcaaactactgaaacctaaaatctgaaactgaaaatctgaaaatataaaactaaaaatatgaaactgaatattgtatgtcatgtttgtgtcatgttttcttagactgcattgaactccaacagagactgagaaacatggaattatagctagaacttggatctatggctgtgatattcttgcttgcggaaactgggaattatagagagacggaaatactttttaaattagaatctaactacaattcgatttagttcaagtcaatattcagagttctactttctggaattattcagagttcagttattcaaagttattaatagctatacttagccacccatgatgtagtcaagaaaaaaataactgaactcttctgcttataatttcaactatattaatagatattgttatcaggtgtttaaaaagaatgtggtcatcttgtgtgacatttgtgttcttaaattgttgctctgcttataaccttttttacaatgtactcatcagttctatactcgcagccaaaatctatagtgggaactcctgcatacattgctcatgaggttcttctgaagaaggaatacaatggaaaggttttatgcgtagtgtcgttaattattctacacttgacatactgtttttgtttagtgtgcatgttattattctccacttgaacaacatgtttgtttgtcaaaacattttatacacgcacgatttgtagtcatgcataacagggaactatgttggaaggttcgaatgctaaattagtcactaactctttgttactgaactaaggttgctgatgtgtggtcatgcggagtgatgccatacgtgatgctgacgatcaccatccctgagataagaaaccatccatggttcttgaaaaacctcctagctgaccaaatggatgacaatacgatgagtaagcagtacgaggagcctgaacaaccgatgcagagcatgaatgagttcatgcagatcctggttgaggcgaccattccagcagttggttcacgtggactcaatcagtttctgaatgatgacattgacctcgacgatgacatggaggacctagactcagatgccggtcttgacctggaaagcagtggggagatcgtgtatgctatttgacaacattgaatactttgttgtgtcgtaggttaccaagataattagagacaaggggcaggttgttgtgcttgcaagtatctgttgcagctgttgttcatgcctgatgttgatgcctcttttcatactgttgtgtttggatggtgtaccaccagtgttttacaacagtttggcccttggaattgctattgctaaaacttggttcctctgagaagaccttttgtttttgtattcccagtcgagggacggtgaagtacttatattattacaaaattgtt

SEQ ID NO: 74177 - DNA, 3721 bp, Zea Mays
acgtactctgtcaaacgatacgccgcgatgcttccagacgagcgccatccccttcctcgcctcacacgccgtcctgttggtcgtgcctctcttcaacctttttttcttgagcattagcgagagccccttacatggtgcagtgctagcatcgttgctggcgacctcggtgaggtcggatctgcaaaggttgcagctagcgcgcctacactacatcaacatggtgtggcatctcctttcgcagatccccaacatgctacgccgccggctgcctcattggaactcctgtgcaccgcttgcctttcttctcccattcaacccgcaggcgttccctggctcaatagcgcaactaggggatgtccgccgctacctccatataggaaacgacagatttagattttcaggtgatgcgtggtcgggatcccggatcaatcaaaataagtgtgaaataagtgtgaaatttgagaggctgttgaacttccagatcaggtaccaaccaaaaaaagtgacccttttgacggcgtattgcgtgggcaaggcatgccagtgcgacaatagagaaactaacggggagctctgttcgttctgctgattgcttatgattaggctcgcagtggtggtagctgggagagcttgggactggccagacgcgaccaactcacccatgtaataagacaacttttatacatagccgacagtacgcaacctcatgcgcaagatccttaatgaaaccaaagagctgcagcagataaccaacgacaagcagaaaaatcaggcccagacaatggagatgatgtatacgataattgcagatgagttcaagtcaatggacaataaggacatgcgccctgaagattacttgaacttcttttgtcttggaaaccgggaagaaccaccatctaatggcagcccagaatcagagaaatctacatataaaagtgcagagatagtctgtttttgcattttccttattcttaagggtatggcttagctcaacccttctgattacaccaaaactgaatatggttttggcgcacggaccttatgggaagctagagaagcatttgaagacgcagaaattactcatgttgacgatacagtagatcctgttagagacatggaaactattagtgaagagctcagactaaagttttcgttggattttgttgatttacaagatcagctgtacaacacttaaaccttttttcgacactattctgtttctattttctgcaggatatagagttcatgaaaaagaaacttgaggaccttgataagccaatgaagaggaggaatgataagctgctcaaaattgagcatgaattatattgatccagcacaatgccgaggagactggagactaaacttggaggtgctactgaaggatgtgactttgagtcaaagggtagcacatggagagcttgaattgaattcaagcttggatatgattggaaaatatttgtattagatcacctagaagggtgattgatgcttgttattggccaagcaggtagtcagatgaagattgtaaaaaacaagcatgcttaacccttcaagaatgcacagtttgagcttgaatttggaaaggggatatgccacagttcagagttttttgaacagaatttctggagcagttgttcctataaaataatattttaggtcttgaagccaccaccgtttggattgacatgatctgtggtattctggtgatctcattatagcagacttcatttcttattgtgcttatacagtagtgtagcgggaagagaattcacattgcatgaaatcatgttgatagctaagaggtggaagttgaagtaagccgggaagggtgaggtattgggaactgtggcatttaaagttcagtaggcagcagtaaactgtagtggtgtggtcgtgtacataagatgtgcacattttgaactcaggcattctttattgagtgctgctagaattacattgagctccctccacttctgatacttgcctggttttgcgtcaattggatctgtttgtccgtcctcaacactgttgtctgtttttgctaatttgggcattatctatgacagaagaagaacgattatgaattatagattaaattgaacataatgttgttctaagaacaaaaacagattatttcactgaatattttctcatcgcaagatgtactaaatagtaggttcactacagtcttacagaagccaataacccacttgatcttgctataatgatgttcttagaatacttatagatgtgttggctggaacattagctctgacaagatagaagcttgtttgttctgttatttagtcatgtctgcccctcaaactactgaaacctaaaatctgaaactgaaaatctgaaaatataaaactaaaaatatgaaactgaatattgtatgtcatgtttgtgtcatgttttcttagactgcattgaactccaacagagactgagaaacatggaattatagctagaacttggatctatggctgtgatattcttgcttgcggaaactgggaattatagagagacggaaatactttttaaattagaatctaactacaattcgatttagttcaagtcaatattcagagttctactttctggaattattcagagttcagttattcaaagttattaatagctatacttagccacccatgatgtagtcaagaaaaaaataactgaactcttctgcttataatttcaactatattaatagatattgttatcaggtgtttaaaaagaatgtggtcatcttgtgtgacatttgtgttcttaaattgttgctctgcttataaccttttttacaatgtactcatcagttctatactcgcagccaaaatctatagtgggaactcctgcatacattgctcatgaggttcttctgaagaaggaatacaatggaaaggttttatgcgtagtgtcgttaattattctacacttgacatactgtttttgtttagtgtgcatgttattattctccacttgaacaacatgtttgtttgtcaaaacattttatacacgcacgatttgtagtcatgcataacagggaactatgttggaaggttcgaatgctaaattagtcactaactctttgttactgaactaaggttgctgatgtgtggtcatgcggagtgatgccatacgtgatgctgacgatcaccatccctgagataagaaaccatccatggttcttgaaaaacctcctagctgaccaaatggatgacaatacgatgagtaagcagtacgaggagcctgaacaaccgatgcagagcatgaatgagttcatgcagatcctggttgaggcgaccattccagcagttggttcacgtggactcaatcagtttctgaatgatgacattgacctcgacgatgacatggaggacctagactcagatgccggtcttgacctggaaagcagtggggagatcgtgtatgctatttgacaacattgaatactttgttgtgtcgtaggttaccaagataattagagacaaggggcaggttgttgtgcttgcaagtatctgttgcagctgttgttcatgcctgatgttgatgcctcttttcatactgttgtgtttggatggtgtaccaccagtgttttacaacagtttggcccttggaattgctattgctaaaacttggttcctctgagaagaccttttgtttttgtattcccagtcgagggacggtgaagtacttatattattacaaaattgtt

SEQ ID NO: 74178 - DNA, 2178 bp, Zea Mays
acgtactctgtcaaacgatacgccgcgatgcttccagacgagcgccatccccttcctcgcctcacacgccgtcctgttggtcgtgcctctcttcaacctttttttcttgagcattagcgagagccccttacatggtgcagtgctagcatcgttgctggcgacctcggtgaggtcggatctgcaaaggttgcagctagcgcgcctacactacatcaacatggtgtggcatctcctttcgcagatccccaacatgctacgccgccggctgcctcattggaactcctgtgcaccgcttgcctttcttctcccattcaacccgcaggcgttccctggctcaatagcgcaactaggggatgtccgccgctacctccatataggaaacgacagatttagattttcaggtgatgcgtggtcgggatcccggatcaatcaaaataagtgtgaaataagtgtgaaatttgagaggctgttgaacttccagatcaggtaccaaccaaaaaaagtgacccttttgacggcgtattgcgtgggcaaggcatgccagtgcgacaatagagaaactaacggggagctctgttcgttctgctgattgcttatgattaggctcgcagtggtggtagctgggagagcttgggactggccagacgcgaccaactcacccatgtaataagacaacttttatacatagccgacagtacgcaacctcatgcgcaagatccttaatgaaaccaaagagctgcagcagataaccaacgacaagcagaaaaatcaggttgtacgcatccaacattttactttcatatttgctgaagatgtcaacaaacaaaatagacaagcagcccagacaatggagatgatgtatacgataattgcagatgagttcaagtcaatggacaataaggacatgcgccctgaagattacttgaacttcttttgtcttggaaaccgggaagaaccaccatctaatggcagcccagaatcagagaaatctacatataaaagtgcagagatagtctgtttttgcattttccttattcttaaggaagcatttgaagacgcagaaattactcatgttgacgatacagtagatcctgttagagacatggaaactattagtgaagagctcagactaaagttttcgttggattttgttgatttacaagatcagctgtacaacacttaaaccttttttcgacactattctgtttctattttctgcaggatatagagttcatgaaaaagaaacttgaggaccttgataagccaatgaagaggaggaatgataagctgctcaaaattgagcatgaattatattgatccagcacaatgccgaggagactggagactaaacttggaggtgctactgaaggatgtgactttgagtcaaagggtagcacatggagagcttgaattgaattcaagcttggatatgattggaaaatatttgtattagatcacctagaagggtgattgatgcttgttattggccaagcagccaaaatctatagtgggaactcctgcatacattgctcatgaggttcttctgaagaaggaatacaatggaaaggttgctgatgtgtggtcatgcggagtgatgccatacgtgatgctgacgatcaccatccctgagataagaaaccatccatggttcttgaaaaacctcctagctgaccaaatggatgacaatacgatgagtaagcagtacgaggagcctgaacaaccgatgcagagcatgaatgagttcatgcagatcctggttgaggcgaccattccagcagttggttcacgtggactcaatcagtttctgaatgatgacattgacctcgacgatgacatggaggacctagactcagatgccggtcttgacctggaaagcagtggggagatcgtgtatgctatttgacaacattgaatactttgttgtgtcgtaggttaccaagataattagagacaaggggcaggttgttgtgcttgcaagtatctgttgcagctgttgttcatgcctgatgttgatgcctcttttcatactgttgtgtttggatggtgtaccaccagtgttttacaacagtttggcccttggaattgctattgctaaaacttggttcctctgagaagaccttttgtttttgtattcccagtcgagggacggtgaagtacttatattattacaaaattgtt

SEQ ID NO: 74179 - DNA, 2599 bp, Zea Mays
acgtactctgtcaaacgatacgccgcgatgcttccagacgagcgccatccccttcctcgcctcacacgccgtcctgttggtcgtgcctctcttcaacctttttttcttgagcattagcgagagccccttacatggtgcagtgctagcatcgttgctggcgacctcggtgaggtcggatctgcaaaggttgcagctagcgcgcctacactacatcaacatggtgtggcatctcctttcgcagatccccaacatgctacgccgccggctgcctcattggaactcctgtgcaccgcttgcctttcttctcccattcaacccgcaggcgttccctggctcaatagcgcaactaggggatgtccgccgctacctccatataggaaacgacagatttagattttcaggtgatgcgtggtcgggatcccggatcaatcaaaataagtgtgaaataagtgtgaaatttgagaggctgttgaacttccagatcaggtaccaaccaaaaaaagtgacccttttgacggcgtattgcgtgggcaaggcatgccagtgcgacaatagagaaactaacggggagctctgttcgttctgctgattgcttatgattaggctcgcagtggtggtagctgggagagcttgggactggccagacgcgaccaactcacccatgtaataagacaacttttatacatagccgacagtacgcaacctcatgcgcaagatccttaatgaaaccaaagagctgcagcagataaccaacgacaagcagaaaaatcaggttgtacgcatccaacattttactttcatatttgctgaagatgtcaacaaacaaaatagacaagcagcccagacaatggagatgatgtatacgataattgcagatgagttcaagtcaatggacaataaggacatgcgccctgaagattacttgaacttcttttgtcttggaaaccgggaagaaccaccatctaatggcagcccagaatcagagaaatctacatataaaagtgcagagatagtctgtttttgcattttccttattcttaagggtatggcttagctcaacccttctgattacaccaaaactgaatatggttttggcgcacggaccttatgggaagctagaggtctgagctattgggaagctagaatttatgtttttatcaatgtttagtcattaactaattaattgcatatcgttttgttgtatatttattaactaatcgagtgttgcatacggttttcagaagcatttgaagacgcagaaattactcatgttgacgatacagtagatcctgttagagacatggaaactattagtgaagagctcagactaaagttttcgttggattttgttgatttacaagatcagctgtacaacacttaaaccttttttcgacactattctgtttctattttctgcaggatatagagttcatgaaaaagaaacttgaggaccttgataagccaatgaagaggaggaatgataagctgctcaaaattgagcatgaattatattgatccagcacaatgccgaggagactggagactaaacttggaggtgctactgaaggatgtgactttgagtcaaagggtagcacatggagagcttgaattgaattcaagcttggatatgattggaaaatatttgtattagatcacctagaagggtgattgatgcttgttattggccaagcagacaatagttctatactcgcagccaaaatctatagtgggaactcctgcatacattgctcatgaggttcttctgaagaaggaatacaatggaaaggttttatgcgtagtgtcgttaattattctacacttgacatactgtttttgtttagtgtgcatgttattattctccacttgaacaacatgtttgtttgtcaaaacattttatacacgcacgatttgtagtcatgcataacagggaactatgttggaaggttcgaatgctaaattagtcactaactctttgttactgaactaaggttgctgatgtgtggtcatgcggagtgatgccatacgtgatgctgacgatcaccatccctgagataagaaaccatccatggttcttgaaaaacctcctagctgaccaaatggatgacaatacgatgagtaagcagtacgaggagcctgaacaaccgatgcagagcatgaatgagttcatgcagatcctggttgaggcgaccattccagcagttggttcacgtggactcaatcagtttctgaatgatgacattgacctcgacgatgacatggaggacctagactcagatgccggtcttgacctggaaagcagtggggagatcgtgtatgctatttgacaacattgaatactttgttgtgtcgtaggttaccaagataattagagacaaggggcaggttgttgtgcttgcaagtatctgttgcagctgttgttcatgcctgatgttgatgcctcttttcatactgttgtgtttggatggtgtaccaccagtgttttacaacagtttggcccttggaattgctattgctaaaacttggttcctctgagaagaccttttgtttttgtattcccagtcgagggacggtgaagtacttatattattacaaaattgtt

SEQ ID NO: 74180 - DNA, 3794 bp, Zea Mays
acgtactctgtcaaacgatacgccgcgatgcttccagacgagcgccatccccttcctcgcctcacacgccgtcctgttggtcgtgcctctcttcaacctttttttcttgagcattagcgagagccccttacatggtgcagtgctagcatcgttgctggcgacctcggtgaggtcggatctgcaaaggttgcagctagcgcgcctacactacatcaacatggtgtggcatctcctttcgcagatccccaacatgctacgccgccggctgcctcattggaactcctgtgcaccgcttgcctttcttctcccattcaacccgcaggcgttccctggctcaatagcgcaactaggggatgtccgccgctacctccatataggaaacgacagatttagattttcaggtgatgcgtggtcgggatcccggatcaatcaaaataagtgtgaaataagtgtgaaatttgagaggctgttgaacttccagatcaggtaccaaccaaaaaaagtgacccttttgacggcgtattgcgtgggcaaggcatgccagtgcgacaatagagaaactaacggggagctctgttcgttctgctgattgcttatgattaggctcgcagtggtggtagctgggagagcttgggactggccagacgcgaccaactcacccatgtaataagacaacttttatacatagccgacagtacgcaacctcatgcgcaagatccttaatgaaaccaaagagctgcagcagataaccaacgacaagcagaaaaatcaggttgtacgcatccaacattttactttcatatttgctgaagatgtcaacaaacaaaatagacaagcagcccagacaatggagatgatgtatacgataattgcagatgagttcaagtcaatggacaataaggacatgcgccctgaagattacttgaacttcttttgtcttggaaaccgggaagaaccaccatctaatggcagcccagaatcagagaaatctacatataaaagtgcagagatagtctgtttttgcattttccttattcttaagggtatggcttagctcaacccttctgattacaccaaaactgaatatggttttggcgcacggaccttatgggaagctagagaagcatttgaagacgcagaaattactcatgttgacgatacagtagatcctgttagagacatggaaactattagtgaagagctcagactaaagttttcgttggattttgttgatttacaagatcagctgtacaacacttaaaccttttttcgacactattctgtttctattttctgcaggatatagagttcatgaaaaagaaacttgaggaccttgataagccaatgaagaggaggaatgataagctgctcaaaattgagcatgaattatattgatccagcacaatgccgaggagactggagactaaacttggaggtgctactgaaggatgtgactttgagtcaaagggtagcacatggagagcttgaattgaattcaagcttggatatgattggaaaatatttgtattagatcacctagaagggtgattgatgcttgttattggccaagcagacaataggtagtcagatgaagattgtaaaaaacaagcatgcttaacccttcaagaatgcacagtttgagcttgaatttggaaaggggatatgccacagttcagagttttttgaacagaatttctggagcagttgttcctataaaataatattttaggtcttgaagccaccaccgtttggattgacatgatctgtggtattctggtgatctcattatagcagacttcatttcttattgtgcttatacagtagtgtagcgggaagagaattcacattgcatgaaatcatgttgatagctaagaggtggaagttgaagtaagccgggaagggtgaggtattgggaactgtggcatttaaagttcagtaggcagcagtaaactgtagtggtgtggtcgtgtacataagatgtgcacattttgaactcaggcattctttattgagtgctgctagaattacattgagctccctccacttctgatacttgcctggttttgcgtcaattggatctgtttgtccgtcctcaacactgttgtctgtttttgctaatttgggcattatctatgacagaagaagaacgattatgaattatagattaaattgaacataatgttgttctaagaacaaaaacagattatttcactgaatattttctcatcgcaagatgtactaaatagtaggttcactacagtcttacagaagccaataacccacttgatcttgctataatgatgttcttagaatacttatagatgtgttggctggaacattagctctgacaagatagaagcttgtttgttctgttatttagtcatgtctgcccctcaaactactgaaacctaaaatctgaaactgaaaatctgaaaatataaaactaaaaatatgaaactgaatattgtatgtcatgtttgtgtcatgttttcttagactgcattgaactccaacagagactgagaaacatggaattatagctagaacttggatctatggctgtgatattcttgcttgcggaaactgggaattatagagagacggaaatactttttaaattagaatctaactacaattcgatttagttcaagtcaatattcagagttctactttctggaattattcagagttcagttattcaaagttattaatagctatacttagccacccatgatgtagtcaagaaaaaaataactgaactcttctgcttataatttcaactatattaatagatattgttatcaggtgtttaaaaagaatgtggtcatcttgtgtgacatttgtgttcttaaattgttgctctgcttataaccttttttacaatgtactcatcagttctatactcgcagccaaaatctatagtgggaactcctgcatacattgctcatgaggttcttctgaagaaggaatacaatggaaaggttttatgcgtagtgtcgttaattattctacacttgacatactgtttttgtttagtgtgcatgttattattctccacttgaacaacatgtttgtttgtcaaaacattttatacacgcacgatttgtagtcatgcataacagggaactatgttggaaggttcgaatgctaaattagtcactaactctttgttactgaactaaggttgctgatgtgtggtcatgcggagtgatgccatacgtgatgctgacgatcaccatccctgagataagaaaccatccatggttcttgaaaaacctcctagctgaccaaatggatgacaatacgatgagtaagcagtacgaggagcctgaacaaccgatgcagagcatgaatgagttcatgcagatcctggttgaggcgaccattccagcagttggttcacgtggactcaatcagtttctgaatgatgacattgacctcgacgatgacatggaggacctagactcagatgccggtcttgacctggaaagcagtggggagatcgtgtatgctatttgacaacattgaatactttgttgtgtcgtaggttaccaagataattagagacaaggggcaggttgttgtgcttgcaagtatctgttgcagctgttgttcatgcctgatgttgatgcctcttttcatactgttgtgtttggatggtgtaccaccagtgttttacaacagtttggcccttggaattgctattgctaaaacttggttcctctgagaagaccttttgtttttgtattcccagtcgagggacggtgaagtacttatattattacaaaattgtt

SEQ ID NO: 74181 - DNA, 3507 bp, Zea Mays
acgtactctgtcaaacgatacgccgcgatgcttccagacgagcgccatccccttcctcgcctcacacgccgtcctgttggtcgtgcctctcttcaacctttttttcttgagcattagcgagagccccttacatggtgcagtgctagcatcgttgctggcgacctcggtgaggtcggatctgcaaaggttgcagctagcgcgcctacactacatcaacatggtgtggcatctcctttcgcagatccccaacatgctacgccgccggctgcctcattggaactcctgtgcaccgcttgcctttcttctcccattcaacccgcaggcgttccctggctcaatagcgcaactaggggatgtccgccgctacctccatataggaaacgacagatttagattttcaggtgatgcgtggtcgggatcccggatcaatcaaaataagtgtgaaataagtgtgaaatttgagaggctgttgaacttccagatcaggtaccaaccaaaaaaagtgacccttttgacggcgtattgcgtgggcaaggcatgccagtgcgacaatagagaaactaacggggagctctgttcgttctgctgattgcttatgattaggctcgcagtggtggtagctgggagagcttgggactggccagacgcgaccaactcacccatgtaataagacaacttttatacatagccgacagtacgcaacctcatgcgcaagatccttaatgaaaccaaagagctgcagcagataaccaacgacaagcagaaaaatcaggttgtacgcatccaacattttactttcatatttgctgaagatgtcaacaaacaaaatagacaagcagcccagacaatggagatgatgtatacgataattgcagatgagttcaagtcaatggacaataaggacatgcgccctgaagattacttgaacttcttttgtcttggaaaccgggaagaaccaccatctaatggcagcccagaatcagagaaatctacatataaaagtgcagagatagatatagagttcatgaaaaagaaacttgaggaccttgataagccaatgaagaggaggaatgataagctgctcaaaattgagcatgaattatattgatccagcacaatgccgaggagactggagactaaacttggaggtgctactgaaggatgtgactttgagtcaaagggtagcacatggagagcttgaattgaattcaagcttggatatgattggaaaatatttgtattagatcacctagaagggtgattgatgcttgttattggccaagcagacaataggtagtcagatgaagattgtaaaaaacaagcatgcttaacccttcaagaatgcacagtttgagcttgaatttggaaaggggatatgccacagttcagagttttttgaacagaatttctggagcagttgttcctataaaataatattttaggtcttgaagccaccaccgtttggattgacatgatctgtggtattctggtgatctcattatagcagacttcatttcttattgtgcttatacagtagtgtagcgggaagagaattcacattgcatgaaatcatgttgatagctaagaggtggaagttgaagtaagccgggaagggtgaggtattgggaactgtggcatttaaagttcagtaggcagcagtaaactgtagtggtgtggtcgtgtacataagatgtgcacattttgaactcaggcattctttattgagtgctgctagaattacattgagctccctccacttctgatacttgcctggttttgcgtcaattggatctgtttgtccgtcctcaacactgttgtctgtttttgctaatttgggcattatctatgacagaagaagaacgattatgaattatagattaaattgaacataatgttgttctaagaacaaaaacagattatttcactgaatattttctcatcgcaagatgtactaaatagtaggttcactacagtcttacagaagccaataacccacttgatcttgctataatgatgttcttagaatacttatagatgtgttggctggaacattagctctgacaagatagaagcttgtttgttctgttatttagtcatgtctgcccctcaaactactgaaacctaaaatctgaaactgaaaatctgaaaatataaaactaaaaatatgaaactgaatattgtatgtcatgtttgtgtcatgttttcttagactgcattgaactccaacagagactgagaaacatggaattatagctagaacttggatctatggctgtgatattcttgcttgcggaaactgggaattatagagagacggaaatactttttaaattagaatctaactacaattcgatttagttcaagtcaatattcagagttctactttctggaattattcagagttcagttattcaaagttattaatagctatacttagccacccatgatgtagtcaagaaaaaaataactgaactcttctgcttataatttcaactatattaatagatattgttatcaggtgtttaaaaagaatgtggtcatcttgtgtgacatttgtgttcttaaattgttgctctgcttataaccttttttacaatgtactcatcagttctatactcgcagccaaaatctatagtgggaactcctgcatacattgctcatgaggttcttctgaagaaggaatacaatggaaaggttttatgcgtagtgtcgttaattattctacacttgacatactgtttttgtttagtgtgcatgttattattctccacttgaacaacatgtttgtttgtcaaaacattttatacacgcacgatttgtagtcatgcataacagggaactatgttggaaggttcgaatgctaaattagtcactaactctttgttactgaactaaggttgctgatgtgtggtcatgcggagtgatgccatacgtgatgctgacgatcaccatccctgagataagaaaccatccatggttcttgaaaaacctcctagctgaccaaatggatgacaatacgatgagtaagcagtacgaggagcctgaacaaccgatgcagagcatgaatgagttcatgcagatcctggttgaggcgaccattccagcagttggttcacgtggactcaatcagtttctgaatgatgacattgacctcgacgatgacatggaggacctagactcagatgccggtcttgacctggaaagcagtggggagatcgtgtatgctatttgacaacattgaatactttgttgtgtcgtaggttaccaagataattagagacaaggggcaggttgttgtgcttgcaagtatctgttgcagctgttgttcatgcctgatgttgatgcctcttttcatactgttgtgtttggatggtgtaccaccagtgttttacaacagtttggcccttggaattgctattgctaaaacttggttcctctgagaagaccttttgtttttgtattcccagtcgagggacggtgaagtacttatattattacaaaattgtt

SEQ ID NO: 74182 - DNA, 3554 bp, Zea Mays
acgtactctgtcaaacgatacgccgcgatgcttccagacgagcgccatccccttcctcgcctcacacgccgtcctgttggtcgtgcctctcttcaacctttttttcttgagcattagcgagagccccttacatggtgcagtgctagcatcgttgctggcgacctcggtgaggtcggatctgcaaaggttgcagctagcgcgcctacactacatcaacatggtgtggcatctcctttcgcagatccccaacatgctacgccgccggctgcctcattggaactcctgtgcaccgcttgcctttcttctcccattcaacccgcaggcgttccctggctcaatagcgcaactaggggatgtccgccgctacctccatataggaaacgacagatttagattttcaggtgatgcgtggtcgggatcccggatcaatcaaaataagtgtgaaataagtgtgaaatttgagaggctgttgaacttccagatcaggtaccaaccaaaaaaagtgacccttttgacggcgtattgcgtgggcaaggcatgccagtgcgacaatagagaaactaacggggagctctgttcgttctgctgattgcttatgattaggctcgcagtggtggtagctgggagagcttgggactggccagacgcgaccaactcacccatgtaataagacaacttttatacatagccgacagtacgcaacctcatgcgcaagatccttaatgaaaccaaagagctgcagcagataaccaacgacaagcagaaaaatcaggttgtacgcatccaacattttactttcatatttgctgaagatgtcaacaaacaaaatagacaagcagcccagacaatggagatgatgtatacgataattgcagatgagttcaagtcaatggacaataaggacatgcgccctgaagattacttgaacttcttttgtcttggaaaccgggaagaaccaccatctaatggcagcccagaatcagagaaatctacatataaaagtgcagagatagtctgtttttgcattttccttattcttaagggtatggcttagctcaacccttctgattacaccaaaactgaatatggttttggcgcacggaccttatgggaagctagagaagcatttgaagacgcagaaattactcatgttgacgatacagtagatcctgttagagacatggaaactattagtgaagagctcagactaaagttttcgttggattttgttgatttacaagatcagctgtacaacacttaaaccttttttcgacactattctgtttctattttctgcaggatatagagttcatgaaaaagaaacttgaggaccttgataagccaatgaagaggaggaatgataagctgctcaaaattgagcatgaattatgtgagaggattgatccagcacaatgccgaggagactggagactaaacttggaggtgctactgaaggatgtgactttgagtcaaagggtagcacatggagagcttgaattgaattcaagcttggatatgattggaaaatatttgtattagatcacctagaagggtgattgatgcttgttattggccaagcagtagtgtagcgggaagagaattcacattgcatgaaatcatgttgatagctaagaggtggaagttgaagtaagccgggaagggtgaggtattgggaactgtggcatttaaagttcagtaggcagcagtaaactgtagtggtgtggtcgtgtacataagatgtgcacattttgaactcaggcattctttattgagtgctgctagaattacattgagctccctccacttctgatacttgcctggttttgcgtcaattggatctgtttgtccgtcctcaacactgttgtctgtttttgctaatttgggcattatctatgacagaagaagaacgattatgaattatagattaaattgaacataatgttgttctaagaacaaaaacagattatttcactgaatattttctcatcgcaagatgtactaaatagtaggttcactacagtcttacagaagccaataacccacttgatcttgctataatgatgttcttagaatacttatagatgtgttggctggaacattagctctgacaagatagaagcttgtttgttctgttatttagtcatgtctgcccctcaaactactgaaacctaaaatctgaaactgaaaatctgaaaatataaaactaaaaatatgaaactgaatattgtatgtcatgtttgtgtcatgttttcttagactgcattgaactccaacagagactgagaaacatggaattatagctagaacttggatctatggctgtgatattcttgcttgcggaaactgggaattatagagagacggaaatactttttaaattagaatctaactacaattcgatttagttcaagtcaatattcagagttctactttctggaattattcagagttcagttattcaaagttattaatagctatacttagccacccatgatgtagtcaagaaaaaaataactgaactcttctgcttataatttcaactatattaatagatattgttatcaggtgtttaaaaagaatgtggtcatcttgtgtgacatttgtgttcttaaattgttgctctgcttataaccttttttacaatgtactcatcagttctatactcgcagccaaaatctatagtgggaactcctgcatacattgctcatgaggttcttctgaagaaggaatacaatggaaaggttttatgcgtagtgtcgttaattattctacacttgacatactgtttttgtttagtgtgcatgttattattctccacttgaacaacatgtttgtttgtcaaaacattttatacacgcacgatttgtagtcatgcataacagggaactatgttggaaggttcgaatgctaaattagtcactaactctttgttactgaactaaggttgctgatgtgtggtcatgcggagtgatgccatacgtgatgctgacgatcaccatccctgagataagaaaccatccatggttcttgaaaaacctcctagctgaccaaatggatgacaatacgatgagtaagcagtacgaggagcctgaacaaccgatgcagagcatgaatgagttcatgcagatcctggttgaggcgaccattccagcagttggttcacgtggactcaatcagtttctgaatgatgacattgacctcgacgatgacatggaggacctagactcagatgccggtcttgacctggaaagcagtggggagatcgtgtatgctatttgacaacattgaatactttgttgtgtcgtaggttaccaagataattagagacaaggggcaggttgttgtgcttgcaagtatctgttgcagctgttgttcatgcctgatgttgatgcctcttttcatactgttgtgtttggatggtgtaccaccagtgttttacaacagtttggcccttggaattgctattgctaaaacttggttcctctgagaagaccttttgtttttgtattcccagtcgagggacggtgaagtacttatattattacaaaattgtt

SEQ ID NO: 74183 - DNA, 2293 bp, Zea Mays
acgtactctgtcaaacgatacgccgcgatgcttccagacgagcgccatccccttcctcgcctcacacgccgtcctgttggtcgtgcctctcttcaacctttttttcttgagcattagcgagagccccttacatggtgcagtgctagcatcgttgctggcgacctcggtgaggtcggatctgcaaaggttgcagctagcgcgcctacactacatcaacatggtgtggcatctcctttcgcagatccccaacatgctacgccgccggctgcctcattggaactcctgtgcaccgcttgcctttcttctcccattcaacccgcaggcgttccctggctcaatagcgcaactaggggatgtccgccgctacctccatataggaaacgacagatttagattttcaggtgatgcgtggtcgggatcccggatcaatcaaaataagtgtgaaataagtgtgaaatttgagaggctgttgaacttccagatcaggtaccaaccaaaaaaagtgacccttttgacggcgtattgcgtgggcaaggcatgccagtgcgacaatagagaaactaacggggagctctgttcgttctgctgattgcttatgattaggctcgcagtggtggtagctgggagagcttgggactggccagacgcgaccaactcacccatgtaataagacaacttttatacatagccgacagtacgcaacctcatgcgcaagatccttaatgaaaccaaagagctgcagcagataaccaacgacaagcagaaaaatcaggcccagacaatggagatgatgtatacgataattgcagatgagttcaagtcaatggacaataaggacatgcgccctgaagattacttgaacttcttttgtcttggaaaccgggaagaaccaccatctaatggcagcccagaatcagagaaatctacatataaaagtgcagagatagtctgtttttgcattttccttattcttaagggtatggcttagctcaacccttctgattacaccaaaactgaatatggttttggcgcacggaccttatgggaagctagaggtctgagctattgggaagctagaatttatgtttttatcaatgtttagtcattaactaattaattgcatatcgttttgttgtatatttattaactaatcgagtgttgcatacggttttcagaagcatttgaagacgcagaaattactcatgttgacgatacagtagatcctgttagagacatggaaactattagtgaagagctcagactaaagttttcgttggattttgttgatttacaagatcagctgtacaacacttaaaccttttttcgacactattctgtttctattttctgcaggatatagagttcatgaaaaagaaacttgaggaccttgataagccaatgaagaggaggaatgataagctgctcaaaattgagcatgaattatattgatccagcacaatgccgaggagactggagactaaacttggaggtgctactgaaggatgtgactttgagtcaaaggtaacaggtagcacatggagagcttgaattgaattcaagcttggatatgattggaaaatatttgtattagatcacctagaagggtgattgatgcttgttattggccaagcagccaaaatctatagtgggaactcctgcatacattgctcatgaggttcttctgaagaaggaatacaatggaaaggttgctgatgtgtggtcatgcggagtgatgccatacgtgatgctgaaaccatccatggttcttgaaaaacctcctagctgaccaaatggatgacaatacgatgagtaagcagtacgaggagcctgaacaaccgatgcagagcatgaatgagttcatgcagatcctggttgaggcgaccattccagcagttggttcacgtggactcaatcagtttctgaatgatgacattgacctcgacgatgacatggaggacctagactcagatgccggtcttgacctggaaagcagtggggagatcgtgtatgctatttgacaacattgaatactttgttgtgtcgtaggttaccaagataattagagacaaggggcaggttgttgtgcttgcaagtatctgttgcagctgttgttcatgcctgatgttgatgcctcttttcatactgttgtgtttggatggtgtaccaccagtgttttacaacagtttggcccttggaattgctattgctaaaacttggttcctctgagaagaccttttgtttttgtattcccagtcgagggacggtgaagtacttatattattacaaaattgtt

SEQ ID NO: 74184 - DNA, 2256 bp, Zea Mays
acgtactctgtcaaacgatacgccgcgatgcttccagacgagcgccatccccttcctcgcctcacacgccgtcctgttggtcgtgcctctcttcaacctttttttcttgagcattagcgagagccccttacatggtgcagtgctagcatcgttgctggcgacctcggtgaggtcggatctgcaaaggttgcagctagcgcgcctacactacatcaacatggtgtggcatctcctttcgcagatccccaacatgctacgccgccggctgcctcattggaactcctgtgcaccgcttgcctttcttctcccattcaacccgcaggcgttccctggctcaatagcgcaactaggggatgtccgccgctacctccatataggaaacgacagatttagattttcaggtgatgcgtggtcgggatcccggatcaatcaaaataagtgtgaaataagtgtgaaatttgagaggctgttgaacttccagatcaggtaccaaccaaaaaaagtgacccttttgacggcgtattgcgtgggcaaggcatgccagtgcgacaatagagaaactaacggggagctctgttcgttctgctgattgcttatgattaggctcgcagtggtggtagctgggagagcttgggactggccagacgcgaccaactcacccatgtaataagacaacttttatacatagccgacagtacgcaacctcatgcgcaagatccttaatgaaaccaaagagctgcagcagataaccaacgacaagcagaaaaatcaggttgtacgcatccaacattttactttcatatttgctgaagatgtcaacaaacaaaatagacaagcagcccagacaatggagatgatgtatacgataattgcagatgagttcaagtcaatggacaataaggacatgcgccctgaagattacttgaacttcttttgtcttggaaaccgggaagaaccaccatctaatggcagcccagaatcagagaaatctacatataaaagtgcagagatagtctgtttttgcattttccttattcttaagggtatggcttagctcaacccttctgattacaccaaaactgaatatggttttggcgcacggaccttatgggaagctagagaagcatttgaagacgcagaaattactcatgttgacgatacagtagatcctgttagagacatggaaactattagtgaagagctcagactaaagttttcgttggattttgttgatttacaagatcagctgtacaacacttaaaccttttttcgacactattctgtttctattttctgcaggatatagagttcatgaaaaagaaacttgaggaccttgataagccaatgaagaggaggaatgataagctgctcaaaattgagcatgaattatattgatccagcacaatgccgaggagactggagactaaacttggaggtgctactgaaggatgtgactttgagtcaaagggtagcacatggagagcttgaattgaattcaagcttggatatgattggaaaatatttgtattagatcacctagaagggtgattgatgcttgttattggccaagcagccaaaatctatagtgggaactcctgcatacattgctcatgaggttcttctgaagaaggaatacaatggaaaggttgctgatgtgtggtcatgcggagtgatgccatacgtgatgctgacgatcaccatccctgagataagaaaccatccatggttcttgaaaaacctcctagctgaccaaatggatgacaatacgatgagtaagcagtacgaggagcctgaacaaccgatgcagagcatgaatgagttcatgcagatcctggttgaggcgaccattccagcagttggttcacgtggactcaatcagtttctgaatgatgacattgacctcgacgatgacatggaggacctagactcagatgccggtcttgacctggaaagcagtggggagatcgtgtatgctatttgacaacattgaatactttgttgtgtcgtaggttaccaagataattagagacaaggggcaggttgttgtgcttgcaagtatctgttgcagctgttgttcatgcctgatgttgatgcctcttttcatactgttgtgtttggatggtgtaccaccagtgttttacaacagtttggcccttggaattgctattgctaaaacttggttcctctgagaagaccttttgtttttgtattcccagtcgagggacggtgaagtacttatattattacaaaattgtt

SEQ ID NO: 74185 - DNA, 2400 bp, Zea Mays
acgtactctgtcaaacgatacgccgcgatgcttccagacgagcgccatccccttcctcgcctcacacgccgtcctgttggtcgtgcctctcttcaacctttttttcttgagcattagcgagagccccttacatggtgcagtgctagcatcgttgctggcgacctcggtgaggtcggatctgcaaaggttgcagctagcgcgcctacactacatcaacatggtgtggcatctcctttcgcagatccccaacatgctacgccgccggctgcctcattggaactcctgtgcaccgcttgcctttcttctcccattcaacccgcaggcgttccctggctcaatagcgcaactaggggatgtccgccgctacctccatataggaaacgacagatttagattttcaggtgatgcgtggtcgggatcccggatcaatcaaaataagtgtgaaataagtgtgaaatttgagaggctgttgaacttccagatcaggtaccaaccaaaaaaagtgacccttttgacggcgtattgcgtgggcaaggcatgccagtgcgacaatagagaaactaacggggagctctgttcgttctgctgattgcttatgattaggctcgcagtggtggtagctgggagagcttgggactggccagacgcgaccaactcacccatgtaataagacaacttttatacatagccgacagtacgcaacctcatgcgcaagatccttaatgaaaccaaagagctgcagcagataaccaacgacaagcagaaaaatcaggttgtacgcatccaacattttactttcatatttgctgaagatgtcaacaaacaaaatagacaagcagcccagacaatggagatgatgtatacgataattgcagatgagttcaagtcaatggacaataaggacatgcgccctgaagattacttgaacttcttttgtcttggaaaccgggaagaaccaccatctaatggcagcccagaatcagagaaatctacatataaaagtgcagagatagtctgtttttgcattttccttattcttaagggtatggcttagctcaacccttctgattacaccaaaactgaatatggttttggcgcacggaccttatgggaagctagaggtctgagctattgggaagctagaatttatgtttttatcaatgtttagtcattaactaattaattgcatatcgttttgttgtatatttattaactaatcgagtgttgcatacggttttcagaagcatttgaagacgcagaaattactcatgttgacgatacagtagatcctgttagagacatggaaactattagtgaagagctcagactaaagttttcgttggattttgttgatttacaagatcagctgtacaacacttaaaccttttttcgacactattctgtttctattttctgcaggatatagagttcatgaaaaagaaacttgaggaccttgataagccaatgaagaggaggaatgataagctgctcaaaattgagcatgaattatattgatccagcacaatgccgaggagactggagactaaacttggaggtgctactgaaggatgtgactttgagtcaaagggtagcacatggagagcttgaattgaattcaagcttggatatgattggaaaatatttgtattagatcacctagaagggtgattgatgcttgttattggccaagcagccaaaatctatagtgggaactcctgcatacattgctcatgaggttcttctgaagaaggaatacaatggaaaggttgctgatgtgtggtcatgcggagtgatgccatacgtgatgctggaattactgatgttacctatacagacgatcaccatccctgagataagaaaccatccatggttcttgaaaaacctcctagctgaccaaatggatgacaatacgatgagtaagcagtacgaggagcctgaacaaccgatgcagagcatgaatgagttcatgcagatcctggttgaggcgaccattccagcagttggttcacgtggactcaatcagtttctgaatgatgacattgacctcgacgatgacatggaggacctagactcagatgccggtcttgacctggaaagcagtggggagatcgtgtatgctatttgacaacattgaatactttgttgtgtcgtaggttaccaagataattagagacaaggggcaggttgttgtgcttgcaagtatctgttgcagctgttgttcatgcctgatgttgatgcctcttttcatactgttgtgtttggatggtgtaccaccagtgttttacaacagtttggcccttggaattgctattgctaaaacttggttcctctgagaagaccttttgtttttgtattcccagtcgagggacggtgaagtacttatattattacaaaattgtt

SEQ ID NO: 74186 - DNA, 2709 bp, Zea Mays
acgtactctgtcaaacgatacgccgcgatgcttccagacgagcgccatccccttcctcgcctcacacgccgtcctgttggtcgtgcctctcttcaacctttttttcttgagcattagcgagagccccttacatggtgcagtgctagcatcgttgctggcgacctcggtgaggtcggatctgcaaaggttgcagctagcgcgcctacactacatcaacatggtgtggcatctcctttcgcagatccccaacatgctacgccgccggctgcctcattggaactcctgtgcaccgcttgcctttcttctcccattcaacccgcaggcgttccctggctcaatagcgcaactaggggatgtccgccgctacctccatataggaaacgacagatttagattttcaggtgatgcgtggtcgggatcccggatcaatcaaaataagtgtgaaataagtgtgaaatttgagaggctgttgaacttccagatcaggtaccaaccaaaaaaagtgacccttttgacggcgtattgcgtgggcaaggcatgccagtgcgacaatagagaaactaacggggagctctgttcgttctgctgattgcttatgattaggctcgcagtggtggtagctgggagagcttgggactggccagacgcgaccaactcacccatgtaataagacaacttttatacatagccgacagtacgcaacctcatgcgcaagatccttaatgaaaccaaagagctgcagcagataaccaacgacaagcagaaaaatcaggttgtacgcatccaacattttactttcatatttgctgaagatgtcaacaaacaaaatagacaagcagcccagacaatggagatgatgtatacgataattgcagatgagttcaagtcaatggacaataaggacatgcgccctgaagattacttgaacttcttttgtcttggaaaccgggaagaaccaccatctaatggcagcccagaatcagagaaatctacatataaaagtgcagagatagtctgtttttgcattttccttattcttaagggtatggcttagctcaacccttctgattacaccaaaactgaatatggttttggcgcacggaccttatgggaagctagaggtctgagctattgggaagctagaatttatgtttttatcaatgtttagtcattaactaattaattgcatatcgttttgttgtatatttattaactaatcgagtgttgcatacggttttcagaagcatttgaagacgcagaaattactcatgttgacgatacagtagatcctgttagagacatggaaactattagtgaagagctcagactaaagttttcgttggattttgttgatttacaagatcagctgtacaacacttaaaccttttttcgacactattctgtttctattttctgcaggatatagagttcatgaaaaagaaacttgaggaccttgataagccaatgaagaggaggaatgataagctgctcaaaattgagcatgaattatattgatccagcacaatgccgaggagactggagactaaacttggaggtgctactgaaggatgtgactttgagtcaaagggtagcacatggagagcttgaattgaattcaagcttggatatgattggaaaatatttgtattagatcacctagaagggtgattgatgcttgttattggccaagcagacaataggtagtcagatgaagattgtaaaaaacaagcatgcttaacccttcaagaatgcacagtttgagcttgaatttggaaaggggatatgccacagttcagagttttttgaacagaatttctggagcagttgttcctataaaataatattttaggtcttgaagccaccaccgtttggattgacatgatctgtggtattctggtgatctcattatagcagacttcatttcttattgtgcttatacagtagtgtagcgggaagagaattcacattgcatgaaatcatgttgatagctaagaggtggaagttgaagtaagccgggaagggtgagccaaaatctatagtgggaactcctgcatacattgctcatgaggttcttctgaagaaggaatacaatggaaaggttgctgatgtgtggtcatgcggagtgatgccatacgtgatgctgacgatcaccatccctgagataagaaaccatccatggttcttgaaaaacctcctagctgaccaaatggatgacaatacgatgagtaagcagtacgaggagcctgaacaaccgatgcagagcatgaatgagttcatgcagatcctggttgaggcgaccattccagcagttggttcacgtggactcaatcagtttctgaatgatgacattgacctcgacgatgacatggaggacctagactcagatgccggtcttgacctggaaagcagtggggagatcgtgtatgctatttgacaacattgaatactttgttgtgtcgtaggttaccaagataattagagacaaggggcaggttgttgtgcttgcaagtatctgttgcagctgttgttcatgcctgatgttgatgcctcttttcatactgttgtgtttggatggtgtaccaccagtgttttacaacagtttggcccttggaattgctattgctaaaacttggttcctctgagaagaccttttgtttttgtattcccagtcgagggacggtgaagtacttatattattacaaaattgtt

SEQ ID NO: 74187 - DNA, 3229 bp, Zea Mays
acgtactctgtcaaacgatacgccgcgatgcttccagacgagcgccatccccttcctcgcctcacacgccgtcctgttggtcgtgcctctcttcaacctttttttcttgagcattagcgagagccccttacatggtgcagtgctagcatcgttgctggcgacctcggtgaggtcggatctgcaaaggttgcagctagcgcgcctacactacatcaacatggtgtggcatctcctttcgcagatccccaacatgctacgccgccggctgcctcattggaactcctgtgcaccgcttgcctttcttctcccattcaacccgcaggcgttccctggctcaatagcgcaactaggggatgtccgccgctacctccatataggaaacgacagatttagattttcaggtgatgcgtggtcgggatcccggatcaatcaaaataagtgtgaaataagtgtgaaatttgagaggctgttgaacttccagatcaggtaccaaccaaaaaaagtgacccttttgacggcgtattgcgtgggcaaggcatgccagtgcgacaatagagaaactaacggggagctctgttcgttctgctgattgcttatgattaggctcgcagtggtggtagctgggagagcttgggactggccagacgcgaccaactcacccatgtaataagacaacttttatacatagccgacagtacgcaacctcatgcgcaagatccttaatgaaaccaaagagctgcagcagataaccaacgacaagcagaaaaatcaggttgtacgcatccaacattttactttcatatttgctgaagatgtcaacaaacaaaatagacaagcagcccagacaatggagatgatgtatacgataattgcagatgagttcaagtcaatggacaataaggacatgcgccctgaagattacttgaacttcttttgtcttggaaaccgggaagaaccaccatctaatggcagcccagaatcagagaaatctacatataaaagtgcagagatagatatagagttcatgaaaaagaaacttgaggaccttgataagccaatgaagaggaggaatgataagctgctcaaaattgagcatgaattatgtgagaggattactgaattagaaatgcagattgatccagcacaatgccgaggagactggagactaaacttggaggtgctactgaaggatgtgactttgagtcaaaggacaataggtagtcagatgaagattgtaaaaaacaagcatgcttaacccttcaagaatgcacagtttgagcttgaatttggaaaggggatatgccacagttcagagttttttgaacagaatttctggagcagttgttcctataaaataatattttaggtcttgaagccaccaccgtttggattgacatgatctgtggtattctggtgatctcattatagcagacttcatttcttattgtgcttatacagtagtgtagcgggaagagaattcacattgcatgaaatcatgttgatagctaagaggtggaagttgaagtaagccgggaagggtgaggtattgggaactgtggcatttaaagttcagtaggcagcagtaaactgtagtggtgtggtcgtgtacataagatgtgcacattttgaactcaggcattctttattgagtgctgctagaattacattgagctccctccacttctgatacttgcctggttttgcgtcaattggatctgtttgtccgtcctcaacactgttgtctgtttttgctaatttgggcattatctatgacagaagaagaacgattatgaattatagattaaattgaacataatgttgttctaagaacaaaaacagattatttcactgaatattttctcatcgcaagatgtactaaatagtaggttcactacagtcttacagaagccaataacccacttgatcttgctataatgatgttcttagaatacttatagatgtgttggctggaacattagctctgacaagatagaagcttgtttgttctgttatttagtcatgtctgcccctcaaactactgaaacctaaaatctgaaactgaaaatctgaaaatataaaactaaaaatatgaaactgaatattgtatgtcatgtttgtgtcatgttttcttagactgcattgaactccaacagagactgagaaacatggaattatagctagaacttggatctatggctgtgatattcttgcttgcggaaactgggaattatagagagacggaaatactttttaaattagaatctaactacaattcgatttagttcaagtcaatattcagagttctactttctggaattattcagagttcagttattcaaagttattaatagctatacttagccacccatgatgtagtcaagaaaaaaataactgaactcttctgcttataatttcaactatattaatagatattgttatcaggtgtttaaaaagaatgtggtcatcttgtgtgacatttgtgttcttaaattgttgctctgcttataaccttttttacaatgtactcatcagttctatactcgcagccaaaatctatagtgggaactcctgcatacattgctcatgaggttcttctgaagaaggaatacaatggaaaggttgctgatgtgtggtcatgcggagtgatgccatacgtgatgctgacgatcaccatccctgagataagaaaccatccatggttcttgaaaaacctcctagctgaccaaatggatgacaatacgatgagtaagcagtacgaggagcctgaacaaccgatgcagagcatgaatgagttcatgcagatcctggttgaggcgaccattccagcagttggttcacgtggactcaatcagtttctgaatgatgacattgacctcgacgatgacatggaggacctagactcagatgccggtcttgacctggaaagcagtggggagatcgtgtatgctatttgacaacattgaatactttgttgtgtcgtaggttaccaagataattagagacaaggggcaggttgttgtgcttgcaagtatctgttgcagctgttgttcatgcctgatgttgatgcctcttttcatactgttgtgtttggatggtgtaccaccagtgttttacaacagtttggcccttggaattgctattgctaaaacttggttcctctgagaagaccttttgtttttgtattcccagtcgagggacggtgaagtacttatattattacaaaattgtt

SEQ ID NO: 74188 - DNA, 2380 bp, Zea Mays
acgtactctgtcaaacgatacgccgcgatgcttccagacgagcgccatccccttcctcgcctcacacgccgtcctgttggtcgtgcctctcttcaacctttttttcttgagcattagcgagagccccttacatggtgcagtgctagcatcgttgctggcgacctcggtgaggtcggatctgcaaaggttgcagctagcgcgcctacactacatcaacatggtgtggcatctcctttcgcagatccccaacatgctacgccgccggctgcctcattggaactcctgtgcaccgcttgcctttcttctcccattcaacccgcaggcgttccctggctcaatagcgcaactaggggatgtccgccgctacctccatataggaaacgacagatttagattttcaggtgatgcgtggtcgggatcccggatcaatcaaaataagtgtgaaataagtgtgaaatttgagaggctgttgaacttccagatcaggtaccaaccaaaaaaagtgacccttttgacggcgtattgcgtgggcaaggcatgccagtgcgacaatagagaaactaacggggagctctgttcgttctgctgattgcttatgattaggctcgcagtggtggtagctgggagagcttgggactggccagacgcgaccaactcacccatgtaataagacaacttttatacatagccgacagtacgcaacctcatgcgcaagatccttaatgaaaccaaagagctgcagcagataaccaacgacaagcagaaaaatcaggttgtacgcatccaacattttactttcatatttgctgaagatgtcaacaaacaaaatagacaagcagcccagacaatggagatgatgtatacgataattgcagatgagttcaagtcaatggacaataaggacatgcgccctgaagattacttgaacttcttttgtcttggaaaccgggaagaaccaccatctaatggcagcccagaatcagagaaatctacatataaaagtgcagagatagtctgtttttgcattttccttattcttaaggaagcatttgaagacgcagaaattactcatgttgacgatacagtagatcctgttagagacatggaaactattagtgaagagctcagactaaagttttcgttggattttgttgatttacaagatcagctgtacaacacttaaaccttttttcgacactattctgtttctattttctgcaggatatagagttcatgaaaaagaaacttgaggaccttgataagccaatgaagaggaggaatgataagctgctcaaaattgagcatgaattatattgatccagcacaatgccgaggagactggagactaaacttggaggtgctactgaaggatgtgactttgagtcaaagggtagcacatggagagcttgaattgaattcaagcttggatatgattggaaaatatttgtattagatcacctagaagggtgattgatgcttgttattggccaagcagccaaaatctatagtgggaactcctgcatacattgctcatgaggttcttctgaagaaggaatacaatggaaaggttttatgcgtagtgtcgttaattattctacacttgacatactgtttttgtttagtgtgcatgttattattctccacttgaacaacatgtttgtttgtcaaaacattttatacacgcacgatttgtagtcatgcataacagggaactatgttggaaggttcgaatgctaaattagtcactaactctttgttactgaactaaggttgctgatgtgtggtcatgcggagtgatgccatacgtgatgctgacgatcaccatccctgagataagaaaccatccatggttcttgaaaaacctcctagctgaccaaatggatgacaatacgatgagtaagcagtacgaggagcctgaacaaccgatgcagagcatgaatgagttcatgcagatcctggttgaggcgaccattccagcagttggttcacgtggactcaatcagtttctgaatgatgacattgacctcgacgatgacatggaggacctagactcagatgccggtcttgacctggaaagcagtggggagatcgtgtatgctatttgacaacattgaatactttgttgtgtcgtaggttaccaagataattagagacaaggggcaggttgttgtgcttgcaagtatctgttgcagctgttgttcatgcctgatgttgatgcctcttttcatactgttgtgtttggatggtgtaccaccagtgttttacaacagtttggcccttggaattgctattgctaaaacttggttcctctgagaagaccttttgtttttgtattcccagtcgagggacggtgaagtacttatattattacaaaattgtt

SEQ ID NO: 74189 - DNA, 3592 bp, Zea Mays
acgtactctgtcaaacgatacgccgcgatgcttccagacgagcgccatccccttcctcgcctcacacgccgtcctgttggtcgtgcctctcttcaacctttttttcttgagcattagcgagagccccttacatggtgcagtgctagcatcgttgctggcgacctcggtgaggtcggatctgcaaaggttgcagctagcgcgcctacactacatcaacatggtgtggcatctcctttcgcagatccccaacatgctacgccgccggctgcctcattggaactcctgtgcaccgcttgcctttcttctcccattcaacccgcaggcgttccctggctcaatagcgcaactaggggatgtccgccgctacctccatataggaaacgacagatttagattttcaggtgatgcgtggtcgggatcccggatcaatcaaaataagtgtgaaataagtgtgaaatttgagaggctgttgaacttccagatcaggtaccaaccaaaaaaagtgacccttttgacggcgtattgcgtgggcaaggcatgccagtgcgacaatagagaaactaacggggagctctgttcgttctgctgattgcttatgattaggctcgcagtggtggtagctgggagagcttgggactggccagacgcgaccaactcacccatgtaataagacaacttttatacatagccgacagtacgcaacctcatgcgcaagatccttaatgaaaccaaagagctgcagcagataaccaacgacaagcagaaaaatcaggttgtacgcatccaacattttactttcatatttgctgaagatgtcaacaaacaaaatagacaagcagcccagacaatggagatgatgtatacgataattgcagatgagttcaagtcaatggacaataaggacatgcgccctgaagattacttgaacttcttttgtcttggaaaccgggaagaaccaccatctaatggcagcccagaatcagagaaatctacatataaaagtgcagagatagtctgtttttgcattttccttattcttaagggtatggcttagctcaacccttctgattacaccaaaactgaatatggttttggcgcacggaccttatgggaagctagagaagcatttgaagacgcagaaattactcatgttgacgatacagtagatcctgttagagacatggaaactattagtgaagagctcagactaaagttttcgttggattttgttgatttacaagatcagctgtacaacacttaaaccttttttcgacactattctgtttctattttctgcaggatatagagttcatgaaaaagaaacttgaggaccttgataagccaatgaagaggaggaatgataagctgctcaaaattgagcatgaattatattgatccagcacaatgccgaggagactggagactaaacttggaggtgctactgaaggatgtgactttgagtcaaagggtagcacatggagagcttgaattgaattcaagcttggatatgattggaaaatatttgtattagatcacctagaagggtgattgatgcttgttattggccaagcagacaataggtagtcagatgaagattgtaaaaaacaagcatgcttaacccttcaagaatgcacagtttgagcttgaatttggaaaggggatatgccacagttcagagttttttgaacagaatttctggagcagttgttcctataaaataatattttaggtcttgaagccaccaccgtttggattgacatgatctgtggtattctggtgatctcattatagcagacttcatttcttattgtgcttatacagtagtgtagcgggaagagaattcacattgcatgaaatcatgttgatagctaagaggtggaagttgaagtaagccgggaagggtgaggtattgggaactgtggcatttaaagttcagtaggcagcagtaaactgtagtggtgtggtcgtgtacataagatgtgcacattttgaactcaggcattctttattgagtgctgctagaattacattgagctccctccacttctgatacttgcctggttttgcgtcaattggatctgtttgtccgtcctcaacactgttgtctgtttttgctaatttgggcattatctatgacagaagaagaacgattatgaattatagattaaattgaacataatgttgttctaagaacaaaaacagattatttcactgaatattttctcatcgcaagatgtactaaatagtaggttcactacagtcttacagaagccaataacccacttgatcttgctataatgatgttcttagaatacttatagatgtgttggctggaacattagctctgacaagatagaagcttgtttgttctgttatttagtcatgtctgcccctcaaactactgaaacctaaaatctgaaactgaaaatctgaaaatataaaactaaaaatatgaaactgaatattgtatgtcatgtttgtgtcatgttttcttagactgcattgaactccaacagagactgagaaacatggaattatagctagaacttggatctatggctgtgatattcttgcttgcggaaactgggaattatagagagacggaaatactttttaaattagaatctaactacaattcgatttagttcaagtcaatattcagagttctactttctggaattattcagagttcagttattcaaagttattaatagctatacttagccacccatgatgtagtcaagaaaaaaataactgaactcttctgcttataatttcaactatattaatagatattgttatcaggtgtttaaaaagaatgtggtcatcttgtgtgacatttgtgttcttaaattgttgctctgcttataaccttttttacaatgtactcatcagttctatactcgcagccaaaatctatagtgggaactcctgcatacattgctcatgaggttcttctgaagaaggaatacaatggaaaggttgctgatgtgtggtcatgcggagtgatgccatacgtgatgctgacgatcaccatccctgagataagaaaccatccatggttcttgaaaaacctcctagctgaccaaatggatgacaatacgatgagtaagcagtacgaggagcctgaacaaccgatgcagagcatgaatgagttcatgcagatcctggttgaggcgaccattccagcagttggttcacgtggactcaatcagtttctgaatgatgacattgacctcgacgatgacatggaggacctagactcagatgccggtcttgacctggaaagcagtggggagatcgtgtatgctatttgacaacattgaatactttgttgtgtcgtaggttaccaagataattagagacaaggggcaggttgttgtgcttgcaagtatctgttgcagctgttgttcatgcctgatgttgatgcctcttttcatactgttgtgtttggatggtgtaccaccagtgttttacaacagtttggcccttggaattgctattgctaaaacttggttcctctgagaagaccttttgtttttgtattcccagtcgagggacggtgaagtacttatattattacaaaattgtt

SEQ ID NO: 74190 - DNA, 2911 bp, Zea Mays
acgtactctgtcaaacgatacgccgcgatgcttccagacgagcgccatccccttcctcgcctcacacgccgtcctgttggtcgtgcctctcttcaacctttttttcttgagcattagcgagagccccttacatggtgcagtgctagcatcgttgctggcgacctcggtgaggtcggatctgcaaaggttgcagctagcgcgcctacactacatcaacatggtgtggcatctcctttcgcagatccccaacatgctacgccgccggctgcctcattggaactcctgtgcaccgcttgcctttcttctcccattcaacccgcaggcgttccctggctcaatagcgcaactaggggatgtccgccgctacctccatataggaaacgacagatttagattttcaggtgatgcgtggtcgggatcccggatcaatcaaaataagtgtgaaataagtgtgaaatttgagaggctgttgaacttccagatcaggtaccaaccaaaaaaagtgacccttttgacggcgtattgcgtgggcaaggcatgccagtgcgacaatagagaaactaacggggagctctgttcgttctgctgattgcttatgattaggctcgcagtggtggtagctgggagagcttgggactggccagacgcgaccaactcacccatgtaataagacaacttttatacatagccgacagtacgcaacctcatgcgcaagatccttaatgaaaccaaagagctgcagcagataaccaacgacaagcagaaaaatcaggttgtacgcatccaacattttactttcatatttgctgaagatgtcaacaaacaaaatagacaagcagcccagacaatggagatgatgtatacgataattgcagatgagttcaagtcaatggacaataaggacatgcgccctgaagattacttgaacttcttttgtcttggaaaccgggaagaaccaccatctaatggcagcccagaatcagagaaatctacatataaaagtgcagagatagtctgtttttgcattttccttattcttaagggtatggcttagctcaacccttctgattacaccaaaactgaatatggttttggcgcacggaccttatgggaagctagaggtctgagctattgggaagctagaatttatgtttttatcaatgtttagtcattaactaattaattgcatatcgttttgttgtatatttattaactaatcgagtgttgcatacggttttcagaagcatttgaagacgcagaaattactcatgttgacgatacagtagatcctgttagagacatggaaactattagtgaagagctcagactaaagttttcgttggattttgttgatttacaagatcagctgtacaacacttaaaccttttttcgacactattctgtttctattttctgcaggatatagagttcatgaaaaagaaacttgaggaccttgataagccaatgaagaggaggaatgataagctgctcaaaattgagcatgaattatattgatccagcacaatgccgaggagactggagactaaacttggaggtgctactgaaggatgtgactttgagtcaaagggtagcacatggagagcttgaattgaattcaagcttggatatgattggaaaatatttgtattagatcacctagaagggtgattgatgcttgttattggccaagcagacaataggtagtcagatgaagattgtaaaaaacaagcatgcttaacccttcaagaatgcacagtttgagcttgaatttggaaaggggatatgccacagttcagagttttttgaacagaatttctggagcagttgttcctataaaataatattttaggtcttgaagccaccaccgtttggattgacatgatctgtggtattctggtgatctcattatagcagacttcatttcttattgtgcttatacagtagtgtagcgggaagagaattcacattgcatgaaatcatgttgatagctaagaggtggaagttgaagtaagccgggaagggtgagccaaaatctatagtgggaactcctgcatacattgctcatgaggttcttctgaagaaggaatacaatggaaaggttttatgcgtagtgtcgttaattattctacacttgacatactgtttttgtttagtgtgcatgttattattctccacttgaacaacatgtttgtttgtcaaaacattttatacacgcacgatttgtagtcatgcataacagggaactatgttggaaggttcgaatgctaaattagtcactaactctttgttactgaactaaggttgctgatgtgtggtcatgcggagtgatgccatacgtgatgctgacgatcaccatccctgagataagaaaccatccatggttcttgaaaaacctcctagctgaccaaatggatgacaatacgatgagtaagcagtacgaggagcctgaacaaccgatgcagagcatgaatgagttcatgcagatcctggttgaggcgaccattccagcagttggttcacgtggactcaatcagtttctgaatgatgacattgacctcgacgatgacatggaggacctagactcagatgccggtcttgacctggaaagcagtggggagatcgtgtatgctatttgacaacattgaatactttgttgtgtcgtaggttaccaagataattagagacaaggggcaggttgttgtgcttgcaagtatctgttgcagctgttgttcatgcctgatgttgatgcctcttttcatactgttgtgtttggatggtgtaccaccagtgttttacaacagtttggcccttggaattgctattgctaaaacttggttcctctgagaagaccttttgtttttgtattcccagtcgagggacggtgaagtacttatattattacaaaattgtt

SEQ ID NO: 74191 - DNA, 1164 bp, Zea Mays
aattgcatatcgttttgttgtatatttattaactaatcgagtgttgcatacggttttcagaagcatttgaagacgcagaaattactcatgttgacgatacagtagatcctgttagagacatggaaactattagtgaagagctcagactaaagttttcgttggattttgttgatttacaagatcagctgtacaacacttaaaccttttttcgacactattctgtttctattttctgcaggatatagagttcatgaaaaagaaacttgaggaccttgataagccaatgaagaggaggaatgataagctgctcaaaattgagcatgaattatgtgagaggattactgaattagaaatgcagattgatccagcacaatgccgaggagactggagactaaacttggaggtgctactgaaggatgtgactttgagtcaaaggacaatagttctatactcgcagccaaaatctatagtgggaactcctgcatacattgctcatgaggttcttctgaagaaggaatacaatggaaaggttgctgatgtgtggtcatgcggagtgatgccatacgtgatgctggaattactgatgttacctatacagacgatcaccatccctgagataagaaaccatccatggttcttgaaaaacctcctagctgaccaaatggatgacaatacgatgagtaagcagtacgaggagcctgaacaaccgatgcagagcatgaatgagttcatgcagatcctggttgaggcgaccattccagcagttggttcacgtggactcaatcagtttctgaatgatgacattgacctcgacgatgacatggaggacctagactcagatgccggtcttgacctggaaagcagtggggagatcgtgtatgctatttgacaacattgaatactttgttgtgtcgtaggttaccaagataattagagacaaggggcaggttgttgtgcttgcaagtatctgttgcagctgttgttcatgcctgatgttgatgcctcttttcatactgttgtgtttggatggtgtaccaccagtgttttacaacagtttggcccttggaattgctattgctaaaacttggttcctctgagaagaccttttgtttttgtattcccagtcgagggacggtgaagtacttatattattacaaaattgtt

SEQ ID NO: 74192 - DNA, 823 bp, Zea Mays
gttactagcacgtcatcagcccccgagctctgtgggccgaacctatcgaaacacgcaagatgcccaaccctagctacgccctacggccgaagtgtccataaaaaccgacgcgccaactcctaggcccaaccaacttgccgaccgcaggaatccagccgacccagcacttccccggttcctcccagcagagtcttcttctctgcatccgttccgttccccggcctctcgcacatccaccgccaccgagccgcgtgcgtcttccatgaaggacccgttcgaggcggacgtcgaggagcaggactcgccgccggagtcgccggcgccgcccgaggatgaacccggcgccgcgggccctgcggaggaccccgaggactacgacggcggcccgcccccgcgccagccgtctgccccggcgtctcacgcagccggtgccaaggccaaggcccgtgtccatagggagcagcaggaggatgacgacgaggacgaggaccagattgaggtcgacctcgagaagcttcccagcagcactggcgacccagacaagctcgctaagatgaactgttggcaagcatcactggaagtcagaagatttctatccctacttcaattgtggtatcgggaatcgccaaaatatttgttggtgagctaattgaaacagcaagagtggtcatgagcgagaggaaggattcaggacccattaggccttgccacatcagggaggcatacagaagattgaagcttgaaagggatgatcccacggcgatctgttcctaggcttttccgtttgtttgaagcatgtatattacacatgtgtctggagtcc

SEQ ID NO: 74193 - DNA, 678 bp, Zea Mays
aaccaacttgccgaccgcaggaatccagccgacccagcacttccccggttcctcccagcagagtcttcttctctgcatccgttccgttccccggcctctcgcacatccaccgccaccgagccgcgtgcgtcttccatgaaggacccgttcgaggcggacgtcgaggagcaggactcgccgccggagtcgccggcgccgcccgaggatgaacccggcgccgcgggccctgcggaggaccccgaggactacgacggcggcccgcccccgcgccagccgtctgccccggcgtctcacgcagccggtgccaaggccaaggcccgtgtccatagggagcagcaggaggatgacgacgaggacgaggaccagattgaggtcgacctcgagaagcttcccagcagcactggcgacccagacaagctcgctaagatgaactgttggcaagcatcactggaagtcagaagatttctatccctacttcaattgtggtatcgggaatcgccaaaatatttgttgcaagagtggtcatgagcgagaggaaggattcaggacccattaggccttgccacatcagggaggcatacagaagattgaagcttgaaagggatgatcccacggcgatctgttcctaggcttttccgtttgtttgaagcatgtatattacacatgtgtctggagtcc

SEQ ID NO: 74194 - DNA, 766 bp, Zea Mays
aaccaacttgccgaccgcaggaatccagccgacccagcacttccccggttcctcccagcagagtcttcttctctgcatccgttccgttccccggcctctcgcacatccaccgccaccgagccgcgtgcgtcttccatgaaggacccgttcgaggcggacgtcgaggagcaggactcgccgccggagtcgccggcgccgcccgaggatgaacccggcgccgcgggccctgcggaggaccccgaggactacgacggcggcccgcccccgcgccagccgtctgccccggcgtctcacgcagccggtgccaaggccaaggcccgtgtccatagggagcagcaggaggatgacgacgaggacgaggaccagattgaggtcgacctcgagaagcttcccagcagcactggcgacccagacaagctcgctaagatgaatgctatactgtcccaatttacacaacagcagatgaaccgttatgagtcattccgaagatctggatttcagaaatctaacatgaaaaggctgttggcaagcatcactggaagtcagaagatttctatccctacttcaattgtggtatcgggaatcgccaaaatatttgttgcaagagtggtcatgagcgagaggaaggattcaggacccattaggccttgccacatcagggaggcatacagaagattgaagcttgaaagggatgatcccacggcgatctgttcctaggcttttccgtttgtttgaagcatgtatattacacatgtgtctggagtcc

SEQ ID NO: 74195 - DNA, 996 bp, Zea Mays
acagttcatgtttgatttttctcaaatcaacatgtcaactttgatagttgttctggttgggaaagaacaaagtagaagaagatgaaagtgatagcgatagtgacagtgacatggatgatgaggacagtgaagatcaggagagcgcagatgcaaaatctctcgtagttgatgaaggcaattgctcaaatggatccataaaaaatgagaaacttgatctgggttctgtttctggatcacattcagaaggagagtcctcaggggaaaagtcccaaccgacaacaaaatcaggagctgaaggtggtgactttgaatctgatggcagtgcagagcctgaattaggaatggtggatcatcccattcctgtgaacaatgctgttgctgctgcttcagaagaagtgctgaaatcagatgaagtgacagcagatgaggataacactacttcagcaacttcaaaccaaaacaatccagtggtaccacaagttaaagaagcgctgaaagcagacgaggataacagtgcttcagctacttcgaaccaaaacaacccagaggtgcccaaagtagaagaatatgccgatgccagcaaatcttattcagagccattggaccttgcaaagtacagttcagctgtagaattggaggtgcttggtctggagaagctaaaaatagagctgcaatctcgtggattaaaatgtggtggaactttacaggagcgagctacccgactcttccttctgaagacaactccattggataagttaccaaagaagctgcttgctaaggccgctattggggggaagtgagaagctgtataaacaagtactgatggtgcaatgcttaagttttttctttgacgatgtatggaaatctgttgtggtgtaatcacgtgttacaagcccttggtgtggcattgacgattaatgatgtgtctgtatctacgtatatgctaatcgttacctttgaagccccaagtttggactagggttccatttcgttgta

SEQ ID NO: 74196 - DNA, 2778 bp, Zea Mays
tgaaactgtagataatatttatatagtgaagtttgaaatagagacatgagatacgatacaagatgaacaaggatcagccggcgacagtaccagacggatggtggacctttgtttataagagtgggcccttgaatattgacagcggccgctcgagcgtcattgacaaaaggtttcgccagcgccgagcctcatcatcagccacccgtccaccaccacccagcccatttctcgtccccaaaatttcgagtttcgaaaccaaaccaaacgaagcgacactgcacgtgtacgaacctacgacagctctctacttccctcgcgtcctctccatcgagagctgctcctgctcgtctcctcccacaccgcgcaattcgtcgggattcgggaaccctagcgccggatctccgcggcagcggcggaaatggcgaatcccctagcggggctgcaggaccacctcaagctcgcgcgggactacgcgctcgagggcctctacgacacctccatcatcttcttcgacggcgccatcgcccagatcaacaagcatctaactactttggacgatgctctgattcgtacgaaatggatgaactgcaagaaagcaatctctgaagaagtggaaattgtgaaacagttggatgctcaattaaagtcccttaaagaagctcctgggacaaggcggtcatcatcacctcctattcggtctaataaatcatttgttttccaaccgttggatgagtatccaacatcttcaccagcaccctttgatgatcctgatgtgtgggctccaccaagggatacaccaacccgaagaccaacaagaggtcaatctagtgcaaggaagtcctcccaagatggagcctgggcacgtggttcatcaaggactggaacacctagtcgaagcgcaaaacctaatgggattaaaggaggtgctgttaaatcaactgcctctaacagttctgtaaggaaagggaaacaaagttcaaacaaggctgattcaacgagtagtgatgctgaggaaggtaagtccaagaagggtcagtatgaagggccagatatggacttagctgcaatgcttgaaagggatgttctggattctactccaggagtaagatgggatgatgttgccggacttagtgaggccaaacgactcctcgaggaagcagttgtgcttcctctctggatgcctgaatattttcaggcgcatatcgatgggaatgatatggcatttttggtgctctaccatggacatagtctaagatatgcatagttactacgtactggttttttatacaactcttttatgtttatggctgtcaacatgatatggcatgaaactggtgtttcctttgtttggtgccactgacgttttcttgatgcttgtatctaggggtgccaatgggctctaaattttacactataaaatttaaggatcagatcgaattaggatcagactctatttctattcatttttgaactaaaatttatttagtgccctaagaaattaagaagcatttggatcacgatctattaccacccctacttgtatatgttttcttaattgccatactgatttggattatgctgttcttgaatgatcatgaacccaaccaatcttttctctcttgtagcctttttcatctggtctaaacttgatacatagtggctaattatgtccacttttccttatcagggtattcgtcgaccttggaaaggagttcttatgtttggtccaccaggcacgggaaagactcttttggcaaaggcagtggccaccgaatgtggaacaacattctttaatgtttcctctgcaacactggcctctaaatggcgtggcgagagtgagcgcatggtccgttgcttatttgatcttgcgagggcctatgctccaagtacaattttcattgatgaaattgactccttatgcacgtcgcgcggtgcctccggcgaacatgagtcgtcaagaagggtgaagtctgaacttctagtgcaaattgatggtgtaaacaatagctccaccactgatgatggccagccaaaaattgttatggttctggctgctacaaattttccatgggatattgatgaggcactgaggcggaggctggagaagcgtatttatattccacttccagattttgaaagtagaaaggcacttatcaacattaatcttagaacagttcagatagccgcagatgttaacatcgacgaggttgctcggaggacagaaggctatagtggagatgatctgacaaacgtttgccgcgatgcctcaatgaatggcatgaggcgcaagatagcaggcaagacccgcgacgagatcaagaacatgtcaaaggacgagatagccaaggacccggtggccatgtgcgactttgtggaggctctggtgaaggttcagaagagtgtctcgccttcagacatagagaagcatgagaagtggatggctgagtttgggtctgcctgagacctcggccatctgcttgggtcctgttcaaacattcgttttgtgtgggttgacacggcattccgtagcaatgatacggtgttacccgccggtggtcttgcttcatatagaccagaggcacgagctatcttgtctgtttccagtgatgctaggaattgagttcacgatcgtttcagttcttggtatatgcactttctgctgtcaaacgtatctcatcaagtagccgtggccgcctctatttccagatgctccgtgtttggttgaaggaatatcacaggaaccaaagttttagcgtgtttcaatcctctaccttttac

SEQ ID NO: 74197 - DNA, 2235 bp, Zea Mays
cttgaatattgacagcggccgctcgagcgtcattgacaaaaggtttcgccagcgccgagcctcatcatcagccacccgtccaccaccacccagcccatttctcgtccccaaaatttcgagtttcgaaaccaaaccaaacgaagcgacactgcacgtgtacgaacctacgacagctctctacttccctcgcgtcctctccatcgagagctgctcctgctcgtctcctcccacaccgcgcaattcgtcgggattcgggaaccctagcgccggatctccgcggcagcggcggaaatggcgaatcccctagcggggctgcaggaccacctcaagctcgcgcgggactacgcgctcgagggcctctacgacacctccatcatcttcttcgacggcgccatcgcccagatcaacaagcatctaactactttggacgatgctctgattcgtacgaaatggatgaactgcaagaaagcaatctctgaagaagtggaaattgtgaaacagttggatgctcaattaaagtcccttaaagaagctcctgggacaaggcggtcatcatcacctcctattcggtctaataaatcatttgttttccaaccgttggatgagtatccaacatcttcaccagcaccctttgatgatcctgatgtgtgggctccaccaagggatacaccaacccgaagaccaacaagaggtcaatctagtgcaaggaagtcctcccaagatggagcctgggcacgtggttcatcaaggactggaacacctagtcgaagcgcaaaacctaatgggattaaaggaggtgctgttaaatcaactgcctctaacagttctgtaaggaaagggaaacaaagttcaaacaaggctgattcaacgagtagtgatgctgaggaaggtaagtccaagaagggtcagtatgaagggccagatatggacttagctgcaatgcttgaaagggatgttctggattctactccaggagtaagatgggatgatgttgccggacttagtgaggccaaacgactcctcgaggaagcagttgtgcttcctctctggatgcctgaatattttcaggcgcatatcgatgggaatgatatggcatttttggtgctctaccatggacatagtctaagatatgcatagttactacggtattcgtcgaccttggaaaggagttcttatgtttggtccaccaggcacgggaaagactcttttggcaaaggcagtggccaccgaatgtggaacaacattctttaatgtttcctctgcaacactggcctctaaatggcgtggcgagagtgagcgcatggtccgttgcttatttgatcttgcgagggcctatgctccaagtacaattttcattgatgaaattgactccttatgcacgtcgcgcggtgcctccggcgaacatgagtcgtcaagaagggtgaagtctgaacttctagtgcaaattgatggtgtaaacaatagctccaccactgatgatggccagccaaaaattgttatggttctggctgctacaaattttccatgggatattgatgaggcactgaggcggaggctggagaagcgtatttatattccacttccagattttgaaagtagaaaggcacttatcaacattaatcttagaacagttcagatagccgcagatgttaacatcgacgaggttgctcggaggacagaaggctatagtggagatgatctgacaaacgtttgccgcgatgcctcaatgaatggcatgaggcgcaagatagcaggcaagacccgcgacgagatcaagaacatgtcaaaggacgagatagccaaggacccggtggccatgtgcgactttgtggaggctctggtgaaggttcagaagagtgtctcgccttcagacatagagaagcatgagaagtggatggctgagtttgggtctgcctgagacctcggccatctgcttgggtcctgttcaaacattcgttttgtgtgggttgacacggcattccgtagcaatgatacggtgttacccgccggtggtcttgcttcatatagaccagaggcacgagctatcttgtctgtttccagtgatgctaggaattgagttcacgatcgtttcagttcttggtatatgcactttctgctgtcaaacgtatctcatcaagtagccgtggccgcctctatttccagatgctccgtgtttggttgaaggaatatcacaggaaccaaagttttagcgtgtttcaatcctctaccttttac

SEQ ID NO: 74198 - DNA, 2064 bp, Zea Mays
caaaaggtttcgccagcgccgagcctcatcatcagccacccgtccaccaccacccagcccatttctcgtccccaaaatttcgagtttcgaaaccaaaccaaacgaagcgacactgcacgtgtacgaacctacgacagctctctacttccctcgcgtcctctccatcgagagctgctcctgctcgtctcctcccacaccgcgcaattcgtcgggattcgggaaccctagcgccggatctccgcggcagcggcggaaatggcgaatcccctagcggggctgcaggaccacctcaagctcgcgcgggactacgcgctcgagggcctctacgacacctccatcatcttcttcgacggcgccatcgcccagatcaacaacaatctctgaagaagtggaaattgtgaaacagttggatgctcaattaaagtcccttaaagaagctcctgggacaaggcggtcatcatcacctcctattcggtctaataaatcatttgttttccaaccgttggatgagtatccaacatcttcaccagcaccctttgatgatcctgatgtgtgggctccaccaagggatacaccaacccgaagaccaacaagaggtcaatctagtgcaaggaagtcctcccaagatggagcctgggcacgtggttcatcaaggactggaacacctagtcgaagcgcaaaacctaatgggattaaaggaggtgctgttaaatcaactgcctctaacagttctgtaaggaaagggaaacaaagttcaaacaaggctgattcaacgagtagtgatgctgaggaaggtaagtccaagaagggtcagtatgaagggccagatatggacttagctgcaatgcttgaaagggatgttctggattctactccaggagtaagatgggatgatgttgccggacttagtgaggccaaacgactcctcgaggaagcagttgtgcttcctctctggatgcctgaatattttcagggtattcgtcgaccttggaaaggagttcttatgtttggtccaccaggcacgggaaagactcttttggcaaaggcagtggccaccgaatgtggaacaacattctttaatgtttcctctgcaacactggcctctaaatggcgtggcgagagtgagcgcatggtccgttgcttatttgatcttgcgagggcctatgctccaagtacaattttcattgatgaaattgactccttatgcacgtcgcgcggtgcctccggcgaacatgagtcgtcaagaagggtgaagtctgaacttctagtgcaaattgatggtgtaaacaatagctccaccactgatgatggccagccaaaaattgttatggttctggctgctacaaattttccatgggatattgatgaggcactgaggcggaggctggagaagcgtatttatattccacttccagattttgaaagtagaaaggcacttatcaacattaatcttagaacagttcagatagccgcagatgttaacatcgacgaggttgctcggaggacagaaggctatagtggagatgatctgacaaacgtttgccgcgatgcctcaatgaatggcatgaggcgcaagatagcaggcaagacccgcgacgagatcaagaacatgtcaaaggacgagatagccaaggacccggtggccatgtgcgactttgtggaggctctggtgaaggttcagaagagtgtctcgccttcagacatagagaagcatgagaagtggatggctgagtttgggtctgcctgagacctcggccatctgcttgggtcctgttcaaacattcgttttgtgtgggttgacacggcattccgtagcaatgatacggtgttacccgccggtggtcttgcttcatatagaccagaggcacgagctatcttgtctgtttccagtgatgctaggaattgagttcacgatcgtttcagttcttggtatatgcactttctgctgtcaaacgtatctcatcaagtagccgtggccgcctctatttccagatgctccgtgtttggttgaaggaatatcacaggaaccaaagttttagcgtgtttcaatcctctaccttttac

SEQ ID NO: 74199 - DNA, 2688 bp, Zea Mays
cctcatcatcagccacccgtccaccaccacccagcccatttctcgtccccaaaatttcgagtttcgaaaccaaaccaaacgaagcgacactgcacgtgtacgaacctacgacagctctctacttccctcgcgtcctctccatcgagagctgctcctgctcgtctcctcccacaccgcgcaattcgtcgggattcgggaaccctagcgccggatctccgcggcagcggcggaaatggcgaatcccctagcggggctgcaggaccacctcaagctcgcgcgggactacgcgctcgagggcctctacgacacctccatcatcttcttcgacggcgccatcgcccagatcaacaagcatctaactactttggacgatgctctgattcgtacgaaatggatgaactgcaagaaagcaatctctgaagaagtggaaattgtgaaacagttggatgctcaattaaagtcccttaaagaagctcctgggacaaggcggtcatcatcacctcctattcggtctaataaatcatttgttttccaaccgttggatgagtatccaacatcttcaccagcaccctttgatgatcctgatgtgtgggctccaccaagggatacaccaacccgaagaccaacaagaggtcaatctagtgcaaggaagtcctcccaagatggagcctgggcacgtggttcatcaaggactggaacacctagtcgaagcgcaaaacctaatgggattaaaggaggtgctgttaaatcaactgcctctaacagttctgtaaggaaagggaaacaaagttcaaacaaggctgattcaacgagtagtgatgctgaggaaggtaagtccaagaagggtcagtatgaagggccagatatggacttagctgcaatgcttgaaagggatgttctggattctactccaggagtaagatgggatgatgttgccggacttagtgaggccaaacgactcctcgaggaagcagttgtgcttcctctctggatgcctgaatattttcaggtaatagtctatattcttctacgctgtcccttattggttcaaactaagcactgtaaagtatctgaaaaatgtctatttgttcttggcactaacacattttacaggcgcatatcgatgggaatgatatggcatttttggtgctctaccatggacatagtctaagatatgcatagttactacgtactggttttttatacaactcttttatgtttatggctgtcaacatgatatggcatgaaactggtgtttcctttgtttggtgccactgacgttttcttgatgcttgtatctaggggtgccaatgggctctaaattttacactataaaatttaaggatcagatcgaattaggatcagactctatttctattcatttttgaactaaaatttatttagtgccctaagaaattaagaagcatttggatcacgatctattaccacccctacttgtatatgttttcttaattgccatactgatttggattatgctgttcttgaatgatcatgaacccaaccaatcttttctctcttgtagcctttttcatctggtctaaacttgatacatagtggctaattatgtccacttttccttatcagggtattcgtcgaccttggaaaggagttcttatgtttggtccaccaggcacgggaaagactcttttggcaaaggcagtggccaccgaatgtggaacaacattctttaatgtttcctctgcaacactggcctctaaatggcgtggcgagagtgagcgcatggtccgttgcttatttgatcttgcgagggcctatgctccaagtacaattttcattgatgaaattgactccttatgcacgtcgcgcggtgcctccggcgaacatgagtcgtcaagaagggtgaagtctgaacttctagtgcaaattgatggtgtaaacaatagctccaccactgatgatggccagccaaaaattgttatggttctggctgctacaaattttccatgggatattgatgaggcggaggctggagaagcgtatttatattccacttccagattttgaaagtagaaaggcacttatcaacattaatcttagaacagttcagatagccgcagatgttaacatcgacgaggttgctcggaggacagaaggctatagtggagatgatctgacaaacgtttgccgcgatgcctcaatgaatggcatgaggcgcaagatagcaggcaagacccgcgacgagatcaagaacatgtcaaaggacgagatagccaaggacccggtggccatgtgcgactttgtggaggctctggtgaaggttcagaagagtgtctcgccttcagacatagagaagcatgagaagtggatggctgagtttgggtctgcctgagacctcggccatctgcttgggtcctgttcaaacattcgttttgtgtgggttgacacggcattccgtagcaatgatacggtgttacccgccggtggtcttgcttcatatagaccagaggcacgagctatcttgtctgtttccagtgatgctaggaattgagttcacgatcgtttcagttcttggtatatgcactttctgctgtcaaacgtatctcatcaagtagccgtggccgcctctatttccagatgctccgtgtttggttgaaggaatatcacaggaaccaaagttttagcgtgtttcaatcctctaccttttac

SEQ ID NO: 74200 - DNA, 2690 bp, Zea Mays
ctcatcatcagccacccgtccaccaccacccagcccatttctcgtccccaaaatttcgagtttcgaaaccaaaccaaacgaagcgacactgcacgtgtacgaacctacgacagctctctacttccctcgcgtcctctccatcgagagctgctcctgctcgtctcctcccacaccgcgcaattcgtcgggattcgggaaccctagcgccggatctccgcggcagcggcggaaatggcgaatcccctagcggggctgcaggaccacctcaagctcgcgcgggactacgcgctcgagggcctctacgacacctccatcatcttcttcgacggcgccatcgcccagatcaacaagcatctaactactttggacgatgctctgattcgtacgaaatggatgaactgcaagaaagcaatctctgaagaagtggaaattgtgaaacagttggatgctcaattaaagtcccttaaagaagctcctgggacaaggcggtcatcatcacctcctattcggtctaataaatcatttgttttccaaccgttggatgagtatccaacatcttcaccagcaccctttgatgatcctgatgtgtgggctccaccaagggatacaccaacccgaagaccaacaagaggtcaatctagtgcaaggaagtcctcccaagatggagcctgggcacgtggttcatcaaggactggaacacctagtcgaagcgcaaaacctaatgggattaaaggaggtgctgttaaatcaactgcctctaacagttctgtaaggaaagggaaacaaagttcaaacaaggctgattcaacgtgatgctgaggaaggtaagtccaagaagggtcagtatgaagggccagatatggacttagctgcaatgcttgaaagggatgttctggattctactccaggagtaagatgggatgatgttgccggacttagtgaggccaaacgactcctcgaggaagcagttgtgcttcctctctggatgcctgaatattttcaggtaatagtctatattcttctacgctgtcccttattggttcaaactaagcactgtaaagtatctgaaaaatgtctatttgttcttggcactaacacattttacaggcgcatatcgatgggaatgatatggcatttttggtgctctaccatggacatagtctaagatatgcatagttactacgtactggttttttatacaactcttttatgtttatggctgtcaacatgatatggcatgaaactggtgtttcctttgtttggtgccactgacgttttcttgatgcttgtatctaggggtgccaatgggctctaaattttacactataaaatttaaggatcagatcgaattaggatcagactctatttctattcatttttgaactaaaatttatttagtgccctaagaaattaagaagcatttggatcacgatctattaccacccctacttgtatatgttttcttaattgccatactgatttggattatgctgttcttgaatgatcatgaacccaaccaatcttttctctcttgtagcctttttcatctggtctaaacttgatacatagtggctaattatgtccacttttccttatcagggtattcgtcgaccttggaaaggagttcttatgtttggtccaccaggcacgggaaagactcttttggcaaaggcagtggccaccgaatgtggaacaacattctttaatgtttcctctgcaacactggcctctaaatggcgtggcgagagtgagcgcatggtccgttgcttatttgatcttgcgagggcctatgctccaagtacaattttcattgatgaaattgactccttatgcacgtcgcgcggtgcctccggcgaacatgagtcgtcaagaagggtgaagtctgaacttctagtgcaaattgatggtgtaaacaatagctccaccactgatgatggccagccaaaaattgttatggttctggctgctacaaattttccatgggatattgatgaggcactgaggcggaggctggagaagcgtatttatattccacttccagattttgaaagtagaaaggcacttatcaacattaatcttagaacagttcagatagccgcagatgttaacatcgacgaggttgctcggaggacagaaggctatagtggagatgatctgacaaacgtttgccgcgatgcctcaatgaatggcatgaggcgcaagatagcaggcaagacccgcgacgagatcaagaacatgtcaaaggacgagatagccaaggacccggtggccatgtgcgactttgtggaggctctggtgaaggttcagaagagtgtctcgccttcagacatagagaagcatgagaagtggatggctgagtttgggtctgcctgagacctcggccatctgcttgggtcctgttcaaacattcgttttgtgtgggttgacacggcattccgtagcaatgatacggtgttacccgccggtggtcttgcttcatatagaccagaggcacgagctatcttgtctgtttccagtgatgctaggaattgagttcacgatcgtttcagttcttggtatatgcactttctgctgtcaaacgtatctcatcaagtagccgtggccgcctctatttccagatgctccgtgtttggttgaaggaatatcacaggaaccaaagttttagcgtgtttcaatcctctaccttttac

SEQ ID NO: 74201 - DNA, 2571 bp, Zea Mays
atcagccacccgtccaccaccacccagcccatttctcgtccccaaaatttcgagtttcgaaaccaaaccaaacgaagcgacactgcacgtgtacgaacctacgacagctctctacttccctcgcgtcctctccatcgagagctgctcctgctcgtctcctcccacaccgcgcaattcgtcgggattcgggaaccctagcgccggatctccgcggcagcggcggaaatggcgaatcccctagcggggctgcaggaccacctcaagctcgcgcgggactacgcgctcgagggcctctacgacacctccatcatcttcttcgacggcgccatcgcccagatcaacaagcatctaactactttggacgatgctctgattcgtacgaaatggatgaactgcaagaaagcaatctctgaagaagtggaaattgtgaaacagttggatgctcaattaaagtcccttaaagaagctcctgggacaaggcggtcatcatcacctcctattcggtctaataaatcatttgttttccaaccgttggatgagtatccaacatcttcaccagcaccctttgatgatcctgatgtgtgggctccaccaagggatacaccaacccgaagaccaacaagaggtcaatctagtgcaaggaagtcctcccaagatggagcctgggcacgtggttcatcaaggactggaacacctagtcgaagcgcaaaacctaatgggattaaaggaggtgctgttaaatcaactgcctctaacagttctgtaaggaaagggaaacaaagttcaaacaaggctgattcaacgagtagtgatgctgaggaaggtaagtccaagaagggtcagtatgaagggccagatatggacttagctgcaatgcttgaaagggatgttctggattctactccaggagtaagatgggatgatgttgccggacttagtgaggccaaacgactcctcgaggaagcagttgtgcttcctctctggatgcctgaatattttcaggcgcatatcgatgggaatgatatggcatttttggtgctctaccatggacatagtctaagatatgcatagttactacgtactggttttttatacaactcttttatgtttatggctgtcaacatgatatggcatgaaactggtgtttcctttgtttggtgccactgacgttttcttgatgcttgtatctaggggtgccaatgggctctaaattttacactataaaatttaaggatcagatcgaattaggatcagactctatttctattcatttttgaactaaaatttatttagtgccctaagaaattaagaagcatttggatcacgatctattaccacccctacttgtatatgttttcttaattgccatactgatttggattatgctgttcttgaatgatcatgaacccaaccaatcttttctctcttgtagcctttttcatctggtctaaacttgatacatagtggctaattatgtccacttttccttatcagggtattcgtcgaccttggaaaggagttcttatgtttggtccaccaggcacgggaaagactcttttggcaaaggcagtggccaccgaatgtggaacaacattctttaatgtttcctctgcaacactggcctctaaatggcgtggcgagagtgagcgcatggtccgttgcttatttgatcttgcgagggcctatgctccaagtacaattttcattgatgaaattgactccttatgcacgtcgcgcggtgcctccggcgaacatgagtcgtcaagaagggtgaagtctgaacttctagtgcaaattgatggtgtaaacaatagctccaccactgatgatggccagccaaaaattgttatggttctggctgctacaaattttccatgggatattgatgaggctggagaagcgtatttatattccacttccagattttgaaagtagaaaggcacttatcaacattaatcttagaacagttcagatagccgcagatgttaacatcgacgaggttgctcggaggacagaaggctatagtggagatgatctgacaaacgtttgccgcgatgcctcaatgaatggcatgaggcgcaagatagcaggcaagacccgcgacgagatcaagaacatgtcaaaggacgagatagccaaggacccggtggccatgtgcgactttgtggaggctctggtgaaggttcagaagagtgtctcgccttcagacatagagaagcatgagaagtggatggctgagtttgggtctgcctgagacctcggccatctgcttgggtcctgttcaaacattcgttttgtgtgggttgacacggcattccgtagcaatgatacggtgttacccgccggtggtcttgcttcatatagaccagaggcacgagctatcttgtctgtttccagtgatgctaggaattgagttcacgatcgtttcagttcttggtatatgcactttctgctgtcaaacgtatctcatcaagtagccgtggccgcctctatttccagatgctccgtgtttggttgaaggaatatcacaggaaccaaagttttagcgtgtttcaatcctctaccttttac

SEQ ID NO: 74202 - DNA, 1592 bp, Zea Mays
agacactcttttttggtctctcacatctttcacctgaagggtcatcgaatatatcaaaatctacaacgtaatcacttgaggtcgggcaagcgaaaataggctcgcctctacctcggctcgggcgcagagcacgcggcaccggcgcgtcctctcctcctgctccgatctctctgcccagccccgcctgtgcgcttcgctactacgcttcctccatgcatcccctcagccatgtacgcctgtatttgagaagacattagcggagttgaatccagaagaagagccgaagagttatcttagccacagccaggtcgcccgttagttgttcgcggaaatgtccctccgccagctgcttcaccaaacgcgtccgtggcgcgcgcttgagcagcccacgaagatgtcttgtctcctctccatcttccgtgcgctctccattctccgttctgaaggctcggctgagccactgcgcagatcttcatctgtgccagccccgctgccaagaagcttgccttgctccagctctgacccccttggccccagattcagcatcgacgtggtcgactcggaccattggccctcgtcatttgacttgttgtccgacgctgcacggagcaatgaatgcccagatgtcttcgagcaacgtgaggatgatgaactgcacgactctgatgatgagatagatgacatgaggcatcgaaagaagctattctacaagctggatagggggtctagagagtttgaagagaacaatgtgctgttacgccgcaggaagagagacaaaaccagtgcaaagaacccaaaggagtgcaaggaggcgcagcctcccaagtctgtttctaccaacgttccaaaactgaaggaaaagcgttctatgcgtgtggacgacttggttgaggtgaagcgcgaacgggtgccgacattcaaccaaatgacggatccttaccaccaccctttctgtctagatatacatgtcacaaagggatcagtgcgtgcttgctttgtgcacagagtgaccagccgggtggtgactgttgcacactccatatcgaaggacatgaagtttgatcttggttcgaagaagggtaagggcatgaaggcgtgtgtggcagttggggcattgcttgcgaagcgtgcaatagaggatgatattcacaatgcaatctatacaccaaggaaaggggataggattgaagggaaaattgaggctgtgttgtgtgcaataaccgagaatggagttgatgtgaaggtgaaactgaagcaaagaaagccgataaagaacacacacagtatgagcagtccttccgacgattcagctgttggtcgacacaactcctaagcagcatgaccctgagtgcctttctggttcgaatgtcgtcttattttattgcatgcaaaactgacaggggtacaggcaactgaaggagacgtagaagtagccaagatggtcccagcattctttgtttcatgtgcttatccatcgtttgtgtgtatgggtagttcctgactgcctgtatcaagttctgaatagaccatctgtacgcactgccagtccgttgctgccgaatcaagctgtatgcttttttttaacgtaatac

SEQ ID NO: 74203 - DNA, 392 bp, Zea Mays
ctcttttttggtctctcacatctttcacctgaagggtcatcgaatatatcaaaatctacaacgtaatcacttgaacacacacagtatgagcagtccttccgacgattcagctgttggtcgacacaactcctaagcagcatgaccctgagtgcctttctggttcgaatgtcgtcttattttattgcatgcaaaactgacaggggtacaggcaactgaaggagacgtagaagtagccaagatggtcccagcattctttgtttcatgtgcttatccatcgtttgtgtgtatgggtagttcctgactgcctgtatcaagttctgaatagaccatctgtacgcactgccagtccgttgctgccgaatcaagctgtatgcttttttttaacgtaatac

SEQ ID NO: 74204 - DNA, 2022 bp, Zea Mays
ctgcgctccctgcagctgcagcctcgcttgctgttgctggccttgtcgcgagtaattgccagccatcttctgctagagaaaacacacgcccgcccccgtggtccgtctgctgccgcggccccgcacagaaactcacaccgcagctgcagctgcagccgcggcccgccagcaaccagtccgatccccgccgcggctacctgccggttcccctctcccttcccggcgtgcggccgcgcgcgtgtttgatcgatcggagccagacagagcgcggaaacggcctgagaattctgttggagcagcagcactgccacagctagcatgggtcgggcgccgtgctgcgacaagacgagtgtgaagcgggggccgtggtcgcccgaggaggacgacctgctgcggagctacgtccagaaccacggcaccggcggcaactggatcgcgctcccgcacaaagcagggctgaaccggtgcggcaagagctgccggctgcggtggctcaactacctgcgcccggacatcaagcacggcggctacacggagcaggaggaccggatcatctgctccctctacaactgcatcgggagcaggtggtccatcatcgcgtccaagctgccggggcggacggacaacgacgtcaagaactactggaacaccaagctcaagaagaaggcagtcgccatgcaggagcagcagaaggagaaggaggaggaggaggagtactaccagcagcagcagcagcacacctcaggcggccgcggcgccgctccccggagccagcaatgcgcctccatgcagccctcgcccgcgtccgcctcgtccgcggtcaccaccgcgagccccagcgacgcgtgcagcttcggggccatgtacccctccccgacgacgctgcaggctccggtgcacgcgcgctacgacgtcacggcgccagtgccgccggtgccgcaacagcaagcgtcgtcgtcttcgctcgccgagttctcccccgcgccggcgccggcgccggcggcgacaccacccgccgcctccatcatcggcggcacctgcacctgggccggcgggccgctactcgacgacatgttcctgcccgagctcctcggggacgtcagcgagttcccgcctggcgacttcttcggcaccggcgggttggccccgctgctgcaggacagggcggcggcggcgtccctccaggagctctccgcgttctactttcccaacgcgcaggccgagatgtgggctgcagcggatcatcacgttcatgccaataacaagcctgcggccggactctgccacagcctgacatgactgctctcgatcatgcgcagagccgcagagggctagcgtgtctctctcttgctagtcgttcttggctgatctctccctgtccatctgtatgatcgctctctaattctctatgcgaggtcatcacatgtacattactattatcttatcactctccatatgcatggtctgtgactagcaccataccatagagaagttattaggttcggatcgccattgcttcgttcgtatggcttatgtctgcaccttcacagaaaaagtgtgggacaagataataaactgggccaacctctcattcttacaaggaactcagaatttaggatcgctatatacatggtagaaaagtctgaggaatcacagtaaagatacaaggaaattttttgatggccttatgatatatttttggtggcacatttggttggagagaaatcgtcgagtgttccaagggcaacaaagagacattgagcaggttgccttctcaatcaagaaagtgtttgaaagcagagcatctctcccgcactcatttggaggctagtggtctgaacgcatcaatggatttaaataggacaaggggagtggagttagtttatgggggttgcatttagtcatagcttgtttttgtaaataatgaggtacagtggttttagggggctttgctgttatcttgtgtaatgcagagtttgtattttttttccctcttctaatatatttgcgtgacaaagtttt

SEQ ID NO: 74205 - DNA, 1935 bp, Zea Mays
agacttcaaacaaacagtaaatgaggtgcaccctagcctgggtgaggctgatggatcaaagaacctaagcaactgtacaattgaaagccttgcatcagctgcaagcagactgcgtgaattgaaagtccagaggatgcaaaagcttcaagatttggcctctagcatgcttgaactttggaatctcatggatacaccacttgaagaacagcagatgttccagaatgtaacgtgcaatattgctgcttctgaacatgaaataactgagcctaacacgctctctattgacttcctcagctacgtggaatctgaagttttaagactcgagcaacttaaagcgagcaagatgaaagaccttgttctaaaaaagaagacagaactggaagagcataggagacgtgctcatttgattggcgaggaaggctatgcagctgaatttagcgatgaggctattgaggcaggagctgttgatccttcgctggtgctggaacaaattgaggctcacattgccacagtgaaagaggaagcctttagcaggaaggatattctcgagaaggttgaaagatggttgaatgcatgtgaggaggaagcttggctggaagattacaacaaagatgacaatcgttataatgccgggaggggggcccacttgacactcaaaagggctgagaaagctcgtattttggttaacaagatcccaggactggtagatgttttaaccacaaaaattgtagcctgggaggcagaaagaggaaaggaattcacatacgacggtgtccgccttatgtcaatgcttgaagagtacatgatcgttcgccaggagaaagagctacagaagaagaggcaaagggatcagaagaaaatccaggatcaactcaaagctgagcaggaagcgctctatggatcaaaaccaagtccttctaagcctcaaagcacgaagaaggcgcctaggcactccatgggtggtgcgaaccgaagactgtctcttggtggagccactatgcaagcccccaaaacagatatactgcactccaagacagctcgtgccgccaagaaggctgaagatttgggcgctttatctcctagtagtagaggcttggacattgccggtcttcccatcaagaagttatctttcaacgcaagcactttgcgagaggcagaaacaccgcgcaagccttttgcccagatcatgccaggaaacaacgtctcaccgatgcctacgcggcccatctccagcgccacagaggaagagaacaaaacccccaggacatttgtaggagggctcaatgcgaaaacgccggcgacagtgacggctcctatgcagatggcgatgacaccagccgtggctaacaaggtcatagccactcctgcaacccttttccaggagaaggcagattcgccagcactgccagcggacatcgagtactcgttcgaagagaggcggctcgctgtttacctggccaggcaagtggcttaaactcggtcattcacgtagttgaaagctgaactgactgcgatttctcgtcagaggccaatgttacctgttggtcgatactcgatagtagtcggcctcgttcgtaccttgcagtactattctgattcatagccatatttgctacagctagtaaggatttatttgggtactctaatattgatctcaatccacatgtgttgaaatgaattggagtgtaaattaatttaagttacacttcaatctatctcaatacatgtggatttgggagttttagacccgtatcgtaagttgtatagcttcacctggttgcatcgtggatgacctgttattgtttattactgttatccaaatatcttgccgcatgttatgtttctgatctcaaatctttgggataatctggtttgttgtctaggaatcatcatcctggaatatttcgtagtgtgtgagtggtgcagtgtgtgcgg

SEQ ID NO: 74206 - DNA, 2093 bp, Zea Mays
ctgactatagcctgaacgctactcatgcgcgtgcacggtgcacctgaagaaacgagccatttaccgcgcggacaagcaagcaaactgcccagaagaacggctctccacttcacacctgtttgctgtttttcatctcccgttcacctcgcgtgccgcatgcgcgacaactagagcgaccgccgccgctctacgcccagctgcccatgtcttcgtcgggcccttcgccggcgacgggaacccaccacaccaggtcaacaccgttgcaagtaattcatgttttgggaaacttcatgagaatttggtctgtttactccttgtatagctacctatccaacagtggagattcaatagttggctttatcttcagttgtcttgtacccacttcagtcatattcttggtcttacagaagccttggaaaggccgacctttgcccaactcacaggttgttcctacagttgtcaatggaggaatcctggcattctactttgtattatggggtaaaggacttcttgcttgtggtccactagtttcaatctccacctatgtgcaatgtttaaagaatgctgcgagccagtgatatcagatcattgtggaaacaaattacacttcatggacatcaaccgtaggacatttgtatgtcgtccttacctgttgatctaatgcatgatatgatgatagtcattctgacttgagagctgcacacatgaatttgcatgattgcatttggggatggggagttgcacttactctcctcgggttgtgcagtatgattctgaacacttcaacagaaaaacagcatttcattaccattaaccacatcattggtatattttgcactgctttgagcatactaaagaagcatttactggcacttctatctaaactcatttttgctgtctatcgagtctagtgctctactggcagagtatgcaggtgctgttcttggagttctctctgctgctttatatggaaggaaatctaacatctggaaaaagattggtggacttgctgctatgttggcagcatattatctcttgtcaaatggatggtctacaagaacccattctcctctatatagctttggaagtgaaccagtggagaaggcagcacaaactattggagtgaaagcaatgatggtgccaattactgctgggatcttgtctgctttaaggagagtattagctcggcgtgtttctctcaagaatcaacttaaaaggcggctccatgctataactattgcttctgctacttgtttcctttttccgtttgccatgtgggatacgatcctaggttcggcatctgacagcattgttaaattacaactaccaagttgggcatactttagtactgttttatttggaatggtgcttatattctatgttgacaatgttgctgaagaaaagttgcatctggtcttctcttctccaaggcacttaatggtctcaacaggttgcatcatcgtgttggaaacagtgtaccaaatggatttctcccttttaggatttctggtctgttctgttattttgggattcggtatttctgaagcaacctccttggaacgctcaaagaaaagccctttagagacccatgaactatcgaatggggtgttccacaatcaattgcctatttcagaacttccaagctgaagaatatatgacctagctacgacgttgtgaatggctgcggttgcacacctcaagctcaatggttcgattctttgcgtgaaggttttaacgagacagaaaacacggatgtttttgacctgccaatgcccaatgtgtctttgtaatcctccattattgttggccacctgcatcctgtacatgtgaacaactcaagtagatgtgtatccgtattccccttgcagatattgcaattgtcacagcatcctgtttaactgcttgggtagtttcgaaaatttgtttttctcacttggagacgcagatggttcaagctgttaacagaagtgcactgattgttctttttcagaggctgaaacctgtatgtaacccgtccatgatatgattaacaagctgactttatctttgacctattcgtgaatgcaatcagcgagtctcctgcatgctgcagc

SEQ ID NO: 74207 - DNA, 1103 bp, Zea Mays
gcctgaacgctactcatgcgcgtgcacggtgcacctgaagaaacgagccatttaccgcgcggacaagcaagcaaactgcccagaagaacggctctccacttcacacctgtttgctgtttttcatctcccgttcacctcgcgtgccgcatgcgcgacaactagagcgaccgccgccgctctacgcccagctgcccatgtcttcgtcgggcccttcgccggcgacgggaacccaccacaccaggtcaacaccgttgcaagtaattcatgttttgggaaacttcatgagaatttggtctgtttactccttgtatagctacctatccaacagtggagattcaatagttggctttatcttcagttgtcttgtacccacttcagtcatattcttggtcttacagaagccttggaaaggccgacctttgcccaactcacaggttgttcctacagttgtcaatggaggaatcctggcattctactttgtattatgggtgctctactggcagagtatgcaggtgctgttcttggagttctctctgctgctttatatggaaggaaatctaacatctggaaaaagattggtggacttgctgctatgttggcagcatattatctcttgtcaaatggatggtctacaagaacccattctcctctatatagctttggaagtgaaccagtggagaaggcagcacaaactattggagtgaaagcaatgatggtgccaattactgctgggatcttgtctgctttaaggagagtattagctcggcgtgtttctctcaagaatcaacttaaaaggcggctccatgctataactattgcttctgctacttgtttcctttttccgtttgccatgtgggatacgatcctaggttcggcatctgacagcattgttaaattacaactaccaagttgggcatactttagtactgttttatttggaatggtgcttatattctatgttgacaatgttgctgaagaaaaatcgcaaagtgaaccttgagcacttgttttgttatcatcggttaggctgtctctagcggccttacctatcctacatcctatctcaaactccgctttgtaaacagtgtggtctgtaatgcaaa

SEQ ID NO: 74208 - DNA, 1786 bp, Zea Mays
gcctgaacgctactcatgcgcgtgcacggtgcacctgaagaaacgagccatttaccgcgcggacaagcaagcaaactgcccagaagaacggctctccacttcacacctgtttgctgtttttcatctcccgttcacctcgcgtgccgcatgcgcgacaactagagcgaccgccgccgctctacgcccagctgcccatgtcttcgtcgggcccttcgccggcgacgggaacccaccacaccaggtcaacaccgttgcaagtaattcatgttttgggaaacttcatgagaatttggtctgtttactccttgtatagctacctatccaacagtggagattcaatagttggctttatcttcagttgtcttgtacccacttcagtcatattcttggtcttacagaagccttggaaaggccgacctttgcccaactcacaggttgttcctacagttgtcaatggaggaatcctggcattctactttgtattatggggtaaaggacttcttgcttgtggtccactagttgctctactggcagagtatgcaggtgctgttcttggagttctctctgctgctttatatggaaggaaatctaacatctggaaaaagattggtggacttgctgctatgttggcagcatattatctcttgtcaaatggatggtctacaagaacccattctcctctatatagctttggaagtgaaccagtggagaaggcagcacaaactattggagtgaaagcaatgatggtgccaattactgctgggatcttgtctgctttaaggagagtattagctcggcgtgtttctctcaagaatcaacttaaaaggcggctccatgctataactattgcttctgctacttgtttcctttttccgtttgccatgtgggatacgatcctaggttcggcatctgacagcattgttaaattacaactaccaagttgggcatactttagtactgttttatttggaatggtgcttatattctatgttgacaatgttgctgaagaaaagttgcatctggtcttctcttctccaaggcacttaatggtctcaacaggttgcatcatcgtgttggaaacagtgtaccaaatggatttctcccttttaggatttctggtctgttctgttattttgggattcggtatttctgaagcaacctccttggaacgctcaaagaaaagccctttagagacccatgaactatcgaatggggtgttccacaatcaattgcctatttcagaacttccaagctgaagaatatatgacctaggttgagatcggtgaaagttaatattacacaacacgtttcaagagtggactgttacggtttgagtagtaacgaagaatattaaagctacgacgttgtgaatggctgcggttgcacacctcaagctcaatggttcgattctttgcgtgaaggttttaacgagacagaaaacacggatgtttttgacctgccaatgcccaatgtgtctttgtaatcctccattattgttggccacctgcatcctgtacatgtgaacaactcaagtagatgtgtatccgtattccccttgcagatattgcaattgtcacagcatcctgtttaactgcttgggtagtttcgaaaatttgtttttctcacttggagacgcagatggttcaagctgttaacagaagtgcactgattgttctttttcagaggctgaaacctgtatgtaacccgtccatgatatgattaacaagctgactttatctttgacctattcgtgaatgcaatcagcgagtctcctgcatgctgcagc

SEQ ID NO: 74209 - DNA, 1993 bp, Zea Mays
gcctgaacgctactcatgcgcgtgcacggtgcacctgaagaaacgagccatttaccgcgcggacaagcaagcaaactgcccagaagaacggctctccacttcacacctgtttgctgtttttcatctcccgttcacctcgcgtgccgcatgcgcgacaactagagcgaccgccgccgctctacgcccagctgcccatgtcttcgtcgggcccttcgccggcgacgggaacccaccacaccaggtcaacaccgttgcaagtaattcatgttttgggaaacttcatgagaatttggtctgtttactccttgtatagctacctatccaacagtggagattcaatagttggctttatcttcagttgtcttgtacccacttcagtcatattcttggtcttacagaagccttggaaaggccgacctttgcccaactcacaggttgttcctacagttgtcaatggaggaatcctggcattctactttgtattatggggtaaaggacttcttgcttgtggtccactagtagtatgcaggtgctgttcttggagttctctctgctgctttatatggaaggaaatctaacatctggaaaaagattggtggacttgctgctatgttggcagcatattatctcttgtcaaatggatggtctacaagaacccattctcctctatgtatccgactacattgatatcttcctgaaatggtttactgagttaatgtgaataactctgcatttttggcagttaaagtatctctatctacaaattaatttgtaatggactcatctaaacccgtttgggaagaccttaacttcatacagatagctttggaagtgaaccagtggagaaggcagcacaaactattggagtgaaagcaatgatggtgccaattactgctgggatcttgtctgctttaaggagagtattagctcggcgtgtttctctcaagaatcaacttaaaaggcggctccatgctataactattgcttctgctacttgtttcctttttccgtttgccatgtgggatacgatcctaggttcggcatctgacagcattgttaaattacaactaccaagttgggcatactttagtactgttttatttggaatggtgcttatattctatgttgacaatgttgctgaagaaaagttgcatctggtcttctcttctccaaggcacttaatggtctcaacaggttgcatcatcgtgttggaaacagtgtaccaaatggatttctcccttttaggatttctggtctgttctgttattttgggattcggtatttctgaagcaacctccttggaacgctcaaagaaaagccctttagagacccatgaactatcgaatggggtgttccacaatcaattgcctatttcagaacttccaagctgaagaatatatgacctaggtgagggagatgcattgaaaacaaaattctgtatttacttaagtatgaattttgaattacttatctgttaaggttgagatcggtgaaagttaatattacacaacacgtttcaagagtggactgttacggtttgagtagtaacgaagaatattaaagctacgacgttgtgaatggctgcggttgcacacctcaagctcaatggttcgattctttgcgtgaaggttttaacgagacagaaaacacggatgtttttgacctgccaatgcccaatgtgtctttgtaatcctccattattgttggccacctgcatcctgtacatgtgaacaactcaagtagatgtgtatccgtattccccttgcagatattgcaattgtcacagcatcctgtttaactgcttgggtagtttcgaaaatttgtttttctcacttggagacgcagatggttcaagctgttaacagaagtgcactgattgttctttttcagaggctgaaacctgtatgtaacccgtccatgatatgattaacaagctgactttatctttgacctattcgtgaatgcaatcagcgagtctcctgcatgctgcagc

SEQ ID NO: 74210 - DNA, 1688 bp, Zea Mays
gcctgaacgctactcatgcgcgtgcacggtgcacctgaagaaacgagccatttaccgcgcggacaagcaagcaaactgcccagaagaacggctctccacttcacacctgtttgctgtttttcatctcccgttcacctcgcgtgccgcatgcgcgacaactagagcgaccgccgccgctctacgcccagctgcccatgtcttcgtcgggcccttcgccggcgacgggaacccaccacaccaggtcaacaccgttgcaagtaattcatgttttgggaaacttcatgagaatttggtctgtttactccttgtatagctacctatccaacagtggagattcaatagttggctttatcttcagttgtcttgtacccacttcagtcatattcttggtcttacagaagccttggaaaggccgacctttgcccaactcacaggttgttcctacagttgtcaatggaggaatcctggcattctactttgtattatggggtaaaggacttcttgcttgtggtccactagtagtatgcaggtgctgttcttggagttctctctgctgctttatatggaaggaaatctaacatctggaaaaagattggtggacttgctgctatgttggcagcatattatctcttgtcaaatggatggtctacaagaacccattctcctctatatagctttggaagtgaaccagtggagaaggcagcacaaactattggagtgaaagcaatgatggtgccaattactgctgggatcttgtctgctttaaggagagtattagctcggcgtgtttctctcaagaatcaacttaaaaggcggctccatgctataactattgcttctgctacttgtttcctttttccgtttgccatgtgggatacgatcctaggttcggcatctgacagcattgttaaattacaactaccaagttgggcatactttagtactgttttatttggaatggtgcttatattctatgttgacaatgttgctgaagaaaagttgcatctggtcttctcttctccaaggcacttaatggtctcaacaggttgcatcatcgtgttggaaacagtgtaccaaatggatttctcccttttaggatttctggtctgttctgttattttgggattcggtatttctgaagcaacctccttggaacgctcaaagaaaagccctttagagacccatgaactatcgaatggggtgttccacaatcaattgcctatttcagaacttccaagctgaagaatatatgacctagctacgacgttgtgaatggctgcggttgcacacctcaagctcaatggttcgattctttgcgtgaaggttttaacgagacagaaaacacggatgtttttgacctgccaatgcccaatgtgtctttgtaatcctccattattgttggccacctgcatcctgtacatgtgaacaactcaagtagatgtgtatccgtattccccttgcagatattgcaattgtcacagcatcctgtttaactgcttgggtagtttcgaaaatttgtttttctcacttggagacgcagatggttcaagctgttaacagaagtgcactgattgttctttttcagaggctgaaacctgtatgtaacccgtccatgatatgattaacaagctgactttatctttgacctattcgtgaatgcaatcagcgagtctcctgcatgctgcagc

SEQ ID NO: 74211 - DNA, 1689 bp, Zea Mays
gcctgaacgctactcatgcgcgtgcacggtgcacctgaagaaacgagccatttaccgcgcggacaagcaagcaaactgcccagaagaacggctctccacttcacacctgtttgctgtttttcatctcccgttcacctcgcgtgccgcatgcgcgacaactagagcgaccgccgccgctctacgcccagctgcccatgtcttcgtcgggcccttcgccggcgacgggaacccaccacaccaggtcaacaccgttgcaagtaattcatgttttgggaaacttcatgagaatttggtctgtttactccttgtatagctacctatccaacagtggagattcaatagttggctttatcttcagttgtcttgtacccacttcagtcatattcttggtcttacagaagccttggaaaggccgacctttgcccaactcacagttgtcaatggaggaatcctggcattctactttgtattatggggtaaaggacttcttgcttgtggtccactagttgctctactggcagagtatgcaggtgctgttcttggagttctctctgctgctttatatggaaggaaatctaacatctggaaaaagattggtggacttgctgctatgttggcagcatattatctcttgtcaaatggatggtctacaagaacccattctcctctatatagctttggaagtgaaccagtggagaaggcagcacaaactattggagtgaaagcaatgatggtgccaattactgctgggatcttgtctgctttaaggagagtattagctcggcgtgtttctctcaagaatcaacttaaaaggcggctccatgctataactattgcttctgctacttgtttcctttttccgtttgccatgtgggatacgatcctaggttcggcatctgacagcattgttaaattacaactaccaagttgggcatactttagtactgttttatttggaatggtgcttatattctatgttgacaatgttgctgaagaaaagttgcatctggtcttctcttctccaaggcacttaatggtctcaacaggttgcatcatcgtgttggaaacagtgtaccaaatggatttctcccttttaggatttctggtctgttctgttattttgggattcggtatttctgaagcaacctccttggaacgctcaaagaaaagccctttagagacccatgaactatcgaatggggtgttccacaatcaattgcctatttcagaacttccaagctgaagaatatatgacctagctacgacgttgtgaatggctgcggttgcacacctcaagctcaatggttcgattctttgcgtgaaggttttaacgagacagaaaacacggatgtttttgacctgccaatgcccaatgtgtctttgtaatcctccattattgttggccacctgcatcctgtacatgtgaacaactcaagtagatgtgtatccgtattccccttgcagatattgcaattgtcacagcatcctgtttaactgcttgggtagtttcgaaaatttgtttttctcacttggagacgcagatggttcaagctgttaacagaagtgcactgattgttctttttcagaggctgaaacctgtatgtaacccgtccatgatatgattaacaagctgactttatctttgacctattcgtgaatgcaatcagcgagtctcctgcatgctgcagc

SEQ ID NO: 74212 - DNA, 1671 bp, Zea Mays
gcctgaacgctactcatgcgcgtgcacggtgcacctgaagaaacgagccatttaccgcgcggacaagcaagcaaactgcccagaagaacggctctccacttcacacctgtttgctgtttttcatctcccgttcacctcgcgtgccgcatgcgcgacaactagagcgaccgccgccgctctacgcccagctgcccatgtcttcgtcgggcccttcgccggcgacgggaacccaccacaccaggtcaacaccgttgcaagtaattcatgttttgggaaacttcatgagaatttggtctgtttactccttgtatagctacctatccaacagtggagattcaatagttggctttatcttcagttgtcttgtacccacttcagtcatattcttggtcttacagaagccttggaaaggccgacctttgcccaactcacaggttgttcctacagttgtcaatggaggaatcctggcattctactttgtattatgggtgctctactggcagagtatgcaggtgctgttcttggagttctctctgctgctttatatggaaggaaatctaacatctggaaaaagattggtggacttgctgctatgttggcagcatattatctcttgtcaaatggatggtctacaagaacccattctcctctatatagctttggaagtgaaccagtggagaaggcagcacaaactattggagtgaaagcaatgatggtgccaattactgctgggatcttgtctgctttaaggagagtattagctcggcgtgtttctctcaagaatcaacttaaaaggcggctccatgctataactattgcttctgctacttgtttcctttttccgtttgccatgtgggatacgatcctaggttcggcatctgacagcattgttaaattacaactaccaagttgggcatactttagtactgttttatttggaatggtgcttatattctatgttgacaatgttgctgaagaaaagttgcatctggtcttctcttctccaaggcacttaatggtctcaacaggttgcatcatcgtgttggaaacagtgtaccaaatggatttctcccttttaggatttctggtctgttctgttattttgggattcggtatttctgaagcaacctccttggaacgctcaaagaaaagccctttagagacccatgaactatcgaatggggtgttccacaatcaattgcctatttcagaacttccaagctgaagaatatatgacctagctacgacgttgtgaatggctgcggttgcacacctcaagctcaatggttcgattctttgcgtgaaggttttaacgagacagaaaacacggatgtttttgacctgccaatgcccaatgtgtctttgtaatcctccattattgttggccacctgcatcctgtacatgtgaacaactcaagtagatgtgtatccgtattccccttgcagatattgcaattgtcacagcatcctgtttaactgcttgggtagtttcgaaaatttgtttttctcacttggagacgcagatggttcaagctgttaacagaagtgcactgattgttctttttcagaggctgaaacctgtatgtaacccgtccatgatatgattaacaagctgactttatctttgacctattcgtgaatgcaatcagcgagtctcctgcatgctgcagc

SEQ ID NO: 74213 - DNA, 2369 bp, Zea Mays
gcctgaacgctactcatgcgcgtgcacggtgcacctgaagaaacgagccatttaccgcgcggacaagcaagcaaactgcccagaagaacggctctccacttcacacctgtttgctgtttttcatctcccgttcacctcgcgtgccgcatgcgcgacaactagagcgaccgccgccgctctacgcccagctgcccatgtcttcgtcgggcccttcgccggcgacgggaacccaccacaccaggtcaacaccgttgcaagtaattcatgttttgggaaacttcatgagaatttggtctgtttactccttgtatagctacctatccaacagtggagattcaatagttggctttatcttcagttgtcttgtacccacttcagtcatattcttggtcttacagaagccttggaaaggccgacctttgcccaactcacaggttgttcctacagttgtcaatggaggaatcctggcattctactttgtattatggggtaaaggacttcttgcttgtggtccactagttgctctactggcagagtatgcaggtgctgttcttggagttctctctgctgctttatatggaaggaaatctaacatctggaaaaagattggtggacttgctgctatgttggcagcatattatctcttgtcaaatggatggtctacaagaacccattctcctctatatagctttggaagtgaaccagtggagaaggcagcacaaactattggagtgaaagcaatgatggtgccaattactgctgggatcttgtctgctttaaggagagtattagctcggcgtgtttctctcaagaatcaacttaaaaggcggctccatgctataactattgcttctgctacttgtttcctttttccgtttgccatgtgggatacgatcctaggttcggcatctgacagcattgttaaattacaactaccaagttgggcatactttagtactgttttatttggaatggtgcttatattctatgttgacaatgttgctgaagaaaaatcgcaaagtgaaccttgagcacttgttttgttatcatcggttaggctgtctctagcggccttacctatcctacatcctatctcaaactccgctttgtaaacagtgtggtctgtaatgcaaaacaatgttttgcacggtcatatgcacgatctactgggcacaacctatcagtgaacgagcctgtagctgagctggttaggtggctcttcccgaatttcatattagagttaaaaaaagatccccttgtggctcgtatgtcccacgccaccaaagtacaggtctggcctaggtcatggttgttatcatatgagctatggtgccgttgtgtaggagcagtacagtctcgaggtttttttttgacagccttcttagcaagatgcctgggggctgtcttacctcccgtatatcaagtttttttttgcagtccgagccaaatcttcagtatattatagatttgaaattatttctcaaatatcttcatgtataacaatattagacaatacttttgggtgcttcttgaagtatttttattggcttttatactatgaaatatgaatcctaactcataagtcataagacatgaatggcctccctttagttaactgtcaattgtgcttcgtggttaaccttcgctccgtgtttgtaatgcgtttacttggttggcaggttgcatctggtcttctcttctccaaggcacttaatggtctcaacaggttgcatcatcgtgttggaaacagtgtaccaaatggatttctcccttttaggatttctggtctgttctgttattttgggattcggtatttctgaagcaacctccttggaacgctcaaagaaaagccctttagagacccatgaactatcgaatggggtgttccacaatcaattgcctatttcagaacttccaagctgaagaatatatgacctagctacgacgttgtgaatggctgcggttgcacacctcaagctcaatggttcgattctttgcgtgaaggttttaacgagacagaaaacacggatgtttttgacctgccaatgcccaatgtgtctttgtaatcctccattattgttggccacctgcatcctgtacatgtgaacaactcaagtagatgtgtatccgtattccccttgcagatattgcaattgtcacagcatcctgtttaactgcttgggtagtttcgaaaatttgtttttctcacttggagacgcagatggttcaagctgttaacagaagtgcactgattgttctttttcagaggctgaaacctgtatgtaacccgtccatgatatgattaacaagctgactttatctttgacctattcgtgaatgcaatcagcgagtctcctgcatgctgcagc

SEQ ID NO: 74214 - DNA, 1951 bp, Zea Mays
atctaatcaaaagggtcaacaccgttgcaagtaattcatgttttgggaaacttcatgagaatttggtctgtttactccttgtatagctacctatccaacagtggagattcaatagttggctttatcttcagttgtcttgtacccacttcagtcatattcttggtcttacagaagccttggaaaggccgacctttgcccaactcacaggttgttcctacagttgtcaatggaggaatcctggcattctactttgtattatggggtaaaggacttcttgcttgtggtccactagtgtaagtatcttgttctatcaggaccatggatttttcacatagctgcatggtctgtagtgtgtggtgcggtgcatttatgccagggaatatctagttcaatctccacctatgtgcaatgtttaaagaatgctgcgagccagtgatatcagatcattgtggaaacaaattacacttcatggacatcaaccgtaggacatttgtatgtcgtccttacctgttgatctaatgcatgatatgatgatagtcattctgacttgagagctgcacacatgaatttgcatgattgcatttggggatggggagttgcacttactctcctcgggttgtgcagtatgattctgaacacttcaacagaaaaacagcatttcattaccattaaccacatcattggtatattttgcactgctttgagcatactaaagaagcatttactggcacttctatctaaactcatttttgctgtctatcgagtctagtgctctactggcagagtatgcaggtgctgttcttggagttctctctgctgctttatatggaaggaaatctaacatctggaaaaagattggtggacttgctgctatgttggcagcatattatctcttgtcaaatggatggtctacaagaacccattctcctctatatagctttggaagtgaaccagtggagaaggcagcacaaactattggagtgaaagcaatgatggtgccaattactgctgggatcttgtctgctttaaggagagtattagctcggcgtgtttctctcaagaatcaacttaaaaggcggctccatgctataactattgcttctgctacttgtttcctttttccgtttgccatgtgggatacgatcctaggttcggcatctgacagcattgttaaattacaactaccaagttgggcatactttagtactgttttatttggaatggtgcttatattctatgttgacaatgttgctgaagaaaagttgcatctggtcttctcttctccaaggcacttaatggtctcaacaggttgcatcatcgtgttggaaacagtgtaccaaatggatttctcccttttaggatttctggtctgttctgttattttgggattcggtatttctgaagcaacctccttggaacgctcaaagaaaagccctttagagacccatgaactatcgaatggggtgttccacaatcaattgcctatttcagaacttccaagctgaagaatatatgacctagctacgacgttgtgaatggctgcggttgcacacctcaagctcaatggttcgattctttgcgtgaaggttttaacgagacagaaaacacggatgtttttgacctgccaatgcccaatgtgtctttgtaatcctccattattgttggccacctgcatcctgtacatgtgaacaactcaagtagatgtgtatccgtattccccttgcagatattgcaattgtcacagcatcctgtttaactgcttgggtagtttcgaaaatttgtttttctcacttggagacgcagatggttcaagctgttaacagaagtgcactgattgttctttttcagaggctgaaacctgtatgtaacccgtccatgatatgattaacaagctgactttatctttgacctattcgtgaatgcaatcagcgagtctcctgcatgctgcagc

SEQ ID NO: 74215 - DNA, 1985 bp, Zea Mays
cacaaattgatctaaatttctgactattggtatcaatatatatatatggtcaacaccgttgcaagtaattcatgttttgggaaacttcatgagaatttggtctgtttactccttgtatagctacctatccaacagtggagattcaatagttggctttatcttcagttgtcttgtacccacttcagtcatattcttggtcttacagaagccttggaaaggccgacctttgcccaactcacaggttgttcctacagttgtcaatggaggaatcctggcattctactttgtattatggggtaaaggacttcttgcttgtggtccactagtgtaagtatcttgttctatcaggaccatggatttttcacatagctgcatggtctgtagtgtgtggtgcggtgcatttatgccagggaatatctagttcaatctccacctatgtgcaatgtttaaagaatgctgcgagccagtgatatcagatcattgtggaaacaaattacacttcatggacatcaaccgtaggacatttgtatgtcgtccttacctgttgatctaatgcatgatatgatgatagtcattctgacttgagagctgcacacatgaatttgcatgattgcatttggggatggggagttgcacttactctcctcgggttgtgcagtatgattctgaacacttcaacagaaaaacagcatttcattaccattaaccacatcattggtatattttgcactgctttgagcatactaaagaagcatttactggcacttctatctaaactcatttttgctgtctatcgagtctagtgctctactggcagagtatgcaggtgctgttcttggagttctctctgctgctttatatggaaggaaatctaacatctggaaaaagattggtggacttgctgctatgttggcagcatattatctcttgtcaaatggatggtctacaagaacccattctcctctatatagctttggaagtgaaccagtggagaaggcagcacaaactattggagtgaaagcaatgatggtgccaattactgctgggatcttgtctgctttaaggagagtattagctcggcgtgtttctctcaagaatcaacttaaaaggcggctccatgctataactattgcttctgctacttgtttcctttttccgtttgccatgtgggatacgatcctaggttcggcatctgacagcattgttaaattacaactaccaagttgggcatactttagtactgttttatttggaatggtgcttatattctatgttgacaatgttgctgaagaaaagttgcatctggtcttctcttctccaaggcacttaatggtctcaacaggttgcatcatcgtgttggaaacagtgtaccaaatggatttctcccttttaggatttctggtctgttctgttattttgggattcggtatttctgaagcaacctccttggaacgctcaaagaaaagccctttagagacccatgaactatcgaatggggtgttccacaatcaattgcctatttcagaacttccaagctgaagaatatatgacctagctacgacgttgtgaatggctgcggttgcacacctcaagctcaatggttcgattctttgcgtgaaggttttaacgagacagaaaacacggatgtttttgacctgccaatgcccaatgtgtctttgtaatcctccattattgttggccacctgcatcctgtacatgtgaacaactcaagtagatgtgtatccgtattccccttgcagatattgcaattgtcacagcatcctgtttaactgcttgggtagtttcgaaaatttgtttttctcacttggagacgcagatggttcaagctgttaacagaagtgcactgattgttctttttcagaggctgaaacctgtatgtaacccgtccatgatatgattaacaagctgactttatctttgacctattcgtgaatgcaatcagcgagtctcctgcatgctgcagc

SEQ ID NO: 74216 - DNA, 2042 bp, Zea Mays
gtaatttccatgtcctacactgtcaacaccgttgcaagtaattcatgttttgggaaacttcatgagaatttggtctgtttactccttgtatagctacctatccaacagtggagattcaatagttggctttatcttcagttgtcttgtacccacttcagtcatattcttggtcttacagaagccttggaaaggccgacctttgcccaactcacaggttgttcctacagttgtcaatggaggaatcctggcattctactttgtattatggggtaaaggacttcttgcttgtggtccactagtgtaagtatcttgttctatcaggaccatggatttttcacatagctgcatggtctgtagtgtgtggtgcggtgcatttatgccagggaatatctagttcaatctccacctatgtgcaatgtttaaagaatgctgcgagccagtgatatcagatcattgtggaaacaaattacacttcatggacatcaaccgtaggacatttgtatgtcgtccttacctgttgatctaatgcatgatatgatgatagtcattctgacttgagagctgcacacatgaatttgcatgattgcatttggggatggggagttgcacttactctcctcgggttgtgcagtatgattctgaacacttcaacagaaaaacagcatttcattaccattaaccacatcattggtatattttgcactgctttgagcatactaaagaagcatttactggcacttctatctaaactcatttttgctgtctatcgagtctagtgctctactggcagagtatgcaggtgctgttcttggagttctctctgctgctttatatggaaggaaatctaacatctggaaaaagattggtggacttgctgctatgttggcagcatattatctcttgtcaaatggatggtctacaagaacccattctcctctatatagctttggaagtgaaccagtggagaaggcagcacaaactattggagtgaaagcaatgatggtgccaattactgctgggatcttgtctgctttaaggagagtattagctcggcgtgtttctctcaagaatcaacttaaaaggcggctccatgctataactattgcttctgctacttgtttcctttttccgtttgccatgtgggatacgatcctaggttcggcatctgacagcattgttaaattacaactaccaagttgggcatactttagtactgttttatttggaatggtgcttatattctatgttgacaatgttgctgaagaaaagttgcatctggtcttctcttctccaaggcacttaatggtctcaacaggttgcatcatcgtgttggaaacagtgtaccaaatggatttctcccttttaggatttctggtctgttctgttattttgggattcggtatttctgaagcaacctccttggaacgctcaaagaaaagccctttagagacccatgaactatcgaatggggtgttccacaatcaattgcctatttcagaacttccaagctgaagaatatatgacctaggttgagatcggtgaaagttaatattacacaacacgtttcaagagtggactgttacggtttgagtagtaacgaagaatattaaagctacgacgttgtgaatggctgcggttgcacacctcaagctcaatggttcgattctttgcgtgaaggttttaacgagacagaaaacacggatgtttttgacctgccaatgcccaatgtgtctttgtaatcctccattattgttggccacctgcatcctgtacatgtgaacaactcaagtagatgtgtatccgtattccccttgcagatattgcaattgtcacagcatcctgtttaactgcttgggtagtttcgaaaatttgtttttctcacttggagacgcagatggttcaagctgttaacagaagtgcactgattgttctttttcagaggctgaaacctgtatgtaacccgtccatgatatgattaacaagctgactttatctttgacctattcgtgaatgcaatcagcgagtctcctgcatgctgcagc

SEQ ID NO: 74217 - DNA, 2028 bp, Zea Mays
caaccgcttcgctcctctcggtaaatcggcgatccatccagcggagccgcaaccaaaaagcagagcaacgcccaaattaaaaacagggcaggggaaaaaaaaagctcgcagaagtgagctccctcctcccccctctctctctatccgtctctccgctcggagctcgcaccaccgccgaaccctcctccgatccaaaccctcctcgcatcgtgccgcatgcctccacgcgccacgaggcggcggcgctgcagctgaccaccccacttgaccagccggggggcagaaagagagagagagacaaccggacgcggacggcaggcatgggcggcgtcacgtccaccatcgccgcgcgcttcgccttcttcccgccgacgccgccgtcctacaccgtcgtcgtcgccgacgccgccaccggtcgcctcgccatcccggagatctcccgggcaccctcgcgccgtcggaggcgggacggcgccggcgccgggggctcctcctcggcctcctccgtcgtcgcggccgccgaggaggaggacggcgcggaggtggtgcgcctccggacccgccgcgggaacgagatcgtgggggtctacgtgcgccacgcgcgggcctccgccaccgtgctctactcccacggcaacgccgccgacctcggccagatgtacgggctcttcgtcgagctcagccgccgcctccgcgtcaacctctttgggtatgattattctggttatgggagatctacagggaagcccactgagtgtaatacatatgcagacattgaagcagcatataactgcctcaaggaaaaatatggtgtagcagatgaggatataatcttatatggtcagtctgttggaagtggtccaaccattgatcttgcttcgcggttgccagacttgcgagctgtggttttgcatagtcctattttatctggactaagagtaatatatccagtcaagcggacgttttggtttgacatttacaagaacatcgataaaattggcttggtaaattgtccggtgcttgtcattcatggtacatcagatgacgtggttgactgctcccacggaaaacagctatgggagcactgcaaagtaaaatattctccactgtggttaagtggtggtggccactgcaatctcgagctatatccagattacattaagcacttgaaaaagtttgtgtcaagcgttagcaaaaaagcatcatcgaaacctgacccaaaagaaacaacgacaaaggatgacactaccagtaaagaaacagaggaagcgtacccggagaaacctcaagaggccaagaagtgcccgcagatctcgcgaaagagcctggacagccgattcgggaaatccaaaacagtggatgttcctgataaaccacggatgagctcggacgacatcgacaagttccggaggagcagatgcttggtctggtgatgcctgtgttctgcacagattgtcgaacagtacctgagcgaggatactatagcatggaagtcaagcaactgtattacatcatgctgcgaggaacggcatcagcggttcctgcagcggagaggaaaggactgttaaataagaaaaaaaagaatcaggaagctaccgtcagcatccatcaaagacacagctacttgactgaaaactggtagttcctcagttaatttagcacttacaccgacaacatgttttgcagcatcggttagggtttccatattgtaaaagtgtaccgttattgtctgtaatcacgagggaccgatacaaacatttgcagagtctgaaagccttaacggaatcacgagcaccatagtctattctgggtgcaccagtattcgggctcacatgcgttgtggaaccatgtgagctttaccctgtatactgatctactcataccttattatagggaccatgctccacatatctatgggaaactgacgggtgaaacatgctgtacgtatcactaggaaacagactgacgcgtgaaacggcagcaagcttgtgcacattacagctgtgaaagatcagacggtgccgaagc

SEQ ID NO: 74218 - DNA, 1414 bp, Zea Mays
ctcggacgagccgaactgagctagcacgatatccatccctaattaggttcgtaccagtgtagcatatccctctcgcctttgtcacatccagtgatggcaatgggcctcgatttctcacatgggaattcctctattaagggatggggaatgtggaagtttctcccacagggaaaaaattctcctccgacgggatcaaaaagaaaagaagcagcacctattgttgatatggtttgcttcccttcaaatcgaagaacaaaccagggacaaggattgagtccttcctacagaagaacgagagcatacatccgaaaagatacacctacgcggacgtgaaaagaatgacaaaatccttcgctgtgaagctaggccaaggtgggtttggtgctgtatacaaaggcagcctccacgatggccgacaggtagcagtcaagatgctcaaggacacccaaggtgacggcgaggaattcatgaacgaggtggctagcatcagcaggacttctcatgtcaacgtcgtgacacttctagggttttgcttgcaagggtcgaaaagagcactgatctacgagtacatgcccaatggttcgctcgaaaggtatgccttcaccggtgacatgaacagtgagaatttgctaacctgggaaagactatttgacatagcaattggcacggccagagggctcgaatacctacaccggggatgcaacactcggatcgtgcattttgacatcaagccacacaacatcctgttagaccaggatttctgccctaagatctctgactttggactggccaagctatgtctgaacaaagagagcgctatctccattgttggcgcaagagggacgatagggtatatcgccccggaggtctactcaaagcaatttggaacaataagcagcaagtctgatgtctatagctatgggatgatggtccttgagatggttggagcaagggacaggaatacaagcgcagatagtgaccatagcagccaatatttccctcagtggctttatgagcatttggacgactattgtgttggtgcttccgagattaatggtgaaaccacagagctcgtgaggaagatgatagttgtaggtctgtggtgcatacaagtgattccgactgatcgaccaacaatgacgagagtcgtcgagatgttggaagggagcacaagtaatctagagttgccacccagagttcttttgagctgacaaagcgtagatatttttcctatcaaatgttgcttccaggtcacacaaatgcaaaatatttgtggagacgagtgcccattaacctcatacaatgtatctgtatgacaaaagtcccacgactcactggacgcggaaatgtcgcttgactacgtcaattttctaaaaagattggcagcaattaatggaggcttatagcggtaact

SEQ ID NO: 74219 - DNA, 1396 bp, Zea Mays
gtaagagcctatagtcaatacacatgttcatttcgtctaaaagagcagaagaaaagcatgtgatgaattattgccatgtcatgtttaaaatacagaattctcaaaaacaaaaaaaaacttggaatccactaaccactgatagcattgtagaaaatttcatcctcccgttgggcagtacactgatgagtttacatgctgactagtgatatggtttgcttcccttcaaatcgaagaacaaaccagggacaaggattgagtccttcctacagaagaacgagagcatacatccgaaaagatacacctacgcggacgtgaaaagaatgacaaaatccttcgctgtgaagctaggccaaggtgggtttggtgctgtatacaaaggcagcctccacgatggccgacaggtagcagtcaagatgctcaaggacacccaaggtgacggcgaggaattcatgaacgaggtggctagcatcagcaggacttctcatgtcaacgtcgtgacacttctagggttttgcttgcaagggtcgaaaagagcactgatctacgagtacatgcccaatggttcgctcgaaaggtatgccttcaccggtgacatgaacagtgagaatttgctaacctgggaaagactatttgacatagcaattggcacggccagagggctcgaatacctacaccggggatgcaacactcggatcgtgcattttgacatcaagccacacaacatcctgttagaccaggatttctgccctaagatctctgactttggactggccaagctatgtctgaacaaagagagcgctatctccattgttggcgcaagagggacgatagggtatatcgccccggaggtctactcaaagcaatttggaacaataagcagcaagtctgatgtctatagctatgggatgatggtccttgagatggttggagcaagggacaggaatacaagcgcagatagtgaccatagcagccaatatttccctcagtggctttatgagcatttggacgactattgtgttggtgcttccgagattaatggtgaaaccacagagctcgtgaggaagatgatagttgtaggtctgtggtgcatacaagtgattccgactgatcgaccaacaatgacgagagtcgtcgagatgttggaagggagcacaagtaatctagagttgccacccagagttcttttgagctgacaaagcgtagatatttttcctatcaaatgttgcttccaggtcacacaaatgcaaaatatttgtggagacgagtgcccattaacctcatacaatgtatctgtatgacaaaagtcccacgactcactggacgcggaaatgtcgcttgactacgtcaattttctaaaaagattggcagcaattaatggaggcttatagcggtaact

SEQ ID NO: 74220 - DNA, 543 bp, Zea Mays
aaggcgctcatcgactccagccagccgcccaaaaatccaggcgcaaatcacaacctcgcatcctcttctgtcccgtctccagctcttcgttcgttcccctctcgccgcccgtctcccccgcggtcgaggagccgccaatagcaaggagagggtttcctcctccctccacggctccaccgagctccccgatccctccgccccaaatcccacacacccggttggccaccgcctcgccatggatttggatctgtggatctccaaggtcaaggagggtcagcacctcgccgagcacgagcttcagtccctctgcgaatatgtgaaggagatcctcatcgaagagtcgaacgtgcaaccagtgaacagccccgtgacggtttgcggtgatatccatgggcagttccatgacctaatgaagctcttcgcgacgggtggccacgtcccagagacgaactatattttcatgggtgattttgtggaccgtggcttcaatagtctagaggttttcaccatcctattgctactaaaagcgaggtatcttgccaa

SEQ ID NO: 74221 - DNA, 964 bp, Zea Mays
aaaagtggttcaggttatcactgataatggggctaactacaaggcagcaggtgtatggtttctatgatgagtgtcagagaaagtatggcaacgccaatgcatggaggtactgcactgatgtttttgattaccttacgctatcagcaatcattaatggccaagtcctctgtgttcatggtggtctttctcctgatgtacgcactattgaccagatacgaacgattgatcgcaattgtgaaattccccatgaaggccctttctgcgatcttatgtggagtgaccctgaggagatagagacatgggctgttagtccccgtggagcaggttggctgtttggatcgcgagtaacagcagagttcaactttgttaatggtatcgagctagtttgccgggctcaccagctggtccaggaaggcttaaagtacatgttccaggagaagggccttgtaactgtgtggtctgcacccaattattgctacagatgtggcaatgtagcttctatattaagcttcgatgagaagatggaaagagatgtcaagttcttcacagagacagaggaaaacaaccagatgcgaggcccaaggactgcagtcccatatttcctctgacttcaattgtacattttagaagtcaacatttaaatctgatactttcttgtacgcagctcctggcatatattcatttcgttggatgtcatcaggtatatgttctgtaaactaagcttgattctgcacgatggacactgttactgagttactcgcagttctttaccatgtgaggcgcatctaacatgtgacatgtccacatacgggtcttaagggacatgtataatgaatgtccaagaagataagtagataacaccataacattcgttgatagaaaagttgtttcctcccgtgtaaggcgccttgttcggttaatcctgttacttatggattggacgggattggaaaaaattgtgaag

SEQ ID NO: 74222 - DNA, 801 bp, Zea Mays
ctgggattgatttggtccttagcatttctgactcatttcgtgaagaataatacgaacgattgatcgcaattgtgaaattccccatgaaggccctttctgcgatcttatgtggagtgaccctgaggagatagagacatgggctgttagtccccgtggagcaggttggctgtttggatcgcgagtaacagcagagttcaactttgttaatggtatcgagctagtttgccgggctcaccagctggtccaggaaggcttaaagtacatgttccaggagaagggccttgtaactgtgtggtctgcacccaattattgctacagatgtggcaatgtagcttctatattaagcttcgatgagaagatggaaagagatgtcaagttcttcacagagacagaggaaaacaaccagatgcgaggcccaaggactgcagtcccatatttcctctgacttcaattgtacattttagaagtcaacatttaaatctgatactttcttgtacgcagctcctggcatatattcatttcgttggatgtcatcaggtatatgttctgtaaactaagcttgattctgcacgatggacactgttactgagttactcgcagttctttaccatgtgaggcgcatctaacatgtgacatgtccacatacgggtcttaagggacatgtataatgaatgtccaagaagataagtagataacaccataacattcgttgatagaaaagttgtttcctcccgtgtaaggcgccttgttcggttaatcctgttacttatggattggacgggattggaaaaaattgtgaag

SEQ ID NO: 74223 - DNA, 1024 bp, Zea Mays
tgttggtgtgcgattgaggagcgagtctgtgagtgtacactaggaaaataacactagaacaatgcagtcgacacctgccacctggtaggatcggcgtgacgaaaccattttggtttcgccaaaaccagttcctggattagagcaaaacaaagccgagaaggagcaaatgagcgaggagagaccgccgaaacagcggcatacccatcctcctacttggcagatgctctccacctctagatatggtttacaacttacaacaaaatcggcaaatcgcagaggagagggggaaagaaaaagagcagaagacgacggtgacaaaaagaaaaatgtcagtaactgactaaactggcgctacctccgcccccgatccgacgccggcggcgaggcagtccggccgacacgcggcgagggccgcgtcccctcccgccccattgcgcgcccgcgggcgccgccctgcaggaactccccggcctcggcgtccgagaacgacgaggacccacccggcgcgagccgccgccggggccgccgccgccgcggcctccacgtgccgcagcaccggcgcgcgacgcggagcggggcgcgcgccacgcagcagagcacggtcacggggaggcaggcgcacagcacgcagcacgccgccgcgcactccgccaccgccgcgccgctcccggtggcgtcctcggggggcgctgccggggacacgccgggcccacgcgggccgcctccgccgcctccctgccgcttcttcgtcttggcatcgctgcgctcctttttgctgcgcgccgccgccgccggctcggagtccatgccctcgtccacttgcgttgcgttgcgttgcgttcctaccttgccttgctttcgcttccggtgcgggcgattcgcgtaggacaggcgtgggggtggtcgtggcctcgtggctcctggcgtgggaaggaggtagggggaggccggtgccgggaggggactagggacgctgctgtcttgtgctgtctgatgtctgttgcttttcgcatattttttttac

SEQ ID NO: 74224 - DNA, 1671 bp, Zea Mays
ctcgatggggacgacggacgagacggtcatacttcaactgccgcgtccccgaatattggctattttccaaccggcggcgcagccggtgacgcgcaggcgggcgggttcatctgacccttcgtcgactcgtggcagatgtgactttctgaggccggtgtgcctggacggtttcgtccatggcgtgcgcagtgcgcactcgcatcgcatggtattaatagtcattgcaagccaagaggagactagaaaagagaaggtggaagaacagcaggagagtcggaggaagcaagcttgcccatacgctggtacttatgtgctgatactactgcagccgcgctgcgagagaagaggagtgggagcacgtggagccaaaggggcgattctttgcttggccttcatttctcgcctcttccgcatctcgagttgtcgtgattaacaagacagcaagacctcggcggcggcaaacagtcgagcacctgcgagcgtctctgccaccgggactcaagaggcaatgccagcaccagccccaccaattcgtctgggacctccgactccctatatatcctctcatggatccaaagttgcacgcctacacatgtatgactggattgtgctaattcttttagctgtattggatggagttcttaatataatagaacccttccatcgcttcgtcggatcagaaatgatgacagacctcagataccccatgaagggcaatacagtgccattttgggctgtgccgataattggtatcattgggcctatggttatcataacagtgatatactttaagaagagaaatgtatatgatctgcatcatgccatactaggtctcctattttcagtacttattactgctgttttaactgatgcgataaaggatggtgttgggcgaccacgtcctgatttcttctggcgttgcttccctgatggaaaacctgagtataacaactttactacaggcgccatatgccatggccaggcgagtgttattaaagaaggtcataaaagctttccaagtggtcatacttcatccttagtggcagtttctcgagttgatgactattggcatcattggcaagacgtatgtactggcggattacttgggttcacggttgcttccatttgctacctgcagttttttccactaccatctgatgaaaatggactgtggccgcacgcatatttccgacacattcttgagccagagggtgacagccaagcgcaacccacgtacatgagccgtcgcagctcggttcagaacggttcctttcagtacagccctgacgcagtggaaatgaggagcacgagccaagcaatggattccatggaagctggccagagagcccaataatgatggaattaataggaacatcaatttagccacggaccgttgtaatgtaatataacgtcgttgtagcgcttagtacagcaagatcttgttcagatcccttattgtgtagtataacagttcctgaatgatggtcacgtttctgctggtcctccgaagactgaagcgcgactgattaccgcgttggcgtgatccggctggctgccatgtgactcaggcgatgaacaatgcaaatttaaaactcgttcggtgcgatggggttcgttgggactggggccattgccgcagaaccatgtccctctccctccacacacacacag

SEQ ID NO: 74225 - DNA, 1773 bp, Zea Mays
ctcgatggggacgacggacgagacggtcatacttcaactgccgcgtccccgaatattggctattttccaaccggcggcgcagccggtgacgcgcaggcgggcgggttcatctgacccttcgtcgactcgtggcagatgtgactttctgaggccggtgtgcctggacggtttcgtccatggcgtgcgcagtgcgcactcgcatcgcatggtattaatagtcattgcaagccaagaggagactagaaaagagaaggtggaagaacagcaggagagtcggaggaagcaagcttgcccatacgctggtacttatgtgctgatactactgcagccgcgctgcgagagaagaggagtgggagcacgtggagccaaaggggcgattctttgcttggccttcatttctcgcctcttccgcatctcgagttgtcgtgattaacaagacagcaagacctcggcggcggcaaacagtcgagcacctgcgagcgtctctgccaccgggactcaagaggcaatgccagcaccagccccaccaattcgtctgggacctccgactccctatatatcctctcatggatccaaagttgcacgcctacacatgtatgactggattgtgctaattcttttagctgtattggatggagttcttaatataatagaacccttccatcgcttcgtcggatcagaaatgatgacagacctcagataccccatgaagggcaatacagtgccattttgggctgtgccgataattggtatcattgggcctatggttatcataacagtgatatactttaagaagagaaatgtatatgatctgcatcatgccatactagtacttattactgctgttttaactgatgcgataaaggatggtgttgggcgaccacgtcctgatttcttctggcgttgcttccctgatggaaaacctgagtataacaactttactacaggcgccatatgccatggccaggcgagtgttattaaagaaggtcataaaagctttccaagtggtcatacttcatggtcttttgctggccttgggttcctttcatggtatttggctggtaaaatcaaagtattcgatcgtagaggacatgttgcaaaagtctgcattgtcctttcccctctgcttcttgcagccttagtggcagtttctcgagttgatgactattggcatcattggcaagacgtatgtactggcggattacttgggttcacggttgcttccatttgctacctgcagttttttccactaccatctgatgaaaatggactgtggccgcacgcatatttccgacacattcttgagccagagggtgacagccaagcgcaacccacgtacatgagccgtcgcagctcggttcagaacggttcctttcagtacagccctgacgcagtggaaatgaggagcacgagccaagcaatggattccatggaagctggccagagagcccaataatgatggaattaataggaacatcaatttagccacggaccgttgtaatgtaatataacgtcgttgtagcgcttagtacagcaagatcttgttcagatcccttattgtgtagtataacagttcctgaatgatggtcacgtttctgctggtcctccgaagactgaagcgcgactgattaccgcgttggcgtgatccggctggctgccatgtgactcaggcgatgaacaatgcaaatttaaaactcgttcggtgcgatggggttcgttgggactggggccattgccgcagaaccatgtccctctccctccacacacacacag

SEQ ID NO: 74226 - DNA, 3600 bp, Zea Mays
atggctctcagtctcctccacctagccttattaacaacaatggcctcatcactgctcacgccggcaccgcccgcgctcgtctcggcatccaacgccacggccaccgacctctcggccctcctcgcgttcaagcacaggctttccgaccctggcgacgtcctccgcggcaactggacgcccggcacgccctactgcggctgggtcggcgtctcctgcggccaccgccacaggcagcgcgtcacggctctggcgctcgctccccggcgtgcggctcgccggtggcctggctcccgagctcggcaacctgtctttcctctccagccttaacctcagcggcaccgagctcacggggaacatcccagctagtctcgggaagctgccacgcctactctccctcgatctctccaacaattacctgtcgggcgccgtcccagccacgctcggcaacctcaccgcgcttgggatcctcagcctcgactccaacaacctcaccggtgaagtcccacacgagctgtccaatctgcggagcgttggcttccttaccctgagtaggaatgacttgagcgggccgctggcccagggcctgttcaacgggacgtcgtcgactcagctgagcttcctcagcctggcacacaacagcctgaccggggacatccctagcgccattgcttccttgcaaaacctccaggtcctcgagctgtcggggaaccagctctcggggcagatcccgtcctcactgttcaacatgtccagcctgctaggcctgtacctctcccggaaccacctctcggggccggtgccagacaaccagagctttaacctccctttgctggaacgcgtgtacctcagcaaaaacgagctcaccggcacggtgccgccaggctttgggacgtgcaagtacctgcagcagctcgttctgccatacaaccgcttcaccggcgggataccgccgtggctgtcaaccctgccggagctgacgtggatctccctaggtggcaacgacctctccggcgagatccccgccgtcctgagcaacattaccggcctcaccgtactagacttcaccacgagcaggctgcatggggagatcccgccggagctgggccgcttggcgcagctgcagtggctgaacctcgaaatgaacaacctgacaggtaccatcccggcctccatcaggaacttgtctatgctctccatccttgacgtatccttcaactcactgaccggacctgtcccgcggaaactgttcggggaatcccttaccgagctctacatcgacgagaacaagctcagcggagacgtcggtttcatggccgacctgtcaggctgcaggagcctcaaatacatcgtcatgaacagcaattccttcgccggtagcttcccaagctctacgctggccaacctctcctccctccagatcttccgggcgtttgagaaccaaataaccgggcacatcccaaacatgccgagcagcgtctcgttcgttgatctccgcgacaaccgattaaacggggaaatcccgcaatccatcacggaactgaggaacctcagaggccttgacctgtctagcaacaggttgtctggaactatccccgcacacatcgggaaactgacagagctgtttggcttgggcctggccaacaacgagctccatggccccataccagacagcatcgggaacctgagcaacctacaggtgttagagctatcaaacaaccacctcacctcagtgatacccccggggctatggggtctcgagaacattgtgggtcttgacctgtctcgcaacgccctgcgtggctcgttcccgccggaaggtactgaaattctgaaggcgataacgtttatggacctttcttccaaccaactccacggcaaaataccaccttcgctgggagcgctcagtacactgacctacctgaatctatcgaagaacctgctccaggatcgtgtcccaagtgcacttggcaacaagctaagtagcatgaaaacgttggatctctcgtacaactctctgtctggcacgattccagagtccctcgccaatctcagctacctcacaagcttgaatctctctttcaatagactgcatggacgagtcccagagggcggcgtgttctcaaacatcacgctgcagtcactggaagggaacgctgcactgtgtggcctgccacgccttgggctcccacgctgcccaaccgatgagttcgacgacgaccaccggcaccgatctggtgtcctcaaaatcgtacttccgagtgctgcagcagccattgtagtaggagcttgcctgttcatcctggtcagagccagagctcacgtcaacaagagggcaaagaagctgccggtcgccgctagcgaggaggcaaacaaccgcaagacggtctcctacttggagcttgcgcgcgccacaaacggtttcgacgacggtaacctgctaggagccggaagctttggcaaggtgttcagaggcgtgctggacgacgggcagaccgtcgcggtaaaggtcctggacatggagctggagagggccaccgtgagcttcgatgccgagtgccgtgcgctccgtatggctcggcaccggaacctggtcaggatcctcaccgcttgctccaacctggacttcagggcgctggtgctcccgtacatgccgaacgggagcctagacgagtggctgctctgtagggaccgccgcgggctgtccttgtcccgaagggtgagcatcatgtcggacgtggctctggcggtggcttaccttcaccacgagcacttcgaggtggtcctgcactgcgacctcaagccgagcaacgtgctgcttgatcaggatatgacggcttgtgtggccgacttcggcattgcaaggctgcttcccggcgatgacacttccgtggtttcgaggaacatgcagggaacgattggttacatggcaccagagtacgcttcaaccggtaaagcgtcaaggaagagcgacgttttcagctacggggtaatgcttctcgaagtcgtcactgggaagaagcccaccgacgccatgttcagcgaggagctaagcctgagagagtgggtcaggcaggctattccatcaggactcgctcatgtcgtggaccatagcatccttcttgtagacgaggaggcaacaagcagtggggatgtcctgcgtgccgactggagctgcctagcgcagatgctgaacttgggtttacagtgctcgtgtgacttgcctgaggatagggtgtcgatgaaggatgtggctgacgagctcgcacggatcaagaagagtttactatgctccagctgattttggatgcaactgaacgcagcaaagtatgcatggcgattggagcaggcgacttctaaataataaagagaacccgtagcttctgcgtggtgaccaagcacgtttgtgtctgttcgtctgtgtcgatatggctgttgttggctgggctggaggctagtagagcactagagcctggaccctggagccaatgcattgtttgtttgcttgctttggttgggccacgtcaatacgtcatcggtcatcctcatcctctccgctccactcgtctgatgctcctgctgcagttgccgtttcttgcccct

SEQ ID NO: 74227 - DNA, 3845 bp, Zea Mays
caagaattagtgctttgaagtcaagattggaacaagtgctaattatcttcaccagattccgatgccgagccattcgaagtgcactgcattctttgtcaaaactcttggaagctgattcgtgctgcatgtttagtaccttcactgctatcaaagatccattatctagctcgcctttgaagaccttaccaaagcttcctttccctagcaagttgtcatcagtgaagttgctggttgcacgaacaagttcatagtatgagatcagctgatagttctgcaagcctgtgtctgagggtactagtatctttcttcggttgttcaccttcattcttaccaacatatacaaggacacagataaagcaaaaaatgccaggagcgaaggcgaggaaggccacacagcgcattgttccccattaatgatttgagtgtgatatttgagaacactcctccttctggtatctgtccatccaatctgttaaaagaaaggttcaagttggcaagattgagatatatcatcatgtggagttcaccaaaggagactgggatgtcacctgacagcttgtttcctgataaatccatcatggtaattgctgtcaattttccaacatcagcaggcaggaacccacttaaagagttctgtgacaagtcaagctcaataagtttctgaagatcccacagacttgttggtatggttgaagacaatgagttttgggataacgtcataatttgcagctggcttaggctactgatattgcttggaatgggaccggttagtttattgttgtcaagacgtaaacgaactaggtttgttaatccactgatttcttctgggatggtgccagacaagctgttgttggagaggtccaattcttggagactgttcatgtcagtgattggtgtagggatcttcccactcaggttgtttccactaagagacagtactgataagctggtaaggttagcaaatgtaccagggatgcttccattgatgttgttgttacctgcttgcaaaatttctaggagcgtgctatggtttccaattgaagttggtagcatccctgtgaactcattatttgaaatgacaatggtagtcaggcttctgcaattggataatgcagctaggaaatctagattcccagagagacggttcccatcaacaaagatgcgaccgagattcagcaagttgctaaatgacattggcactgatcctgtcaatctgcttctagatacgtctatttgggtaaggtccgatagattgcctatggattctggaatggcaccggttagttggttgtttgcaagacctagaaactggaggtttgtcaactgtcccagttctggtggaatccccccttgtagattgttttcactgaggtccaacacaacaagcatggtattgttgctcagctcaactgggatcattccagtcaggttattcattgacaaggctattgcagtaaggtttggaagtgttgccagccatgacggcacagggccagtgaaactgttcgcagcaacgtacagtgagtcaaggttcttgcatgcagagagtcctacagggattggcccgctgaaatggttttcttggagagacagcatttgcagcagagggaggtgaaagctcccatttccaggaatgggacctgagagattgttccgtccgacatacagtgcttggagctgcgaactattaaacaaagaaggcggcatggagcccgagaggaggtttttttctatggtgagcacctccagctttagcaatgagctgacgctatcaggaattgctcccgtcaagctattcgagccaagatatatttcactcagatcgggtgtgctgttgaacaggctctgtgggatcggtccgcttagatcattgtaagcaagatcgagaacctcgagcctagtgatgttgccaaggctgggagggatggtacctgacagtctgttgtgtgatagatcaagggtctgaagccagggcagactgccgagctcgtctggcaggggacccatgacgctggtgttgctgaggacaagggtcgagaggaaagagaggttaccgagctgtggcgtgatgctgccctggagcggcacgtcgctgaactcgaggccagtgacgcgttgcctgctgtcacaggagacccccgcccacgagcagaatgatgcagtagcagtccagttgctggcaaggatgccaagggggtccttgagcattgctttgaaggcgagcagcgcagcaaggtctgtggcactggatggtggtggggtgagtgcggtggcgctgcgtgctgcggcgacggcgagcaagatgagtaccatgcggacgcggacgaagaaggccattttggtgagagtctatgagtatgattgacagaatatggatgtggtgacgacttgactgctgctcttataagcagctttggacgtccagttggctcaagtggttggaaacgtagagcgatctgaagccgatttgtgttgaatatggtcagcaagctgtttccttttcttactcacagagtcacaggctgctgcttcttggaaataacgacttcgttcttcgaaggaactgctttcagacgtaccaactggcgagcaacttgtgctaaattaagctctttattctacccgcacattggatttgtgtggatttggtacaaagaagtccatgtatgggctttagtttggagggtttttttttttcatttagaaactacctgtgtggctcctctcctttgactactttcagcgctaaaaaatggatggaaaaaatcttctgcaaagcatattgatacccatctcctccgtaatgaagagaatatataatagaaactacctgtgagaacgaaatgaatttgtactgtgtattccattttttagataatggaaagtattaaaacgatccggcttttcccttttgcgaggttagggcgagtagtttacatcactcggaaaaacactcccaacagacaggaaggacacaaccttcagccaaaaccttaaagacaaactaattgctttaccttaaagagaaactaatttaaagcaattatattcgaaaaacgccaaccaaaatgagcaaagatatacatggccaccgtctctaacgagtttattggaaccaagatatcacgaacacagggcttcttaaaattggtatcccgaacacaggtattggaaatttagtattataatccattcgaattcagaattttgctatcggggtgtgatttagtcgatccgcggtcgctgttacggtagtccttctcactgtcccgtagcttagaacggatctttgctcactgcctcctctcctcgacggcgctcgtcctctcctcgacgacgcaggagctctccggctcctctcctcgacgacgcaggagctctccggcacgtcgctcctctccctgctcggcccgaccaaggtacagagctctcctccagagcggcccctttctgtttcctggctgccagctcgcgctccctgctctgttctagaatccagtggcgcgcagaagagactccgcgcagaaggtctgcgccggcgcgctgaaggtctcagcggtgttgtaccagtacccgtgctgaaggtctcagcggcccctttcgtttagccctgacggcagttccagttagctcatttcagtgtcttgtttgcttagcacaggtaccaatttcagttagctgtgagaaatgagcctgaaatgagcaagctgcattggcatgccagttcaaacctgttgctggagcattttagaatgacatttgagaatttaaactaacttcacacatattgctgagtgaaagctaatttaacttcacacatatagccgtacagagctctctcttcg

SEQ ID NO: 74228 - DNA, 1464 bp, Zea Mays
cgactatgtaacaaataacattgctgaggtgttcaataactggataaaggactacaaggacctccctgtttgtgacctggctgacaaaattaggataatgatcatgcaactattctacaagaggaggcggataggaaggaggttggagggaaagattttaccttctatcatagcacaactcaatgcaagaactagaggacttggacacttggaggtcataaaaggcgatgactatgttgcagaggtgagagacaatggtgattgtttttctagatatgtggtgaaggctcatcttagagaatgttcatgtaaggaatggcaacatacggggaagccctgccaccatgcattatgtctaattaccgcacagcaatatagaaatgtaatgatggaggagtttgtcgacgattactactcagttgacatgtttaggaaagcttatgagagattggtggagacaattgaaagcaaattattttggccaaaggtggattttgcaaaggaggttggtgctccactaggcaagagaggcgtgggacgtcaaaggaaaaataggttcaagagttgtctagaaggtgggagtagtaagaaaaaacctgccaacgaaagtgagaaagctaagaagattattcgaggcaaattcaagtgccctaattgtggggagttagggcataggaagacaagctacaaatgcccactaaatggaacgaagaaaaggaaaaggaaaccaagaaagaactcaacaaagaaatggtttcctaaggagccagctgaagcttcttcatcacagccagaactaggggaatctggtcaacaccaacttgtctccactaatgttccagaagaaatagttggtactaccccacagaggagagtgaggtgtgctgtcaaaaagaagattactccgaagaagaagatctgcttctgagtagctgcttaagtacgacagttgtgtctgtattttaagtatgaattatggcagttgtgtttgtatttgaagtatgaattatggcagttgtttctggcagctgtcaacaatagaattatggcagttgtgtctgtattttaagtatgaattatggcagttgtgtctgtattttaagtatgaattatggcagttgtgtttgtatttgaagtatgaattatggcagttgtgtttgtatttggagtatgaattatggcagttgttgctgtttctggcagctccaacaacgccttcagttgcttatctgcagttttcagaaactggccagttccatgtcacatattcaggctcattcggttctgctggttcactggttatcattcggttctgctggttcactggttatcatcgggcaacagtttggagatcaggctagacctatgtgtgataaaaaaaatgacaatatatcatgggaacaattcaggtggaccatgttctctgagaaatattcaggtggaagaagaacaggaatcagctaa

SEQ ID NO: 74229 - DNA, 1666 bp, Zea Mays
tccattcgacttccgctagcgtcaagacctgcgcctcggcggttgccacgccggtgaacaagccatacccatccgtcacggccgcagctgatgtcaggcccaggcgaggaatcatttcccagaaccgtttccttttcctacggattttaactaaaatcagtgactctgatgtcgttgttcaggggtgcacctccagcagcagcaggaggaatttcgtttttgtggactccaaagcacatgactgggctattattaccaagtataggaacaacagatatatgcacacttgtgattggattggatgataccccaggtatcgaaagaggactcgaatctccatcaacatggaagtctccttggtatatcgatatgcgcaagcactttcaggtaaggtccttcccaaaaaaaaccttatcaattgagccagtccatatgataggtttgagattgaacttttcaaggtatgtaaatctatacttgctaccttcttgacattgccaagcattacttaactctgaaacaaattatgttcccatttctgaataccttccctttctattccactgagcttatctgaagcctttggtccttgtgatctctccatctcttggacaacaaagtgcacgagggttgtcttcctatcagctccacacatatctgacagtttcagcagtgcgtcaagtctgaaaacatttgtccctcctcttatagttccagcattcattctagcttacaaggctgcaaattgtgttatctaagcatctgtgtacacaatatcttttgatgacccagaagtgtatcctattccatgactaactttgggttacaactttcttcatttagctaagtctggtgccacatcgacgaaatttgtttattcgctgatagcctttactatatgactctatcgtttacttttatctggagttatttctatacttgtgctagatgaaggttaacatatgagcgctatagcgcccgatagggcgctctccattatacgaagggggacggacgacggcagggcacgctgcgtcgggtctgggtacgggaaggtgtggcggaccaggcgctgtcgctgaaggctcgccaccaccggcccatagtcaccttcgtcgaggccagtggctccaccgtgcttccctctgatgccgcctccctccagatccgccgcttccctgcccctgctcgtcgattcggctctactacccaccacgtcgtccctgtgtcagtctaggtttacccctcctgctcctgtgtcagtctcagttcctagctctgcatctcaaggcagcaacattttcaagaccaggattgaagatgcaaacaacgttgatgcagatgttggcgctgcaacagcccaagcgaacaaaaagaaatcttcaacatcaagaactaaacatacggtcatcgctagatcatgatgcttcattctaagaggtgctcgcgagcacctaggcttctccgcttctgatcatggttgtggaccttcctgtatgtcaatatccattggtcgttcccgcaggcagtagccgccgagcccactggcgtgtatatagagaccatctgctgctaagaccttctggtcgtgaactgtgttgtttaattacttgtgtaaccagcatcttttgataaacatgacataatatatttcgtaaggtgtccg

SEQ ID NO: 74230 - DNA, 2325 bp, Zea Mays
ctccatttcgtcgaatcccctcctctcttcttttataatggcaattgtctcctctctaccacattctccccattccgcggttccgccctctcgcgtgcctccaggtccctcctctgcgtaactgggcggccgctgatccgccgccaccgctctgtgccctgcgtctggtgttccggtgacaagcgtccacctgcaagatgttggaataccaaaacgtagttggggggagactgaagctgaagggtaaagcgctggacgtaaaggatggtggggtgaagaaaaagaagaagaagtaccagcgtgaggagtcgtctcagattgcgcacgatgagctccacaaaggggggagatctgaattaccaattgatcccaacaatgagcggattgaatctgacaagactggagatgaagggaacccacatcctgactatggccatctcacaccagcagagcgacgctacatggaacagaagcagaagatcgacatgcagaagatggccaaagtcgccaacaagtcgcatagagaccgcatccaagacttcaatcagtatctcgcaaacctaagcgagcactacgacatccccaaagttggccctggctaacatagccaaactggctgtgttacgcacaacaattgtgtgctgggtctatccatttatgttagcatgttacgtatcgtttaaaacgatttgttgccaccagaagttgatatttaatttcaaaagcatgttccaactattctgatcctgtgtttaagttgtttgttgccccttttagttgcaatcgttttattcaaaatgtgatcaaaatttgatatttccagggaactaattttctttcaatatagcggcagagcctaccaataaattatgcacaaaattttccacacaagtcagatcaacatgaccttaaatttgggaaatgggaaataggggttgggacagagaaatgtgaatatgtgatcccatgtttggataattgaaatgaagatagggatagaaaaataaagactacccatcccataccccttccttttataaagaaaattccattggtgatgcagaagaagaaaaataagcatgccaatgttaagagtaatcatgatacggcagatgctgtggtggaatttctgtcagacagtaaatatgatgctccactgaagctaaagaagaagagcaaaaagaagaaaatggaaagtagtggtcctgcagtcgtatatgaaagttcagttgttactgaagatgctggagcatctaagctgaagaaaaagaaaaggaaggtaaagggagggaaggtctctgctgggattactgatgcagaagaaattctgcatgaaaatcaaattgaagaaactagtgctgatgtcaaccaacttgcagcactgagtgaagatgtggataatgaagagcctcagaaattaaagaggggaaagaaaatggaagttaaaaaatctgggaaggccaagaagaaggacaagcatgcatcgcgtaaagataataacaacttggagagacatgttgatgttagtactgcaaacgctgatgagaatatgagattccattagttgatgaagactgctctagaggactgaaaaaatggatcttggagtgcaaacacaagagacctggcttgaaagccttgcaagaagcaatagatgaatttattgttgctcatgaggaacaacaagagaaggagaagagagagaggcccgtgcagcagaagatggatgggcagttgttcatcacaaggggaggaaaaagaccacagatgctgaaactggaatagctgttggctctgtatctcttgctgcaatgcaacataaaatggctaaaatgaaacccaaggaagttgatatgaacttctacagatttcagagaagagaagcccacctcagtggtatgtcatcattgcttaacgagacttattatttgttattccactccctgattagctacacatgatagaacccagactatatattgcacattatgaagtgcttggacttggtagttgtaatgcaatgcagttcaccagccacgataaaatgtaatctgttcacttgtttgccatttgaatacgagtaacctgtacctgcagcttgatattttctgttctggttttgggggtagtatttggttctattagaagtttactgttttgcatcttcagtttggttggagtcacaagtccacagccattgtactatcttgattggacttcaaatgaaccatatgtgtgggaagtttctctttctcttgtgtgtgtgtgtgtgatacattgaggttctagtatatatatatagacaggtacacctgcaggcttgtg

SEQ ID NO: 74231 - DNA, 2316 bp, Zea Mays
tttcgtcgaatcccctcctctcttcttttataatggcaattgtctcctctctaccacattctccccattccgcggttccgccctctcgcgtgcctccaggtccctcctctgcgtaactgggcggccgctgatccgccgccaccgctctgtgccctgcgtctggtgttccggtgacaagcgtccacctgatgttggaataccaaaacgtagttggggggagactgaagctgaagggtaaagcgctggacgtaaaggatggtggggtgaagaaaaagaagaagaagtaccagcgtgaggagtcgtctcagattgcgcacgatgagctccacaaaggggggagatctgaattaccaattgatcccaacaatgagcggattgaatctgacaagactggagatgaagggaacccacatcctgactatggccatctcacaccagcagagcgacgctacatggaacagaagcagaagatcgacatgcagaagatggccaaagtcgccaacaagtcgcatagagaccgcatccaagacttcaatcagtatctcgcaaacctaagcgagcactacgacatccccaaagttggccctggctaacatagccaaactggctgtgttacgcacaacaattgtgtgctgggtctatccatttatgttagcatgttacgtatcgtttaaaacgatttgttgccaccagaagttgatatttaatttcaaaagcatgttccaactattctgatcctgtgtttaagttgtttgttgccccttttagttgcaatcgttttattcaaaatgtgatcaaaatttgatatttccagggaactaattttctttcaatatagcggcagagcctaccaataaattatgcacaaaattttccacacaagtcagatcaacatgaccttaaatttgggaaatgggaaataggggttgggacagagaaatgtgaatatgtgatcccatgtttggataattgaaatgaagatagggatagaaaaataaagactacccatcccataccccttccttttataaagaaaattccattggtgatgcagaagaagaaaaataagcatgccaatgttaagagtaatcatgatacggcagatgctgtggtggaatttctgtcagacagtaaatatgatgctccactgaagctaaagaagaagagcaaaaagaagaaaatggaaagtagtggtcctgcagtcgtatatgaaagttcagttgttactgaagatgctggagcatctaagctgaagaaaaagaaaaggaaggtaaagggagggaaggtctctgctgggattactgatgcagaagaaattctgcatgaaaatcaaattgaagaaactagtgctgatgtcaaccaacttgcagcactgagtgaagatgtggataatgaagagcctcagaaattaaagaggggaaagaaaatggaagttaaaaaatctgggaaggccaagaagaaggacaagcatgcatcgcgtaaagataataacaacttggagagacatgttgatgttagtactgcaaacgctgatgagaatatgagattccattagttgatgaagactgctctagaggactgaaaaaatggatcttggagtgcaaacacaagagacctggcttgaaagccttgcaagaagcaatagatgaatttattgttgctcatgaggaacaacaagagaaggagaagagagagaggcccgtgcagcagaagatggatgggcagttgttcatcacaaggggaggaaaaagaccacagatgctgaaactggaatagctgttggctctgtatctcttgctgcaatgcaacataaaatggctaaaatgaaacccaaggaagttgatatgaacttctacagatttcagagaagagaagcccacctcagtggtatgtcatcattgcttaacgagacttattatttgttattccactccctgattagctacacatgatagaacccagactatatattgcacattatgaagtgcttggacttggtagttgtaatgcaatgcagttcaccagccacgataaaatgtaatctgttcacttgtttgccatttgaatacgagtaacctgtacctgcagcttgatattttctgttctggttttgggggtagtatttggttctattagaagtttactgttttgcatcttcagtttggttggagtcacaagtccacagccattgtactatcttgattggacttcaaatgaaccatatgtgtgggaagtttctctttctcttgtgtgtgtgtgtgtgatacattgaggttctagtatatatatatagacaggtacacctgcaggcttgtg

SEQ ID NO: 74232 - DNA, 2299 bp, Zea Mays
tttcgtcgaatcccctcctctcttcttttataatggcaattgtctcctctctaccacattctccccattccgcggttccgccctctcgcgtgcctccaggtccctcctctgcgtaactgggcggccgctgatccgccgccaccgctctgtgccctgcgtctggtgttccggtgacaagcgtccacctgcaagatgttggaataccaaaacgtagttggggggagactgaagctgaagggtaaagcgctggacgtaaaggatggtggggtgaagaaaaagaagaagaagtaccagcgtgaggagtcgtctcagattgcgcacgatgagctccacaaaggggggagatctgaattaccaattgatcccaacaatgagcggattgaatctgacaagactggagatgaagggaacccacatcctgactatggccatctcacaccagcagagcgacgctacatggaacagaagcagaagatcgacatgcagaagatggccaaagtcgccaacaagtcgcatagagaccgcatccaagacttcaatcagtatctcgcaaacctaagcgagcactacgacatccccaaagttggccctggctaacatagccaaactggctgtgttacgcacaacaattgtgtgctgggtctatccatttatgttagcatgttacgtatcgtttaaaacgatttgttgccaccagaagttgatatttaatttcaaaagcatgttccaactattctgatcctgtgtttaagttgtttgttgccccttttagttgcaatcgttttattcaaaatgtgatcaaaatttgatatttccagggaactaattttctttcaatatagcggcagagcctaccaataaattatgcacaaaattttccacacaagtcagatcaacatgaccttaaatttgggaaatgggaaataggggttgggacagagaaatgtgaatatgtgatcccatgtttggataattgaaatgaagatagggatagaaaaataaagactacccatcccataccccttccttttataaagaaaattccattggtgatgcagaagaagaaaaataagcatgccaatgttaagagtaatcatgatacggcagatgctgtggtggaatttctgtcagacagtaaatatgatgctccactgaagctaaagaagaagagcaaaaagaagaaaatggaaagtagtggtcctgcagtcgtatatgaaagttcagttgttactgaagatgctggagcatctaagctgaagaaaaagaaaaggaaggtaaagggagggaaggtctctgctgggattactgatgcagaagaaattctgcatgaaaatcaaattgaagaaactagtgcactgagtgaagatgtggataatgaagagcctcagaaattaaagaggggaaagaaaatggaagttaaaaaatctgggaaggccaagaagaaggacaagcatgcatcgcgtaaagataataacaacttggagagacatgttgatgttagtactgcaaacgctgatgagaatatgagattccattagttgatgaagactgctctagaggactgaaaaaatggatcttggagtgcaaacacaagagacctggcttgaaagccttgcaagaagcaatagatgaatttattgttgctcatgaggaacaacaagagaaggagaagagagagaggcccgtgcagcagaagatggatgggcagttgttcatcacaaggggaggaaaaagaccacagatgctgaaactggaatagctgttggctctgtatctcttgctgcaatgcaacataaaatggctaaaatgaaacccaaggaagttgatatgaacttctacagatttcagagaagagaagcccacctcagtggtatgtcatcattgcttaacgagacttattatttgttattccactccctgattagctacacatgatagaacccagactatatattgcacattatgaagtgcttggacttggtagttgtaatgcaatgcagttcaccagccacgataaaatgtaatctgttcacttgtttgccatttgaatacgagtaacctgtacctgcagcttgatattttctgttctggttttgggggtagtatttggttctattagaagtttactgttttgcatcttcagtttggttggagtcacaagtccacagccattgtactatcttgattggacttcaaatgaaccatatgtgtgggaagtttctctttctcttgtgtgtgtgtgtgtgatacattgaggttctagtatatatatatagacaggtacacctgcaggcttgtg

SEQ ID NO: 74233 - DNA, 1303 bp, Zea Mays
gtgaatatgtgatcccatgtttggataattgaaatgaagatagggatagaaaaataaagactacccatcccataccccttccttttataaagaaaattccattggtgatgcagaagaagaaaaataagcatgccaatgttaagagtaatcatgatacggcagatgctgtggtggaatttctgtcagacagtaaatatgatgctccactgaagctaaagaagaagagcaaaaagaagaaaatggaaagtagtggtcctgcagtcgtatatgaaagttcagttgttactgaagatgctggagcatctaagctgaagaaaaagaaaaggaaggtaaagggagggaaggtctctgctgggattactgatgcagaagaaattctgcatgaaaatcaaattgaagaaactagtgctgatgtcaaccaacttgcagcactgagtgaagatgtggataatgaagagcctcagaaattaaagaggggaaagaaaatggaagttaaaaaatctgggaaggccaagaagaaggacaagcatgcatcgcgtaaagataataacaacttggagagacatgttgataatggatcttggagtgcaaacacaagagacctggcttgaaagccttgcaagaagcaatagatgaatttattgttgctcatgaggaacaacaagagaaggagaagagagagaggcccgtgcagcagaagatggatgggcagttgttcatcacaaggggaggaaaaagaccacagatgctgaaactggaatagctgttggctctgtatctcttgctgcaatgcaacataaaatggctaaaatgaaacccaaggaagttgatatgaacttctacagatttcagagaagagaagcccacctcagtggtatgtcatcattgcttaacgagacttattatttgttattccactccctgattagctacacatgatagaacccagactatatattgcacattatgaagtgcttggacttggtagttgtaatgcaatgcagttcaccagccacgataaaatgtaatctgttcacttgtttgccatttgaatacgagtaacctgtacctgcagcttgatattttctgttctggttttgggggtagtatttggttctattagaagtttactgttttgcatcttcagtttggttggagtcacaagtccacagccattgtactatcttgattggacttcaaatgaaccatatgtgtgggaagtttctctttctcttgtgtgtgtgtgtgtgatacattgaggttctagtatatatatatagacaggtacacctgcaggcttgtg

SEQ ID NO: 74234 - DNA, 1376 bp, Zea Mays
ccatgtttggataattgaaatgaagatagggatagaaaaataaagactacccatcccataccccttccttttataaagaaaattccattggtgatgcagaagaagaaaaataagcatgccaatgttaagagtaatcatgatacggcagatgctgtggtggaatttctgtcagacagtaaatatgatgctccactgaagctaaagaagaagagcaaaaagaagaaaatggaaagtagtggtcctgcagtcgtatatgaaagttcagttgttactgaagatgctggagcatctaagctgaagaaaaagaaaaggaaggtaaagggagggaaggtctctgctgggattactgatgcagaagaaattctgcatgaaaatcaaattgaagaaactagtgctaatatttatgcagctgatgtcaaccaacttgcagcactgagtgaagatgtggataatgaagagcctcagaaattaaagaggggaaagaaaatggaagttaaaaaatctgggaaggccaagaagaaggacaagcatgcatcgcgtaaagataataacaacttggagagacatgttgatgttagtactgcaaacgctgatgagaatatgagattccattagttgatgaagactgctctagaggactgaaaaaatggatcttggagtgcaaacacaagagacctggcttgaaagccttgcaagaagcaatagatgaatttattgttgctcatgaggaacaacaagagaaggagaagagagagaggcccgtgcagcagaagatggatgggcagttgttcatcacaaggggaggaaaaagaccacagatgctgaaactggaatagctgttggctctgtatctcttgctgcaatgcaacataaaatggctaaaatgaaacccaaggaagttgatatgaacttctacagatttcagagaagagaagcccacctcagtggtatgtcatcattgcttaacgagacttattatttgttattccactccctgattagctacacatgatagaacccagactatatattgcacattatgaagtgcttggacttggtagttgtaatgcaatgcagttcaccagccacgataaaatgtaatctgttcacttgtttgccatttgaatacgagtaacctgtacctgcagcttgatattttctgttctggttttgggggtagtatttggttctattagaagtttactgttttgcatcttcagtttggttggagtcacaagtccacagccattgtactatcttgattggacttcaaatgaaccatatgtgtgggaagtttctctttctcttgtgtgtgtgtgtgtgatacattgaggttctagtatatatatatagacaggtacacctgcaggcttgtg

SEQ ID NO: 74235 - DNA, 1334 bp, Zea Mays
gggatagaaaaataaagactacccatcccataccccttccttttataaagaaaattccattggtgatgcagaagaagaaaaataagcatgccaatgttaagagtaatcatgatacggcagatgctgtggtggaatttctgtcagacagtaaatatgatgctccactgaagctaaagaagaagagcaaaaagaagaaaatggaaagtagtggtcctgcagtcgtatatgaaagttcagttgttactgaagatgctggagcatctaagctgaagaaaaagaaaaggaaggtaaagggagggaaggtctctgctgggattactgatgcagaagaaattctgcatgaaaatcaaattgaagaaactagtgctgatgtcaaccaacttgcagcactgagtgaagatgtggataatgaagagcctcagaaattaaagaggggaaagaaaatggaagttaaaaaatctgggaaggccaagaagaaggacaagcatgcatcgcgtaaagataataacaacttggagagacatgttgatgttagtactgcaaacgctgatgagaatatgagattccattagttgatgaagactgctctagaggactgaaaaaatggatcttggagtgcaaacacaagagacctggcttgaaagccttgcaagaagcaatagatgaatttattgttgctcatgaggaacaacaagagaagggagaagagagagaggcccgtgcagcagaagatggatgggcagttgttcatcacaaggggaggaaaaagaccacagatgctgaaactggaatagctgttggctctgtatctcttgctgcaatgcaacataaaatggctaaaatgaaacccaaggaagttgatatgaacttctacagatttcagagaagagaagcccacctcagtggtatgtcatcattgcttaacgagacttattatttgttattccactccctgattagctacacatgatagaacccagactatatattgcacattatgaagtgcttggacttggtagttgtaatgcaatgcagttcaccagccacgataaaatgtaatctgttcacttgtttgccatttgaatacgagtaacctgtacctgcagcttgatattttctgttctggttttgggggtagtatttggttctattagaagtttactgttttgcatcttcagtttggttggagtcacaagtccacagccattgtactatcttgattggacttcaaatgaaccatatgtgtgggaagtttctctttctcttgtgtgtgtgtgtgtgatacattgaggttctagtatatatatatagacaggtacacctgcaggcttgtg

SEQ ID NO: 74236 - DNA, 3324 bp, Zea Mays
ccttgacaagttcgtcgagccgaacagcgacctgcactcgtaggctcaggcgcggtttaccctgacccacatacgatagttgatgtgggtgaaatggactttttaagtccaaaataagcgtactaacaccggcagccgccccaaatctcagtcgggtcattccaatcgaaaccctagaagcgctccgccgagctccaggttcccgagctcgccgctttctcgcggagtaaaaaggccgaggccgggacaacctacttgtgctacctcaacggttcagccatggatctggagatcgttgggcggcatgccttactgttcgacgacgacgcgacggcggagctcgtcaactccggcgtctcccttgtcccctgggcggccgtcggcgcggcagacctcctcctcgaccgccacgacgtccgccacctccttgaccgcgtgccccctcgcccgcaccgcgcctactcgatggccctcctctccgcgccctcccctgacggcgtctctgagaccgagctcgatcgcgagcgctaccttgacctcccggctggcgacggcgaatacgagggttctggggatgcggctccttcaggaaatgggtcagatactggacagactgattataatgttgttcctttctcgtatggatatcccgctggttcagatgaaccaaattcttcgaacttgtgctatcgcccatcattttatgtgccagaaagcttgttgaataagctgatggttggagcagagatgaagttcctactagtgatgcacattgtttccttgcaatgtatcttgacgtaaggaatataggcagcctccttctgagaaggtgcatcagataattgcaaggacagccttatttgtcagcgagcatgggggacaatcagagattgtattgagggtgaaacaaggagataatccaacatttggattcttgatgcctgatcatcatctccacagctacttccgctaccttgttgatcatcctcaactgctgaaggatggtgctgatgctgttggcacgaataaaggcaatactgagaatgagcatgcttcatctggcggggctttatcattgcttgggaccacatatgactcaggagacgagaatgaaggcacactcccgcgtagttcggaaggcatgaatcctgaaaatagcatgactcttgatgtgcagggccatgtaaaatctgcatcaattatgcctgacaaaaaagaaataggcaaaaatcagaatgctcctcctgcagttaaaagaaaaacaatattgatgaagaagaatcagattcttactggcaacagcatggttgctgttcagcatgaaaaggttaatgacgcaattatagcatcaagtacttccaaatcacataccaattcaggcttatcagaaataaaagaaatgatccttgaaccaccatctttcatgaaacgcacaatggagaaaataattgagttcattctgacaaatgggaaggagttcgagaaaaaactgattgagcaagacagaacaactgggaggtttccatttcttctgtcttctaatccataccactcatattatctaaagtttctccaggaaactgaagagtccaattcacatggtagaagtcctaataacaaggacagaagaggttcttctgaccggaggggcagaaactctcgtgagcgcgccgacagaagctcctgtgagcgcgctgacagaagctctcgtgaacgcgccgacagaaggtgctcaatggagcgcaaagacatcaattatagcatggaatccagtgcttctgatagaagctcatctgggccatcagagaagcagctgtatgacaaacaagggaagggtatattccatcctgtttgtggggtcaagactcggaaagttactgcagatgaagctgctgctatagtaatggcagctactcgaggactgggtgctgcaaatgactcacttaacaccatgaaaggaaccaaggacaatgttcgcacccatgttagtaatgatccttcttccagctttggaagtttctcatctttacaggaccgaaatgcactgtccaaacacatttcaaatagtgatgttgatgcttcacttacaagtagtggacagccccaaagggaaggttttggaatcattgatgatgattggattgcaaacactattgcaaaagctgctgctgcagcagcttccaaagaggcaggttctttggaagctaccatgacaaaggaacagaagctgaaagctgataggcttcgccgtgcgaagatgtttgctgcaatcattaagagtggagacaacaagatgaatgatttagctgcagcatcgaacccaactagtgaagctgccaaggccattcctgatatgaatgcctctggacttgatctgcaatctgtggctaaggaacgtgaaggtagtagctctgttctgtttgaccatgaggggccaaacttgacaaaacatagtaaagactctgatgatgaacagaacagagtgcggaagtatagaaagaaacaccaagaatccgacgaggaaaaagatgaatctgaggatagctataagcactcaaggaagaagcatcgcccagagcattcaagagaccagagcaaggatgttcacaaacataagaacaagagtcactccaaggacagggaatccagacatcatagacaccattgtagctcttcggaagatgagcatgagcatgaacgttggagttccaaatcaaggcataggcatagagatgatcaccgctactctgacgaggaacactctgatgaggaacacaggaggtcacacaagcatcggagggagcatcactccagttctaaaaggaagcacgaggaagactgataccaggttcgccggaagtgtctgtctagatcaggtgccaagtttgaatcagacaagctgtctgatgacactgcacaaatcaactcagggaacaactgaagcgccgagtaaactgagagcaaaaatcagagcaacatactgtaatattttgtatcacagcagtaacattatgtccttaggcctctgttttgtagccaattgctctttcgatttctgtatttgtttcgaacgttctaactaggtgtctgtccatcttatttgaaatcagtgacctgctcgccaagttctaactacatgctggcgtttctgatgcatgcatagctttattatttcaagtggtctacatgtagcgtcatactccgtcccaaaattcgttttagttaactaatggttgatatgtgttttaagtatgtgtctagattcattttcatgtatttgaatatagatataaaaattaatagctaatcaatggctaaaacgat

SEQ ID NO: 74237 - DNA, 3770 bp, Zea Mays
ccttgacaagttcgtcgagccgaacagcgacctgcactcgtaggctcaggcgcggtttaccctgacccacatacgatagttgatgtgggtgaaatggactttttaagtccaaaataagcgtactaacaccggcagccgccccaaatctcagtcgggtcattccaatcgaaaccctagaagcgctccgccgagctccaggttcccgagctcgccgctttctcgcggagtaaaaaggccgaggccgggacaacctacttgtgctacctcaacggttcagccatggatctggagatcgttgggcggcatgccttactgttcgacgacgacgcgacggcggagctcgtcaactccggcgtctcccttgtcccctgggcggccgtcggcgcggcagacctcctcctcgaccgccacgacgtccgccacctccttgaccgcgtgccccctcgcccgcaccgcgcctactcgatggccctcctctccgcgccctcccctgacggcgtctctgagaccgagctcgatcgcgagcgctaccttgacctcccggctggcgacggcgaatacgagggttctggggatgcggctccttcaggagtcataatcctacattattcagactcatttcaatgaagcatcaagtacaaattcaaaataagtctattaattggttgggatttcagtggtatggtcgcagccctgttgagccaaactgtataaggaatttttcagatattactcccttgtatatgacctcacacgtactgatctcttctctgctgtttgatttttttggttagcagcagactaacgttgtagtaactgtttgtttcttgcaaacaaacaaggttcatagaatatccaatcgtatccaaataacagtatcactgccacatgtttaaatttagcagtgttcattgtacatatttttttccattgtatacttttaagtttgcaggaaggatgctttgactagttcatgagcatctttaatcatttcaagtaagggactttcttctgttgctcggcagatggaatttgtgcctgcatttttcttccctactcctatttctgttatttactatataacaatcctttagctgacatttttttgcttatctaggaaatgggtcagatactggacagactgattataatgttgttcctttctcgtatggatatcccgctggttcagatgaaccaaattcttcgaacttgtgctatcgcccatcattttatgtgccagaaagcttgttgaataagctgcctccttctgagaaggtgcatcagataattgcaaggacagccttatttgtcagcgagcatgggggacaatcagagattgtattgagggtgaaacaaggagataatccaacatttggattcttgatgcctgatcatcatctccacagctacttccgctaccttgttgatcatcctcaactgctgaaggatggtgctgatgctgttggcacgaataaaggcaatactgagaatgagcatgcttcatctggcggggctttatcattgcttgggaccacatatgactcaggagacgagaatgaaggcacactcccgcgtagttcggaaggcatgaatcctgaaaatagcatgactcttgatgtgcagggccatgtaaaatctgcatcaattatgcctgacaaaaaagaaataggcaaaaatcagaatgctcctcctgcagttaaaagaaaaacaatattgatgaagaagaatcagattcttactggcaacagcatggttgctgttcagcatgaaaaggttaatgacgcaattatagcatcaagtacttccaaatcacataccaattcaggcttatcagaaataaaagaaatgatccttgaaccaccatctttcatgaaacgcacaatggagaaaataattgagttcattctgacaaatgggaaggagttcgagaaaaaactgattgagcaagacagaacaactgggaggtttccatttcttctgtcttctaatccataccactcatattatctaaagtttctccaggaaactgaagagtccaattcacatggtagaagtcctaataacaaggacagaagaggttcttctgaccggaggggcagaaactctcgtgagcgcgccgacagaagctcctgtgagcgcgctgacagaagctctcgtgaacgcgccgacagaaggtgctcaatggagcgcaaagacatcaattatagcatggaatccagtgcttctgatagaagctcatctgggccatcagagaagcagctgtatgacaaacaagggaagggtatattccatcctgtttgtggggtcaagactcggaaagttactgcagatgaagctgctgctatagtaatggcagctactcgaggactgggtgctgcaaatgactcacttaacaccatgaaaggaaccaaggacaatgttcgcacccatgttagtaatgatccttcttccagctttggaagtttctcatctttacaggaccgaaatgcactgtccaaacacatttcaaatagtgatgttgatgcttcacttacaagtagtggacagccccaaagggaaggttttggaatcattgatgatgattggattgcaaacactattgcaaaagctgctgctgcagcagcttccaaagaggcaggttctttggaagctaccatgacaaaggaacagaagctgaaagctgataggcttcgccgtgcgaagatgtttgctgcaatcattaagagtggagacaacaagatgaatgatttagctgcagcatcgaacccaactagtgaagctgccaaggccattcctgatatgaatgcctctggacttgatctgcaatctgtggctaaggaacgtgaaggtagtagctctgttctgtttgaccatgaggggccaaacttgacaaaacatagtaaagactctgatgatgaacagaacagagtgcggaagtatagaaagaaacaccaagaatccgacgaggaaaaagatgaatctgaggatagctataagcactcaaggaagaagcatcgcccagagcattcaagagaccagagcaaggatgttcacaaacataagaacaagagtcactccaaggacagggaatccagacatcatagacaccattgtagctcttcggaagatgagcatgagcatgaacgttggagttccaaatcaaggcataggcatagagatgatcaccgctactctgacgaggaacactctgatgaggaacacaggaggtcacacaagcatcggagggagcatcactccagttctaaaaggaagcacgaggaagactgataccaggttcgccggaagtgtctgtctagatcaggtgccaagtttgaatcagacaagctgtctgatgacactgcacaaatcaactcagggaacaactgaagcgccgagtaaactgagagcaaaaatcagagcaacatactgtaatattttgtatcacagcagtaacattatgtccttaggcctctgttttgtagccaattgctctttcgatttctgtatttgtttcgaacgttctaactaggtgtctgtccatcttatttgaaatcagtgacctgctcgccaagttctaactacatgctggcgtttctgatgcatgcatagctttattatttcaagtggtctacatgtagcgtcatactccgtcccaaaattcgttttagttaactaatggttgatatgtgttttaagtatgtgtctagattcattttcatgtatttgaatatagatataaaaattaatagctaatcaatggctaaaacgat

SEQ ID NO: 74238 - DNA, 3236 bp, Zea Mays
caagttcgtcgagccgaacagcgacctgcactcgtaggctcaggcgcggtttaccctgacccacatacgatagttgatgtgggtgaaatggactttttaagtccaaaataagcgtactaacaccggcagccgccccaaatctcagtcgggtcattccaatcgaaaccctagaagcgctccgccgagctccaggttcccgagctcgccgctttctcgcggagtaaaaaggccgaggccgggacaacctacttgtgctacctcaacggttcagccatggatctggagatcgttgggcggcatgccttactgttcgacgacgacgcgacggcggagctcgtcaactccggcgtctcccttgtcccctgggcggccgtcggcgcggcagacctcctcctcgaccgccacgacgtccgccacctccttgaccgcgtgccccctcgcccgcaccgcgcctactcgatggccctcctctccgcgccctcccctgacggcgtctctgagaccgagctcgatcgcgagcgctaccttgacctcccggctggcgacggcgaatacgagggttctggggatgcggctccttcaggaaatgggtcagatactggacagactgattataatgttgttcctttctcgtatggatatcccgctggttcagatgaaccaaattcttcgaacttgtgctatcgcccatcattttatgtgccagaaagcttgttgaataagctgcctccttctgagaaggtgcatcagataattgcaaggacagccttatttgtcagcgagcatgggggacaatcagagattgtattgagggtgaaacaaggagataatccaacatttggattcttgatgcctgatcatcatctccacagctacttccgctaccttgttgatcatcctcaactgctgaaggatggtgctgatgctgttggcacgaataaaggcaatactgagaatgagcatgcttcatctggcggggctttatcattgcttgggaccacatatgactcaggagacgagaatgaaggcacactcccgcgtagttcggaaggcatgaatcctgaaaatagcatgactcttgatgtgcagggccatgtaaaatctgcatcaattatgcctgacaaaaaagaaataggcaaaaatcagaatgctcctcctgcagttaaaagaaaaacaatattgatgaagaagaatcagattcttactggcaacagcatggttgctgttcagcatgaaaaggttaatgacgcaattatagcatcaagtacttccaaatcacataccaattcaggcttatcagaaataaaagaaatgatccttgaaccaccatctttcatgaaacgcacaatggagaaaataattgagttcattctgacaaatgggaaggagttcgagaaaaaactgattgagcaagacagaacaactgggaggtttccatttcttctgtcttctaatccataccactcatattatctaaagtttctccaggaaactgaagagtccaattcacatggtagaagtcctaataacaaggacagaagaggttcttctgaccggaggggcagaaactctcgtgagcgcgccgacagaagctcctgtgagcgcgctgacagaagctctcgtgaacgcgccgacagaaggtgctcaatggagcgcaaagacatcaattatagcatggaatccagtgcttctgatagaagctcatctgggccatcagagaagcagctgtatgacaaacaagggaagggtatattccatcctgtttgtggggtcaagactcggaaagttactgcagatgaagctgctgctatagtaatggcagctactcgaggactgggtgctgcaaatgactcacttaacaccatgaaaggaaccaaggacaatgttcgcacccatgttagtaatgatccttcttccagctttggaagtttctcatctttacaggaccgaaatgcactgtccaaacacatttcaaatagtgatgttgatgcttcacttacaagtagtggacagccccaaagggaaggttttggaatcattgatgatgattggattgcaaacactattgcaaaagctgctgctgcagcagcttccaaagaggcaggttctttggaagctaccatgacaaaggaacagaagctgaaagctgataggcttcgccgtgcgaagatgtttgctgcaatcattaagagtggagacaacaagatgaatgatttagctgcagcatcgaacccaactagtgaagctgccaaggccattcctgatatgaatgcctctggacttgatctgcaatctgtggctaaggaacgtgaaggtagtagctctgttctgtttgaccatgaggggccaaacttgacaaaacatagtaaagactctgatgatgaacagaacagagtgcggaagtatagaaagaaacaccaagaatccgacgaggaaaaagatgaatctgaggatagctataagcactcaaggaagaagcatcgcccagagcattcaagagaccagagcaaggatgttcacaaacataagaacaagagtcactccaaggacagggaatccagacatcatagacaccattgtagctcttcggaagatgagcatgagcatgaacgttggagttccaaatcaaggcataggcatagagatgatcaccgctactctgacgaggaacactctgatgaggaacacaggaggtcacacaagcatcggagggagcatcactccagttctaaaaggaagcacgaggaagactgataccaggttcgccggaagtgtctgtctagatcaggtgccaagtttgaatcagacaagctgtctgatgacactgcacaaatcaactcagggaacaactgaagcgccgagtaaactgagagcaaaaatcagagcaacatactgtaatattttgtatcacagcagtaacattatgtccttaggcctctgttttgtagccaattgctctttcgatttctgtatttgtttcgaacgttctaactaggtgtctgtccatcttatttgaaatcagtgacctgctcgccaagttctaactacatgctggcgtttctgatgcatgcatagctttattatttcaagtggtctacatgtagcgtcatactccgtcccaaaattcgttttagttaactaatggttgatatgtgttttaagtatgtgtctagattcattttcatgtatttgaatatagatataaaaattaatagctaatcaatggctaaaacgat

SEQ ID NO: 74239 - DNA, 3380 bp, Zea Mays
caagttcgtcgagccgaacagcgacctgcactcgtaggctcaggcgcggtttaccctgacccacatacgatagttgatgtgggtgaaatggactttttaagtccaaaataagcgtactaacaccggcagccgccccaaatctcagtcgggtcattccaatcgaaaccctagaagcgctccgccgagctccaggttcccgagctcgccgctttctcgcggagtaaaaaggccgaggccgggacaacctacttgtgctacctcaacggttcagccatggatctggagatcgttgggcggcatgccttactgttcgacgacgacgcgacggcggagctcgtcaactccggcgtctcccttgtcccctgggcggccgtcggcgcggcagacctcctcctcgaccgccacgacgtccgccacctccttgaccgcgtgccccctcgcccgcaccgcgcctactcgatggccctcctctccgcgccctcccctgacggcgtctctgagaccgagctcgatcgcgagcgctaccttgacctcccggctggcgacggcgaatacgagggttctggggatgcggctccttcaggaaatgggtcagatactggacagactgattataatgttgttcctttctcgtatggatatcccgctggttcagatgaaccaaattcttcgaacttgtgctatcgcccatcattttatgtgccagaaagcttgttgaataagctgttgatccagcaataactgttcaaggtgcatatgttcttctaaggattaaatgcctgtttcagatggttggagcagagatgaagttcctactagtgatgcacattgtttccttgcaatgtatcttgacgtaaggaatataggcagcctccttctgagaaggtgcatcagataattgcaaggacagccttatttgtcagcgagcatgggggacaatcagagattgtattgagggtgaaacaaggagataatccaacatttggattcttgatgcctgatcatcatctccacagctacttccgctaccttgttgatcatcctcaactgctgaaggatggtgctgatgctgttggcacgaataaaggcaatactgagaatgagcatgcttcatctggcggggctttatcattgcttgggaccacatatgactcaggagacgagaatgaaggcacactcccgcgtagttcggaaggcatgaatcctgaaaatagcatgactcttgatgtgcagggccatgtaaaatctgcatcaattatgcctgacaaaaaagaaataggcaaaaatcagaatgctcctcctgcagttaaaagaaaaacaatattgatgaagaagaatcagattcttactggcaacagcatggttgctgttcagcatgaaaaggttaatgacgcaattatagcatcaagtacttccaaatcacataccaattcaggcttatcagaaataaaagaaatgatccttgaaccaccatctttcatgaaacgcacaatggagaaaataattgagttcattctgacaaatgggaaggagttcgagaaaaaactgattgagcaagacagaacaactgggaggtttccatttcttctgtcttctaatccataccactcatattatctaaagtttctccaggaaactgaagagtccaattcacatggtagaagtcctaataacaaggacagaagaggttcttctgaccggaggggcagaaactctcgtgagcgcgccgacagaagctcctgtgagcgcgctgacagaagctctcgtgaacgcgccgacagaaggtgctcaatggagcgcaaagacatcaattatagcatggaatccagtgcttctgatagaagctcatctgggccatcagagaagcagctgtatgacaaacaagggaagggtatattccatcctgtttgtggggtcaagactcggaaagttactgcagatgaagctgctgctatagtaatggcagctactcgaggactgggtgctgcaaatgactcacttaacaccatgaaaggaaccaaggacaatgttcgcacccatgttagtaatgatccttcttccagctttggaagtttctcatctttacaggaccgaaatgcactgtccaaacacatttcaaatagtgatgttgatgcttcacttacaagtagtggacagccccaaagggaaggttttggaatcattgatgatgattggattgcaaacactattgcaaaagctgctgctgcagcagcttccaaagaggcaggttctttggaagctaccatgacaaaggaacagaagctgaaagctgataggcttcgccgtgcgaagatgtttgctgcaatcattaagagtggagacaacaagatgaatgatttagctgcagcatcgaacccaactagtgaagctgccaaggccattcctgatatgaatgcctctggacttgatctgcaatctgtggctaaggaacgtgaaggtagtagctctgttctgtttgaccatgaggggccaaacttgacaaaacatagtaaagactctgatgatgaacagaacagagtgcggaagtatagaaagaaacaccaagaatccgacgaggaaaaagatgaatctgaggatagctataagcactcaaggaagaagcatcgcccagagcattcaagagaccagagcaaggatgttcacaaacataagaacaagagtcactccaaggacagggaatccagacatcatagacaccattgtagctcttcggaagatgagcatgagcatgaacgttggagttccaaatcaaggcataggcatagagatgatcaccgctactctgacgaggaacactctgatgaggaacacaggaggtcacacaagcatcggagggagcatcactccagttctaaaaggaagcacgaggaagactgataccaggttcgccggaagtgtctgtctagatcaggtgccaagtttgaatcagacaagctgtctgatgacactgcacaaatcaactcagggaacaactgaagcgccgagtaaactgagagcaaaaatcagagcaacatactgtaatattttgtatcacagcagtaacattatgtccttaggcctctgttttgtagccaattgctctttcgatttctgtatttgtttcgaacgttctaactaggtgtctgtccatcttatttgaaatcagtgacctgctcgccaagttctaactacatgctggcgtttctgatgcatgcatagctttattatttcaagtggtctacatgtagcgtcatactccgtcccaaaattcgttttagttaactaatggttgatatgtgttttaagtatgtgtctagattcattttcatgtatttgaatatagatataaaaattaatagctaatcaatggctaaaacgat

SEQ ID NO: 74240 - DNA, 3371 bp, Zea Mays
caagttcgtcgagccgaacagcgacctgcactcgtaggctcaggcgcggtttaccctgacccacatacgatagttgatgtgggtgaaatggactttttaagtccaaaataagcgtactaacaccggcagccgccccaaatctcagtcgggtcattccaatcgaaaccctagaagcgctccgccgagctccaggttcccgagctcgccgctttctcgcggagtaaaaaggccgaggccgggacaacctacttgtgctacctcaacggttcagccatggatctggagatcgttgggcggcatgccttactgttcgacgacgacgcgacggcggagctcgtcaactccggcgtctcccttgtcccctgggcggccgtcggcgcggcagacctcctcctcgaccgccacgacgtccgccacctccttgaccgcgtgccccctcgcccgcaccgcgcctactcgatggccctcctctccgcgccctcccctgacggcgtctctgagaccgagctcgatcgcgagcgctaccttgacctcccggctggcgacggcgaatacgagggttctggggatgcggctccttcaggaaatgggtcagatactggacagactgattataatgttgttcctttctcgtatggatatcccgctggttcagatgaaccaaattcttcgaacttgtgctatcgcccatcattttatgtgccagaaagcttgttgaataagctgcaataactgttcaaggtgcatatgttcttctaaggattaaatgcctgtttcagatggttggagcagagatgaagttcctactagtgatgcacattgtttccttgcaatgtatcttgacgtaaggaatataggcagcctccttctgagaaggtgcatcagataattgcaaggacagccttatttgtcagcgagcatgggggacaatcagagattgtattgagggtgaaacaaggagataatccaacatttggattcttgatgcctgatcatcatctccacagctacttccgctaccttgttgatcatcctcaactgctgaaggatggtgctgatgctgttggcacgaataaaggcaatactgagaatgagcatgcttcatctggcggggctttatcattgcttgggaccacatatgactcaggagacgagaatgaaggcacactcccgcgtagttcggaaggcatgaatcctgaaaatagcatgactcttgatgtgcagggccatgtaaaatctgcatcaattatgcctgacaaaaaagaaataggcaaaaatcagaatgctcctcctgcagttaaaagaaaaacaatattgatgaagaagaatcagattcttactggcaacagcatggttgctgttcagcatgaaaaggttaatgacgcaattatagcatcaagtacttccaaatcacataccaattcaggcttatcagaaataaaagaaatgatccttgaaccaccatctttcatgaaacgcacaatggagaaaataattgagttcattctgacaaatgggaaggagttcgagaaaaaactgattgagcaagacagaacaactgggaggtttccatttcttctgtcttctaatccataccactcatattatctaaagtttctccaggaaactgaagagtccaattcacatggtagaagtcctaataacaaggacagaagaggttcttctgaccggaggggcagaaactctcgtgagcgcgccgacagaagctcctgtgagcgcgctgacagaagctctcgtgaacgcgccgacagaaggtgctcaatggagcgcaaagacatcaattatagcatggaatccagtgcttctgatagaagctcatctgggccatcagagaagcagctgtatgacaaacaagggaagggtatattccatcctgtttgtggggtcaagactcggaaagttactgcagatgaagctgctgctatagtaatggcagctactcgaggactgggtgctgcaaatgactcacttaacaccatgaaaggaaccaaggacaatgttcgcacccatgttagtaatgatccttcttccagctttggaagtttctcatctttacaggaccgaaatgcactgtccaaacacatttcaaatagtgatgttgatgcttcacttacaagtagtggacagccccaaagggaaggttttggaatcattgatgatgattggattgcaaacactattgcaaaagctgctgctgcagcagcttccaaagaggcaggttctttggaagctaccatgacaaaggaacagaagctgaaagctgataggcttcgccgtgcgaagatgtttgctgcaatcattaagagtggagacaacaagatgaatgatttagctgcagcatcgaacccaactagtgaagctgccaaggccattcctgatatgaatgcctctggacttgatctgcaatctgtggctaaggaacgtgaaggtagtagctctgttctgtttgaccatgaggggccaaacttgacaaaacatagtaaagactctgatgatgaacagaacagagtgcggaagtatagaaagaaacaccaagaatccgacgaggaaaaagatgaatctgaggatagctataagcactcaaggaagaagcatcgcccagagcattcaagagaccagagcaaggatgttcacaaacataagaacaagagtcactccaaggacagggaatccagacatcatagacaccattgtagctcttcggaagatgagcatgagcatgaacgttggagttccaaatcaaggcataggcatagagatgatcaccgctactctgacgaggaacactctgatgaggaacacaggaggtcacacaagcatcggagggagcatcactccagttctaaaaggaagcacgaggaagactgataccaggttcgccggaagtgtctgtctagatcaggtgccaagtttgaatcagacaagctgtctgatgacactgcacaaatcaactcagggaacaactgaagcgccgagtaaactgagagcaaaaatcagagcaacatactgtaatattttgtatcacagcagtaacattatgtccttaggcctctgttttgtagccaattgctctttcgatttctgtatttgtttcgaacgttctaactaggtgtctgtccatcttatttgaaatcagtgacctgctcgccaagttctaactacatgctggcgtttctgatgcatgcatagctttattatttcaagtggtctacatgtagcgtcatactccgtcccaaaattcgttttagttaactaatggttgatatgtgttttaagtatgtgtctagattcattttcatgtatttgaatatagatataaaaattaatagctaatcaatggctaaaacgat

SEQ ID NO: 74241 - DNA, 3846 bp, Zea Mays
caagttcgtcgagccgaacagcgacctgcactcgtaggctcaggcgcggtttaccctgacccacatacgatagttgatgtgggtgaaatggactttttaagtccaaaataagcgtactaacaccggcagccgccccaaatctcagtcgggtcattccaatcgaaaccctagaagcgctccgccgagctccaggttcccgagctcgccgctttctcgcggagtaaaaaggccgaggccgggacaacctacttgtgctacctcaacggttcagccatggatctggagatcgttgggcggcatgccttactgttcgacgacgacgcgacggcggagctcgtcaactccggcgtctcccttgtcccctgggcggccgtcggcgcggcagacctcctcctcgaccgccacgacgtccgccacctccttgaccgcgtgccccctcgcccgcaccgcgcctactcgatggccctcctctccgcgccctcccctgacggcgtctctgagaccgagctcgatcgcgagcgctaccttgacctcccggctggcgacggcgaatacgagggttctggggatgcggctccttcaggagtcataatcctacattattcagactcatttcaatgaagcatcaagtacaaattcaaaataagtctattaattggttgggatttcagtggtatggtcgcagccctgttgagccaaactgtataaggaatttttcagatattactcccttgtatatgacctcacacgtactgatctcttctctgctgtttgatttttttggttagcagcagactaacgttgtagtaactgtttgtttcttgcaaacaaacaaggttcatagaatatccaatcgtatccaaataacagtatcactgccacatgtttaaatttagcagtgttcattgtacatatttttttccattgtatacttttaagtttgcaggaaggatgctttgactagttcatgagcatctttaatcatttcaagtaagggactttcttctgttgctcggcagatggaatttgtgcctgcatttttcttccctactcctatttctgttatttactatataacaatcctttagctgacatttttttgcttatctaggaaatgggtcagatactggacagactgattataatgttgttcctttctcgtatggatatcccgctggttcagatgaaccaaattcttcgaacttgtgctatcgcccatcattttatgtgccagaaagcttgttgaataagctgatggttggagcagagatgaagttcctactagtgatgcacattgtttccttgcaatgtatcttgacgtaaggaatataggcagcctccttctgagaaggtgcatcagataattgcaaggacagccttatttgtcagcgagcatgggggacaatcagagattgtattgagggtgaaacaaggagataatccaacatttggattcttgatgcctgatcatcatctccacagctacttccgctaccttgttgatcatcctcaactgctgaaggatggtgctgatgctgttggcacgaataaaggcaatactgagaatgagcatgcttcatctggcggggctttatcattgcttgggaccacatatgactcaggagacgagaatgaaggcacactcccgcgtagttcggaaggcatgaatcctgaaaatagcatgactcttgatgtgcagggccatgtaaaatctgcatcaattatgcctgacaaaaaagaaataggcaaaaatcagaatgctcctcctgcagttaaaagaaaaacaatattgatgaagaagaatcagattcttactggcaacagcatggttgctgttcagcatgaaaaggttaatgacgcaattatagcatcaagtacttccaaatcacataccaattcaggcttatcagaaataaaagaaatgatccttgaaccaccatctttcatgaaacgcacaatggagaaaataattgagttcattctgacaaatgggaaggagttcgagaaaaaactgattgagcaagacagaacaactgggaggtttccatttcttctgtcttctaatccataccactcatattatctaaagtttctccaggaaactgaagagtccaattcacatggtagaagtcctaataacaaggacagaagaggttcttctgaccggaggggcagaaactctcgtgagcgcgccgacagaagctcctgtgagcgcgctgacagaagctctcgtgaacgcgccgacagaaggtgctcaatggagcgcaaagacatcaattatagcatggaatccagtgcttctgatagaagctcatctgggccatcagagaagcagctgtatgacaaacaagggaagggtatattccatcctgtttgtggggtcaagactcggaaagttactgcagatgaagctgctgctatagtaatggcagctactcgaggactgggtgctgcaaatgactcacttaacaccatgaaaggaaccaaggacaatgttcgcacccatgttagtaatgatccttcttccagctttggaagtttctcatctttacaggaccgaaatgcactgtccaaacacatttcaaatagtgatgttgatgcttcacttacaagtagtggacagccccaaagggaaggttttggaatcattgatgatgattggattgcaaacactattgcaaaagctgctgctgcagcagcttccaaagaggcaggttctttggaagctaccatgacaaaggaacagaagctgaaagctgataggcttcgccgtgcgaagatgtttgctgcaatcattaagagtggagacaacaagatgaatgatttagctgcagcatcgaacccaactagtgaagctgccaaggccattcctgatatgaatgcctctggacttgatctgcaatctgtggctaaggaacgtgaaggtagtagctctgttctgtttgaccatgaggggccaaacttgacaaaacatagtaaagactctgatgatgaacagaacagagtgcggaagtatagaaagaaacaccaagaatccgacgaggaaaaagatgaatctgaggatagctataagcactcaaggaagaagcatcgcccagagcattcaagagaccagagcaaggatgttcacaaacataagaacaagagtcactccaaggacagggaatccagacatcatagacaccattgtagctcttcggaagatgagcatgagcatgaacgttggagttccaaatcaaggcataggcatagagatgatcaccgctactctgacgaggaacactctgatgaggaacacaggaggtcacacaagcatcggagggagcatcactccagttctaaaaggaagcacgaggaagactgataccaggttcgccggaagtgtctgtctagatcaggtgccaagtttgaatcagacaagctgtctgatgacactgcacaaatcaactcagggaacaactgaagcgccgagtaaactgagagcaaaaatcagagcaacatactgtaatattttgtatcacagcagtaacattatgtccttaggcctctgttttgtagccaattgctctttcgatttctgtatttgtttcgaacgttctaactaggtgtctgtccatcttatttgaaatcagtgacctgctcgccaagttctaactacatgctggcgtttctgatgcatgcatagctttattatttcaagtggtctacatgtagcgtcatactccgtcccaaaattcgttttagttaactaatggttgatatgtgttttaagtatgtgtctagattcattttcatgtatttgaatatagatataaaaattaatagctaatcaatggctaaaacgat

SEQ ID NO: 74242 - DNA, 3908 bp, Zea Mays
caagttcgtcgagccgaacagcgacctgcactcgtaggctcaggcgcggtttaccctgacccacatacgatagttgatgtgggtgaaatggactttttaagtccaaaataagcgtactaacaccggcagccgccccaaatctcagtcgggtcattccaatcgaaaccctagaagcgctccgccgagctccaggttcccgagctcgccgctttctcgcggagtaaaaaggccgaggccgggacaacctacttgtgctacctcaacggttcagccatggatctggagatcgttgggcggcatgccttactgttcgacgacgacgcgacggcggagctcgtcaactccggcgtctcccttgtcccctgggcggccgtcggcgcggcagacctcctcctcgaccgccacgacgtccgccacctccttgaccgcgtgccccctcgcccgcaccgcgcctactcgatggccctcctctccgcgccctcccctgacggcgtctctgagaccgagctcgatcgcgagcgctaccttgacctcccggctggcgacggcgaatacgagggttctggggatgcggctccttcaggagtcataatcctacattattcagactcatttcaatgaagcatcaagtacaaattcaaaataagtctattaattggttgggatttcagtggtatggtcgcagccctgttgagccaaactgtataaggaatttttcagatattactcccttgtatatgacctcacacgtactgatctcttctctgctgtttgatttttttggttagcagcagactaacgttgtagtaactgtttgtttcttgcaaacaaacaaggttcatagaatatccaatcgtatccaaataacagtatcactgccacatgtttaaatttagcagtgttcattgtacatatttttttccattgtatacttttaagtttgcaggaaggatgctttgactagttcatgagcatctttaatcatttcaagtaagggactttcttctgttgctcggcagatggaatttgtgcctgcatttttcttccctactcctatttctgttatttactatataacaatcctttagctgacatttttttgcttatctaggaaatgggtcagatactggacagactgattataatgttgttcctttctcgtatggatatcccgctggttcagatgaaccaaattcttcgaacttgtgctatcgcccatcattttatgtgccagaaagcttgttgaataagctgttgatccagcaataactgttcaaggtgcatatgttcttctaaggattaaatgcctgtttcagatggttggagcagagatgaagttcctactagtgatgcacattgtttccttgcaatgtatcttgacgtaaggaatataggcagcctccttctgagaaggtgcatcagataattgcaaggacagccttatttgtcagcgagcatgggggacaatcagagattgtattgagggtgaaacaaggagataatccaacatttggattcttgatgcctgatcatcatctccacagctacttccgctaccttgttgatcatcctcaactgctgaaggatggtgctgatgctgttggcacgaataaaggcaatactgagaatgagcatgcttcatctggcggggctttatcattgcttgggaccacatatgactcaggagacgagaatgaaggcacactcccgcgtagttcggaaggcatgaatcctgaaaatagcatgactcttgatgtgcagggccatgtaaaatctgcatcaattatgcctgacaaaaaagaaataggcaaaaatcagaatgctcctcctgcagttaaaagaaaaacaatattgatgaagaagaatcagattcttactggcaacagcatggttgctgttcagcatgaaaaggttaatgacgcaattatagcatcaagtacttccaaatcacataccaattcaggcttatcagaaataaaagaaatgatccttgaaccaccatctttcatgaaacgcacaatggagaaaataattgagttcattctgacaaatgggaaggagttcgagaaaaaactgattgagcaagacagaacaactgggaggtttccatttcttctgtcttctaatccataccactcatattatctaaagtttctccaggaaactgaagagtccaattcacatggtagaagtcctaataacaaggacagaagaggttcttctgaccggaggggcagaaactctcgtgagcgcgccgacagaagctcctgtgagcgcgctgacagaagctctcgtgaacgcgccgacagaaggtgctcaatggagcgcaaagacatcaattatagcatggaatccagtgcttctgatagaagctcatctgggccatcagagaagcagctgtatgacaaacaagggaagggtatattccatcctgtttgtggggtcaagactcggaaagttactgcagatgaagctgctgctatagtaatggcagctactcgaggactgggtgctgcaaatgactcacttaacaccatgaaaggaaccaaggacaatgttcgcacccatgttagtaatgatccttcttccagctttggaagtttctcatctttacaggaccgaaatgcactgtccaaacacatttcaaatagtgatgttgatgcttcacttacaagtagtggacagccccaaagggaaggttttggaatcattgatgatgattggattgcaaacactattgcaaaagctgctgctgcagcagcttccaaagaggcaggttctttggaagctaccatgacaaaggaacagaagctgaaagctgataggcttcgccgtgcgaagatgtttgctgcaatcattaagagtggagacaacaagatgaatgatttagctgcagcatcgaacccaactagtgaagctgccaaggccattcctgatatgaatgcctctggacttgatctgcaatctgtggctaaggaacgtgaaggtagtagctctgttctgtttgaccatgaggggccaaacttgacaaaacatagtaaagactctgatgatgaacagaacagagtgcggaagtatagaaagaaacaccaagaatccgacgaggaaaaagatgaatctgaggatagctataagcactcaaggaagaagcatcgcccagagcattcaagagaccagagcaaggatgttcacaaacataagaacaagagtcactccaaggacagggaatccagacatcatagacaccattgtagctcttcggaagatgagcatgagcatgaacgttggagttccaaatcaaggcataggcatagagatgatcaccgctactctgacgaggaacactctgatgaggaacacaggaggtcacacaagcatcggagggagcatcactccagttctaaaaggaagcacgaggaagactgataccaggttcgccggaagtgtctgtctagatcaggtgccaagtttgaatcagacaagctgtctgatgacactgcacaaatcaactcagggaacaactgaagcgccgagtaaactgagagcaaaaatcagagcaacatactgtaatattttgtatcacagcagtaacattatgtccttaggcctctgttttgtagccaattgctctttcgatttctgtatttgtttcgaacgttctaactaggtgtctgtccatcttatttgaaatcagtgacctgctcgccaagttctaactacatgctggcgtttctgatgcatgcatagctttattatttcaagtggtctacatgtagcgtcatactccgtcccaaaattcgttttagttaactaatggttgatatgtgttttaagtatgtgtctagattcattttcatgtatttgaatatagatataaaaattaatagctaatcaatggctaaaacgat

SEQ ID NO: 74243 - DNA, 1404 bp, Zea Mays
ggtaaacctaacgaaattgaaccgatacccctccctccggctcaaaatccaaacaaatcggctcgcaattctccccgtcccttccccctctcatcgctcgccgctcgctcctctccctgtccacgccgccgtctgtcgaatcgaaatccctctccgccatgccgaagggcgccaagaagcgcgccaaactcaagaagcagcagcagcagggtcaccccgacgatggcggcaacacaaacgccagcagcggcaatggtaacggcagcgataacaacaacaacgcctcgagcggccgcgacggcgacccccacctgtgcatcccaccaaaagtttctcgcgtcgatgcgagcgaggactccatggagagctccgaagagatggtgacccccagggccgccgcgtcggagccggacgaggaggagaggaaggcccccgcggccgaggttcccgtggagcgtgccgtcgaggcggacgtcgccgggtctggggaggtcattgtggacgcgtttccaccggaaaccgctgggcatgtacgtgagggcgaggtggatgaagcagaggtggaggtgcacgccgtggtggcacaggaaccggaggtaaaggatgtgttggtggccgaggaatccgtggtacaggagtcagtggctgatgcgccggcggtgaaggaggtggccaaggtgcatccggtgcttgaacctaagctgaaggttgatgaagttgtggtggtcgagcaaacgcctgtagcaccagatgtgaagggcgccggggctactgttgtgttgaaaacaccagagctgattaggagaaatgtggttgtcaaggaccctgctgaggtgtcgagatctcaggacgctgctgatgtgcatactacagaggtggcccgtggacctgcagtggcagtggttgcttcagggcagcgggcaacatggtggaattgctgtggcctttttgatgcttttactggttcagggagatagatgaagaacttgaagtcaagaagacagaaaatgcggtgacgttcagttcaaagctgatgagcagctgtaactagactttgtcacatgaatgatgaagcagaaggattccggataacatcgagctgatgttttcacttccttcctccctgtgtctctgcatctgtgcaaagttacatcccctggtcgcggttaatattcttaatttccttagcacccccaacgcctagtcgtgtcgtctaggtactggtcttgtagcatagtaagtgttgaagtgggtcgaccgtaaagaatgttttggtgtttctgcttttttttttatacttattttttcttgtcacttgtaaggagtatatttattcaaacaagttgagatggttcttcgaaaagcttcactccgagattgctgactgtcagccaggttgatcat

SEQ ID NO: 74244 - DNA, 1561 bp, Zea Mays
gcttctcagtgacgtcgcccgctgctgcagtttggtcccatgttgaccggtgggcccagtctccggtgcctttggtcccatgttgacctcaccatcgccctccggtctcgcggcctggtgggcctcggcctctccgactctgggttcattcgcctgcactgcaacccatctcggaaccctccctcgcctccctcgcgttcagtttgatccaggacgaagggaacggtgagccgccatggtgaaggacagcgcgtactacgacgtcctggagatcagcactgacgcctccatggccgagatcaagaaggcctattacctcaaggccaagctggtgcacccggacaagaatccgagcaatcctgatgctgcgcgcaagtttcaggcgaagcctatcaggtcctaagtgatccactgaaaaaggagtcttacgataagtatggaaaggaaggacttccacaagataatatgattgatccaactgctgtctttggaatgctttttgggagcgactattttgaagattatgttggccaacttgcgctagcatctgttgcctctgtagagattgaggaagaatcaaacacacctgaggcaaggacaaggattcaagagaagataaaggacgtgcaaaccgaaagagagcaaatacttactcaaagtctaagggatcggctgcaaccatatgttgatgggaagcaagatgagtttggtgattgggcaagtgcagaagctcagcgtttgtctcaagctgcttttggtgaggctatgcttcacacgattggctacatctatgttcggcaagcagcacgagaacttggaaaaagcaaactgtatatgggtgtaccttttattgctgagtgggtaagggacaagggccaccacgtaaaatcacaggttaatgctgccgcaggtgcaatttctctgatacagctacaagaagggataaaaaagattgaagagggtgacaaggaagagcagcttattaagagtatcgaagagaaaaaagatgcaatgctgaattctttatggaaaattaatgtggtcgatattgagtcaacgctttcacgggtctgccaagcagttttaagagaaaatgatattcccagagacgtactcaagttgcgagcaagaggactgaaaaagctagggacgatatttcaaggcgcaaaatcaaactaccgtcgtgaaaacagcctgcgtgttgaagatgacgcggcagaagccacaccgtcgcactgaggatggtggacaaatctggatatgatgtcatatactgcgtcaccggctcaccgagactgagcccgaaagccgaccactgtggaaggagacaaacgatgctgtttttccaaagatttttgtacggtataagcgcaaggtattgctaccatgccatactttatcgctgtccgcactgcatatagttctgttggacgaaaaatgtaatatttgaagtcaaaatgtgatgcgtaatgatttaagcgcatgatcataggctttgaatgtcatttgcgatcggactcagatccttggtggatctttaaaaaaaacgagaataagttct

SEQ ID NO: 74245 - DNA, 1539 bp, Zea Mays
agcgggcagcggcccagctcatcaccccagttcagttgtcgccgtcacggtcttcgtgcacctcccgtccatacccataaataaacgtgtgcccacacatctgctcacacaaccgcaccacagtactctctccagtgtccacagaaacagaattccgctccctccccgtgtcctcctcccgcgcccgcgcatcgtgaggtggagttcccaccccgaggccgcaatggcgacggtggaggtggtggtggccaacggcttgggtggcgccgacaccaagaccgtgtttaaggaaacatacagcaagctcaaggaggagatgctagacgaccccgccttcgagttcaccgacgagtcgctacagtggatcgaccgcatgttggactacaatgtgctcggaggaaagtgcaatcgcgggctctctgtcattgatagctacaggatattgaagggtgttgatgttctgagcaaggaggagacatttcttgcttgcacccttggctggtgcattgaatggcttcaagcttattttcttgtgcttgatgatattatggacaactcccagacacggcgtggccaaccttgctggtttagagtgccacaggttggcctcattgctgtaaatgatgggattatccttcgcaatcatatttcacgaatccttcaacgccacttcaaggggaagccatattatgttgatgtaattgacctattcaatgaggttgagttcaagacagcttcagggcaaatgttggatcttatcactacccacgagggtgaaaaggatctaactaaatataacttgacagttcgccgccacatcgttcagtacaagacagcttattattcattttaccttcctgttgcatgtgcattgctgctggctggtgagaacttggataactttggcgatgtaaagaacattcttgtcgaaatgggaacatactttcaagttcaggatgattatttagattgtttcggtgatcctgaattcattggcaagatcggaactgacattgaagactacaagtgttcctggctagtcgtgcaagctcttgaacacgctgatgagaagcaaaagaacattctgtttgaaagttatggaaagtctgatccagcgtgtgttgcaaaggtgaaggacttgtacaaagagcttaaactggaggcgtacgagagggagagttacaacaagctgattgccgacatcgaggcccagcccagcaaggcagtccagagtgttttgaagtccttccttcacaagatctacaagagggacaagtaaaaacccagatcgtgaagaagctgctccgtcgacgcttgcatcaaattagtagacttgattgatgcagatgagtaatttgtactatgttgtttcatgttttcattctcctgttgcgtgtactcctgaattataataaaacagagtgctattagggttacgtaaccagcttgtgcgaatgctctacaaacgacagtgctgactgctgagtgttgttagagcaacttcagcgctatatcataaaggattttaagggttttctc

SEQ ID NO: 74246 - DNA, 2302 bp, Zea Mays
atggcgcccgtaaagatgttaatccgcccagttggagcccgacagagcgggcgagtagtcgccggatcccgtgctggtgctgagcacgaccacgacccagtcgccctcgctcgcgatcccggcgccggagaactggctgtcgttgaggaaccggttgtactgcgacttggtgtagttagcgaggacgacgacggggacgaggcccagcacgcacgccggcatcacctggccgtcctcggtcaccgacgcgttgaggtggcagcggtccagggctcaacctataaaccagcaaaaagaggagctccacatcggacagcatccaggtcccaccgttcagtggacgtaagaaagacacccggatcctgcgctctccttaccctctccacttccgtttccggatcccgtttccagctccgatccaacccagcatctgtaccgcgccgcgcgagcacgtccggcgccggtgcggcaggcgaaatccgagagcactcctcccccgctacgccgcaccgcccatggccgcagctagccgcagatagagagaggcgcaggcgagggcgtgcagatccagatccggtgggcgggaaggacttgatcgcccccaccaccatggccggcgcggtgtcggcgctcttcctgctggacatgaagggccgcgttctcgtctggcgcgactaccgcggcgatgtctccgcgctccaggccgagcgcttcttcaccaagctcctcgacaaggagggcgattcggaagtgcactcgcctgtggtctacgacgacgctggcgtcacttacatgttcatccagcacaacaatgtcttcctcctcaccgccgctcgccagaactgtaacgcggccagcatcctcctcttcctccaccgtgtaatagatgtgtttaagcactacttcgaggagctggaggaagagtcgctcagagataacttcgtcgttgtgtatgagttgctcgatgagatgatggattttgggtacccacaatacacggaggcgaagatattgagtgagttcatcaagacagatgcatacaggatggaggtcacacagcgtccacccatggccgtgacaaatgctgtgtcatggaggagcgaggggatccggtacaagaagaatgaagtcttcttggatgtagtggagagtgttaacattctagttaacagcaatggccagattgtgagatcagatgtggttggggcactgaagatgcgaacatatttgagtggaatgccggagtgcaaacttggcttgaatgatagggttcttttggaggctcaaggcagagcaactaaaggcaaagcgatagacctcgatgatatcaaatttcatcagtgtgtacgtttggctagatttgagaatgatagaactatatcgttcatacctcctgatggatcttttgatctaatgacatacaggcttagcactcaggtaaaacctcttatctgggtcgaagcacagattgagaaacattctagaagccgtatagaactcatggtgaaggcaaggagtcagtttaaagaaagaagatgccacaaacccaaatataagaacttcaatggggtctgctgcatatgctcctgagagagatgcaatggtttggaaaataaaatcattccctggtggcaaggaatacatgtgcagagcagaatttagtcttcctagcataacagcggaagaaggggccccagaaaagaaggcgccgatacgggtgaaatttgagataccatatttcaccgtatcaggtattcaggtccgttatctgaagataattgaaaagagtggttatcaggcactcccctgggttagatatatcacaatggctggtgaatatgagctgagacttatatgagttctctcttctctggctgccggacgacttttgaagctgcaggacactaaagatacatatttgctatcgacacagcgaacagttttcatttggatgttggcctggaagtcttctgccgaccatacccctccccgtggtggggcttgctgttcatcttgttaggctcaccttaccctggttattgtaagttaccaatcaagtacagttttggaggaaaggatattcagttttcagttcacttgtattgttattgatttattttgtgggtaccaaactagatttgtttcgttctgtattacacggaaaacatgggctgatttgagttcaacaaaacattgccacatctggcgatgattctggggtgcgggttgaaacaaatttgcccttttttttactgtaaatgtcgtgaacaattccctttcagttccatcacgttcaaaattg

SEQ ID NO: 74247 - DNA, 2296 bp, Zea Mays
atggcgcccgtaaagatgttaatccgcccagttggagcccgacagagcgggcgagtagtcgccggatcccgtgctggtgctgagcacgaccacgacccagtcgccctcgctcgcgatcccggcgccggagaactggctgtcgttgaggaaccggttgtactgcgacttggtgtagttagcgaggacgacgacggggacgaggcccagcacgcacgccggcatcacctggccgtcctcggtcaccgacgcgttgaggtggcagcggtccagggctcaacctataaaccagcaaaaagaggagctccacatcggacagcatccaggtcccaccgttcagtggacgtaagaaagacacccggatcctgcgctctccttaccctctccacttccgtttccggatcccgtttccagctccgatccaacccagcatctgtaccgcgccgcgcgagcacgtccggcgccgctagccgcagatagagagaggcgcaggcgagggcgtgcagatccagatccggtgggcgggaaggacttgatcgcccccaccaccatggccggcgcggtgtcggcgctcttcctgctggacatgaagggccgcgttctcgtctggcgcgactaccgcggcgatgtctccgcgctccaggccgagcgcttcttcaccaagctcctcgacaaggagggcgattcggaagtgcactcgcctgtggtctacgacgacgctggcgtcacttacatgttcatccagcacaacaatgtcttcctcctcaccgccgctcgccagaactgtaacgcggccagcatcctcctcttcctccaccgtgtaatagatgtgtttaagcactacttcgaggagctggaggaagagtcgctcagagataacttcgtcgttgtgtatgagttgctcgatgagatgatggattttgggtacccacaatacacggaggcgaagatattgagtgagttcatcaagacagatgcatacaggatggaggtcacacagcgtccacccatggccgtgacaaatgctgtgtcatggaggagcgaggggatccggtacaagaagaatgaagtcttcttggatgtagtggagagtgttaacattctagttaacagcaatggccagattgtgagatcagatgtggttggggcactgaagatgcgaacatatttgagtggaatgccggagtgcaaacttggcttgaatgatagggttcttttggaggctcaaggcagagcaactaaaggcaaagcgatagacctcgatgatatcaaatttcatcagtgtgtacgtttggctagatttgagaatgatagaactatatcgttcatacctcctgatggatcttttgatctaatgacatacaggcttagcactcaggtaaaacctcttatctgggtcgaagcacagattgagaaacattctagaagccgtatagaactcatggtgaaggcaaggagtcagtttaaagaaagaagcacagcaacgaatgttgaaattgaagtgcctgttccttcagatgccacaaacccaaatataagaacttcaatggggtctgctgcatatgctcctgagagagatgcaatggtttggaaaataaaatcattccctggtggcaagcaacctatcctataggaatacatgtgcagagcagaatttagtcttcctagcataacagcggaagaaggggccccagaaaagaaggcgccgatacgggtgaaatttgagataccatatttcaccgtatcaggtattcaggtccgttatctgaagataattgaaaagagtggttatcaggcactcccctgggttagatatatcacaatggctggtgaatatgagctgagacttatatgagttctctcttctctggctgccggacgacttttgaagctgcaggacactaaagatacatatttgctatcgacacagcgaacagttttcatttggatgttggcctggaagtcttctgccgaccatacccctccccgtggtggggcttgctgttcatcttgttaggctcaccttaccctggttattgtaagttaccaatcaagtacagttttggaggaaaggatattcagttttcagttcacttgtattgttattgatttattttgtgggtaccaaactagatttgtttcgttctgtattacacggaaaacatgggctgatttgagttcaacaaaacattgccacatctggcgatgattctggggtgcgggttgaaacaaatttgcccttttttttactgtaaatgtcgtgaacaattccctttcagttccatcacgttcaaaattg

SEQ ID NO: 74248 - DNA, 1729 bp, Zea Mays
atggcgcccgtaaagatgttaatccgcccagttggagcccgacagagcgggcgagtagtcgccggatcccgtgctggtgctgagcacgaccacgacccagtcgccctcgctcgcgatcccggcgccggagaactggctgtcgttgaggaaccggttgtactgcgacttggtgtagttagcgaggacgacgacggggacgaggcccagcacgcacgccggcatcacctggccgtcctcggtcaccgacgcgttgaggtggcagcggtccagggctcaacctataaaccagcaaaaagaggagctccacatcggacagcatccaggtcccaccgttcagtggacgtaagaaagacacccggatcctgcgctctccttaccctctccacttccgtttccggatcccgtttccagctccgatccaacccagcatctgtaccgcgccgcgcgagcacgtccggcgccggtgcggcaggcgaaatccgagagcgaggggatccggtacaagaagaatgaagtcttcttggatgtagtggagagtgttaacattctagttaacagcaatggccagattgtgagatcagatgtggttggggcactgaagatgcgaacatatttgagtggaatgccggagtgcaaacttggcttgaatgatagggttcttttggaggctcaaggcagagcaactaaaggcaaagcgatagacctcgatgatatcaaatttcatcagtgtgtacgtttggctagatttgagaatgatagaactatatcgttcatacctcctgatggatcttttgatctaatgacatacaggcttagcactcaggtaaaacctcttatctgggtcgaagcacagattgagaaacattctagaagccgtatagaactcatggtgaaggcaaggagtcagtttaaagaaagaagcacagcaacgaatgttgaaattgaagtgcctgttccttcagatgccacaaacccaaatataagaacttcaatggggtctgctgcatatgctcctgagagagatgcaatggtttggaaaataaaatcattccctggtggcaaggaatacatgtgcagagcagaatttagtcttcctagcataacagcggaagaaggggccccagaaaagaaggcgccgatacgggtgaaatttgagataccatatttcaccgtatcaggtattcaggtccgttatctgaagataattgaaaagagtggttatcaggcactcccctgggttagatatatcacaatggctggtgaatatgagctgagacttatatgagttctctcttctctggctgccggacgacttttgaagctgcaggacactaaagatacatatttgctatcgacacagcgaacagttttcatttggatgttggcctggaagtcttctgccgaccatacccctccccgtggtggggcttgctgttcatcttgttaggctcaccttaccctggttattgtaagttaccaatcaagtacagttttggaggaaaggatattcagttttcagttcacttgtattgttattgatttattttgtgggtaccaaactagatttgtttcgttctgtattacacggaaaacatgggctgatttgagttcaacaaaacattgccacatctggcgatgattctggggtgcgggttgaaacaaatttgcccttttttttactgtaaatgtcgtgaacaattccctttcagttccatcacgttcaaaattg

SEQ ID NO: 74249 - DNA, 4187 bp, Zea Mays
aatttttatagatgtcatacatggttttacaagaatcgattttgtttttacagaaaataggacattttaccatgtagcaaagggagatttattacatggccggcgtcaacgcaaacgcaatttacgcaaatatgcaatcacgcaagccgtgtttgcaccgaagggtcacgtcccacaagccgagcgcctcgaacccgtcgtcgaaggccaccggtcaaggtcaatccaccaccatgccagcgggcagcggcccaaccgacaacgcgcaagcgaagcggcgaggaaggccgatcctcccgctgccctgcatcgcccgcacggattccaccccttccaaccaaaaagcgatacaattgcttccttcggcaaaaagtctcctcctgcttccttccccctgttctgttccccttggcagcaggcggcagcggcagcctgcgccctcccgcgtgcgtgagagcccgaatctttccatattccaatccaccgccgcagcgacaaaagggagtcccccctccccgcctaggtggaggttggcaggtatttggtgtcgcgcccggtttggatttggctggattcgaatcaggccggaagacacaggtccgtgccgcgcggcgggggcggagatgcacaagagcaaggggaaattctccggcgtcctgcacaagggcttcaagcctgacaagtgacgtcgctgcggatggcggtggcccggatcaagctgctgcggaatcgcaaggaggtgcaggtacgccagatgcgtcgcgaggtcgcgcagctgctcgaggccaaccaggacatgaccgcgcgcatcagggttgaacatgtcataagggaagaaaagttcatgcaagcatatgacttgattgaagtatactgtgaacttatagtagcacgtctgtccattattgactcacagaagacttgcccgattgatctgaaggaggcagtagccagtgttatatttgcatcaatgcggtgttcagatgtcacagaactagcagatgttcggaagcatttcaaaagcaagtacggaaaagagtttgaagcagcagcccttgaagtgcgacctgacagtggtgtaaatcgtctgataattgagaagctgtcagcaggagcacctgatgtgcagactaaaatcaaaacattgagctcgatagcagaggagcacaacatcaaatgggagccaaaagcgtttgaggagaaactgcaacaaccaactgaaggtcatctgtatggttctgcaacatattctggaggaaatacttcaactatgggatcatctacttctagcatatcaacaccacagcctacatattcaggtgttagtgcggcacctgtggactcagccactatccatgtgccagcaaataaaactgcatatggcagtgccaattctaatactttttcgaaagaaagcattcataatagttccagtgcatcagtacctcctatctcccaacatgggccgtctgcttactcttcagcacaggttcctggttctaacaatatctcacatggaaatccaggaggtccaccttaccctcaatacagcgcaacagtcccagacgcagtatccaggaatgaagatagcaatcagaatagggaaagaaaacctttggtgactggtgccaattggaatgtggaattcaaggatgcaacatctgctgctcaggcagcagcagagtctgcagagatggctagcattgctgctagagctgctgctgaacttgctagtcgtggaaactattctggagataaaggcactggagcctatgattcagccgcatacagtagcaaaaacacagtgaggaagcaacgggcggaacatgtagtgaaggatgagagtttccatgaccagagttcaggtgttaatgatccaagcgagatgccaagtaactcaagaaatttttttggaggaacagaaacatcccatgttgatagtgagaatatatcgacagccccatatcaacagttccatgcctacaatccagacagccatccatatgtttatgaaatgccaactgaaccacctcgtgctcattcacctgacccacgttttgatgatttatatgagagggaaagtgacattggaagatctgaagttgatccgtttgattttcctagagaaaacttccaagatactgcatctgttgggcacaatttcaaggatgtggaaatcaggacacctagctacgatcaagaaagcacagatgactactatggtaattttaattcttcacatgatacattggcccatggcagcagcaccactgcttgggataagcaaaacgacaaagctcaagacaactcttcacctgttgtttttgatcaatatgattctgatgttgaacaagagaatttgttggacacattctcctcaaagcatactgaacaactacctgctcccggagatcatatgagattctcaactgcagattggagtgaacagcataccagtgaatctccatccaagcagagaacgtcagccctattttccagaacagaaacacaactatctgataatttaggaacaaacaaaagtgatattccttcacctcattcttatcataacatgcgtcctgcttttgattcagatggtggtagctctgatgaggaaatagccacaaccacgcatgcagtgcctttaaggtcacattcaggaggatctgcttcgtctgtcctgaacaaaggtggtggacctgatgcttcacccatatttgattattcaggagcacatgcagtgaggaacttgaaccgtgtgcaaagcagagattctgatctttcggaagaagagacagatttagataaatttaaaggttcatccttcgccagagcaaatgagcagcagctgttgccttctgccatacgtacttcagcaacttctgatgataaggaagatgacatcagcctgaactttggtaagttaacgcctggactaagaaacaaacccaggcaacccccaccatacaccaaagtttccagggagagcattctgcctaagcagtccttgcctaaggtttctgctggcactgaagagtcagtcgattctgaagagaatactacattcaaacaggatagaagtagtccccaaagctcattttcagccaggacttcttcaggtaaagactacgacagtggactttatgaaaggaaccgaagtgttggaacacactgggaagcaaaatcaaccatagcaagaaattcctctggtttagatgatgctgagaagttatctgatctacctactaatataagtcttccaacaactaagagttctgaacgctggaattcgagtaaagtgccttatcatgaaaaaccaggtattggaacacgccgagaagtgagatcaacactggctagaaattattttgattcagatgacagtgaagaagaactagagcaacagcagattcctcagtcgaagcaatctggagtgctgatacagtcacgcaggacacgggaggtgacatcagacacaaagagagatggtcgtttccaaaccggagctcagtatggtgatgaaactgagagtgtgacaagtaagacacaagtccatcaaggattcaacagctcaagtactgaacggagtgaaaggagggatccaagtgtgtaccccagggttgcagtacagcgctcttcgtctaaagctgagcagattgaatctccgatggagagagggaagccacaaggagctgaaatgagaagcaccttatttcgaggaaatgaagaggacacagaaacctcatctggaactccaaaagaaagcacccccaaaacaccccctgcacatgttcatcccaagcttccaacagactatgattctttcgccgcacattttaggtctcttcgaacaaaccggccttaggtttacacgacatatagagtttggagtttcagttgaattaagtcatatatacgatactatgatacgttttatggaggttgagttgagatttgtacattatagcaacactgttttctggacactatcgtgctgtgctagtttgggcgtacaattcttttgttctcttgtatcctcatatactcaatagaatcatattgtaaagactttaatttcctgttagtgattattaataagcacggcatgttggcatatgtatagaacatgcggggttctttcattccattgtaacgggatctgctacactcatgctatgagattgttt

SEQ ID NO: 74250 - DNA, 4021 bp, Zea Mays
aatttttatagatgtcatacatggttttacaagaatcgattttgtttttacagaaaataggacattttaccatgtagcaaagggagatttattacatggccggcgtcaacgcaaacgcaatttacgcaaatatgcaatcacgcaagccgtgtttgcaccgaagggtcacgtcccacaagccgagcgcctcgaacccgtcgtcgaaggccaccggtcaaggtcaatccaccaccatgccagcgggcagcggcccaaccgacaacgcgcaagcgaagcggcgaggaaggccgatcctcccgctgccctgcatcgcccgcacggattccaccccttccaaccaaaaagcgatacaattgcttccttcggcaaaaagtctcctcctgcttccttccccctgttctgttccccttggcagcaggcggcagcggcagcctgcgccctcccgcgtgcgtgagagcccgaatctttccatattccaatccaccgccgcagcgacaaaagggagtcccccctccccgcctaggtggaggttggcaggtatttggtgtcgcgcccggtttggatttggctggattcgaatcaggccggaagacacaggtccgtgccgcgcggcgggggcggagatgcacaagagcaaggggaaattctccggcgtcctgcacaagggcttcaagcctgacaagtgcaagacgtcgctgcggatggcggtggcccggatcaagctgctgcggaatcgcaaggaggtgcaggtacgccagatgcgtcgcgaggtcgcgcagctgctcgaggccaaccaggacatgaccgcgcgcatcagggttgaacatgtcataagggaagaaaagttcatgcaagcatatgacttgattgaagtatactgtgaacttatagtagcacgtctgtccattattgactcacagaagacttgcccgattgatctgaaggaggcagtagccagtgttatatttgcatcaatgcggtgttcagatgtcacagaactagcagatgttcggaagcatttcaaaagcaagtacggaaaagagtttgaagcagcagcccttgaagtgcgacctgacagtggtgtaaatcgtctgataattgagaagctgtcagcaggagcacctgatgtgcagactaaaatcaaaacattgagctcgatagcagaggagcacaacatcaaatgggagccaaaagcgtttgaggagaaactgcaacaaccaactgaaggtcatctgtatggttctgcaacatattctggaggaaatacttcaactatgggatcatctacttctagcatatcaacaccacagcctacatattcaggttcctggttctaacaatatctcacatggaaatccaggaggtccaccttaccctcaatacagcgcaacagtcccagacgcagtatccaggaatgaagatagcaatcagaatagggaaagaaaacctttggtgactggtgccaattggaatgtggaattcaaggatgcaacatctgctgctcaggcagcagcagagtctgcagagatggctagcattgctgctagagctgctgctgaacttgctagtcgtggaaactattctggagataaaggcactggagcctatgattcagccgcatacagtagcaaaaacacagtgaggaagcaacgggcggaacatgtagtgaaggatgagagtttccatgaccagagttcaggtgttaatgatccaagcgagatgccaagtaactcaagaaatttttttggaggaacagaaacatcccatgttgatagtgagaatatatcgacagccccatatcaacagttccatgcctacaatccagacagccatccatatgtttatgaaatgccaactgaaccacctcgtgctcattcacctgacccacgttttgatgatttatatgagagggaaagtgacattggaagatctgaagttgatccgtttgattttcctagagaaaacttccaagatactgcatctgttgggcacaatttcaaggatgtggaaatcaggacacctagctacgatcaagaaagcacagatgactactatggtaattttaattcttcacatgatacattggcccatggcagcagcaccactgcttgggataagcaaaacgacaaagctcaagacaactcttcacctgttgtttttgatcaatatgattctgatgttgaacaagagaatttgttggacacattctcctcaaagcatactgaacaactacctgctcccggagatcatatgagattctcaactgcagattggagtgaacagcataccagtgaatctccatccaagcagagaacgtcagccctattttccagaacagaaacacaactatctgataatttaggaacaaacaaaagtgatattccttcacctcattcttatcataacatgcgtcctgcttttgattcagatggtggtagctctgatgaggaaatagccacaaccacgcatgcagtgcctttaaggtcacattcaggaggatctgcttcgtctgtcctgaacaaaggtggtggacctgatgcttcacccatatttgattattcaggagcacatgcagtgaggaacttgaaccgtgtgcaaagcagagattctgatctttcggaagaagagacagatttagataaatttaaaggttcatccttcgccagagcaaatgagcagcagctgttgccttctgccatacgtacttcagcaacttctgatgataaggaagatgacatcagcctgaactttggtaagttaacgcctggactaagaaacaaacccaggcaacccccaccatacaccaaagtttccagggagagcattctgcctaagcagtccttgcctaaggtttctgctggcactgaagagtcagtcgattctgaagagaatactacattcaaacaggatagaagtagtccccaaagctcattttcagccaggacttcttcaggtaaagactacgacagtggactttatgaaaggaaccgaagtgttggaacacactgggaagcaaaatcaaccatagcaagaaattcctctggtttagatgatgctgagaagttatctgatctacctactaatataagtcttccaacaactaagagttctgaacgctggaattcgagtaaagtgccttatcatgaaaaaccaggtattggaacacgccgagaagtgagatcaacactggctagaaattattttgattcagatgacagtgaagaagaactagagcaacagcagattcctcagtcgaagcaatctggagtgctgatacagtcacgcaggacacgggaggtgacatcagacacaaagagagatggtcgtttccaaaccggagctcagtatggtgatgaaactgagagtgtgacaagtaagacacaagtccatcaaggattcaacagctcaagtactgaacggagtgaaaggagggatccaagtgtgtaccccagggttgcagtacagcgctcttcgtctaaagctgagcagattgaatctccgatggagagagggaagccacaaggagctgaaatgagaagcaccttatttcgaggaaatgaagaggacacagaaacctcatctggaactccaaaagaaagcacccccaaaacaccccctgcacatgttcatcccaagcttccaacagactatgattctttcgccgcacattttaggtctcttcgaacaaaccggccttaggtttacacgacatatagagtttggagtttcagttgaattaagtcatatatacgatactatgatacgttttatggaggttgagttgagatttgtacattatagcaacactgttttctggacactatcgtgctgtgctagtttgggcgtacaattcttttgttctcttgtatcctcatatactcaatagaatcatattgtaaagactttaatttcctgttagtgattattaataagcacggcatgttggcatatgtatagaacatgcggggttctttcattccattgtaacgggatctgctacactcatgctatgagattgttt

SEQ ID NO: 74251 - DNA, 3340 bp, Zea Mays
atggcgtcgtaggctcatggcggattggaagagggcaggaggcatcgtcgcactagtgtggaggcactgaggacttgcccgattgatctgaaggaggcagtagccagtgttatatttgcatcaatgcggtgttcagatgtcacagaactagcagatgttcggaagcatttcaaaagcaagtacggaaaagagtttgaagcagcagcccttgaagtgcgacctgacagtggtgtaaatcgtctgataattgagaagctgtcagcaggagcacctgatgtgcagactaaaatcaaaacattgagctcgatagcagaggagcacaacatcaaatgggagccaaaagcgtttgaggagaaactgcaacaaccaactgaaggtcatctgtatggttctgcaacatattctggaggaaatacttcaactatgggatcatctacttctagcatatcaacaccacagcctacatattcaggtgttagtgcggcacctgtggactcagccactatccatgtgccagcaaataaaactgcatatggcagtgccaattctaatactttttcgaaagaaagcattcataatagttccagtgcatcagtacctcctatctcccaacatgggccgtctgcttactcttcagcacaggttcctggttctaacaatatctcacatggaaatccaggaggtccaccttaccctcaatacagcgcaacagtcccagacgcagtatccaggaatgaagatagcaatcagaatagggaaagaaaacctttggtgactggtgccaattggaatgtggaattcaaggatgcaacatctgctgctcaggcagcagcagagtctgcagagatggctagcattgctgctagagctgctgctgaacttgctagtcgtggaaactattctggagataaaggcactggagcctatgattcagccgcatacagtagcaaaaacacagtgaggaagcaacgggcggaacatgtagtgaaggatgagagtttccatgaccagagttcaggtgttaatgatccaagcgagatgccaagtaactcaagaaatttttttggaggaacagaaacatcccatgttgatagtgagaatatatcgacagccccatatcaacagttccatgcctacaatccagacagccatccatatgtttatgaaatgccaactgaaccacctcgtgctcattcacctgacccacgttttgatgatttatatgagagggaaagtgacattggaagatctgaagttgatccgtttgattttcctagagaaaacttccaagatactgcatctgttgggcacaatttcaaggatgtggaaatcaggacacctagctacgatcaagaaagcacagatgactactatggtaattttaattcttcacatgatacattggcccatggcagcagcaccactgcttgggataagcaaaacgacaaagctcaagacaactcttcacctgttgtttttgatcaatatgattctgatgttgaacaagagaatttgttggacacattctcctcaaagcatactgaacaactacctgctcccggagatcatatgagattctcaactgcagattggagtgaacagcataccagtgaatctccatccaagcagagaacgtcagccctattttccagaacagaaacacaactatctgataatttaggaacaaacaaaagtgatattccttcacctcattcttatcataacatgcgtcctgcttttgattcagatggtggtagctctgatgaggaaatagccacaaccacgcatgcagtgcctttaaggtcacattcaggaggatctgcttcgtctgtcctgaacaaaggtggtggacctgatgcttcacccatatttgattattcaggagcacatgcagtgaggaacttgaaccgtgtgcaaagcagagattctgatctttcggaagaagagacagatttagataaatttaaaggttcatccttcgccagagcaaatgagcagcagctgttgccttctgccatacgtacttcagcaacttctgatgataaggaagatgacatcagcctgaactttggtaagttaacgcctggactaagaaacaaacccaggcaacccccaccatacaccaaagtttccagggagagcattctgcctaagcagtccttgcctaaggtttctgctggcactgaagagtcagtcgattctgaagagaatactacattcaaacaggatagaagtagtccccaaagctcattttcagccaggacttcttcaggtaaagactacgacagtggactttatgaaaggaaccgaagtgttggaacacactgggaagcaaaatcaaccatagcaagaaattcctctggtttagatgatgctgagaagttatctgatctacctactaatataagtcttccaacaactaagagttctgaacgctggaattcgagtaaagtgccttatcatgaaaaaccaggtattggaacacgccgagaagtgagatcaacactggctagaaattattttgattcagatgacagtgaagaagaactagagcaacagcagattcctcagtcgaagcaatctggagtgctgatacagtcacgcaggacacgggaggtgacatcagacacaaagagagatggtcgtttccaaaccggagctcagtatggtgatgaaactgagagtgtgacaagtaagacacaagtccatcaaggattcaacagctcaagtactgaacggagtgaaaggagggatccaagtgtgtaccccagggttgcagtacagcgctcttcgtctaaagctgagcagattgaatctccgatggagagagggaagccacaaggagctgaaatgagaagcaccttatttcgaggaaatgaagaggacacagaaacctcatctggaactccaaaagaaagcacccccaaaacaccccctgcacatgttcatcccaagcttccaacagactatgattctttcgccgcacattttaggtctcttcgaacaaaccggccttaggtttacacgacatatagagtttggagtttcagttgaattaagtcatatatacgatactatgatacgttttatggaggttgagttgagatttgtacattatagcaacactgttttctggacactatcgtgctgtgctagtttgggcgtacaattcttttgttctcttgtatcctcatatactcaatagaatcatattgtaaagactttaatttcctgttagtgattattaataagcacggcatgttggcatatgtatagaacatgcggggttctttcattccattgtaacgggatctgctacactcatgctatgagattgttt

SEQ ID NO: 74252 - DNA, 3349 bp, Zea Mays
ggcagccaggggaaggagtgctagaggcagagaccagaggggaagcagccaagtgggtggcagagcgttggaggctgaaggacttgcccgattgatctgaaggaggcagtagccagtgttatatttgcatcaatgcggtgttcagatgtcacagaactagcagatgttcggaagcatttcaaaagcaagtacggaaaagagtttgaagcagcagcccttgaagtgcgacctgacagtggtgtaaatcgtctgataattgagaagctgtcagcaggagcacctgatgtgcagactaaaatcaaaacattgagctcgatagcagaggagcacaacatcaaatgggagccaaaagcgtttgaggagaaactgcaacaaccaactgaaggtcatctgtatggttctgcaacatattctggaggaaatacttcaactatgggatcatctacttctagcatatcaacaccacagcctacatattcaggtgttagtgcggcacctgtggactcagccactatccatgtgccagcaaataaaactgcatatggcagtgccaattctaatactttttcgaaagaaagcattcataatagttccagtgcatcagtacctcctatctcccaacatgggccgtctgcttactcttcagcacaggttcctggttctaacaatatctcacatggaaatccaggaggtccaccttaccctcaatacagcgcaacagtcccagacgcagtatccaggaatgaagatagcaatcagaatagggaaagaaaacctttggtgactggtgccaattggaatgtggaattcaaggatgcaacatctgctgctcaggcagcagcagagtctgcagagatggctagcattgctgctagagctgctgctgaacttgctagtcgtggaaactattctggagataaaggcactggagcctatgattcagccgcatacagtagcaaaaacacagtgaggaagcaacgggcggaacatgtagtgaaggatgagagtttccatgaccagagttcaggtgttaatgatccaagcgagatgccaagtaactcaagaaatttttttggaggaacagaaacatcccatgttgatagtgagaatatatcgacagccccatatcaacagttccatgcctacaatccagacagccatccatatgtttatgaaatgccaactgaaccacctcgtgctcattcacctgacccacgttttgatgatttatatgagagggaaagtgacattggaagatctgaagttgatccgtttgattttcctagagaaaacttccaagatactgcatctgttgggcacaatttcaaggatgtggaaatcaggacacctagctacgatcaagaaagcacagatgactactatggtaattttaattcttcacatgatacattggcccatggcagcagcaccactgcttgggataagcaaaacgacaaagctcaagacaactcttcacctgttgtttttgatcaatatgattctgatgttgaacaagagaatttgttggacacattctcctcaaagcatactgaacaactacctgctcccggagatcatatgagattctcaactgcagattggagtgaacagcataccagtgaatctccatccaagcagagaacgtcagccctattttccagaacagaaacacaactatctgataatttaggaacaaacaaaagtgatattccttcacctcattcttatcataacatgcgtcctgcttttgattcagatggtggtagctctgatgaggaaatagccacaaccacgcatgcagtgcctttaaggtcacattcaggaggatctgcttcgtctgtcctgaacaaaggtggtggacctgatgcttcacccatatttgattattcaggagcacatgcagtgaggaacttgaaccgtgtgcaaagcagagattctgatctttcggaagaagagacagatttagataaatttaaaggttcatccttcgccagagcaaatgagcagcagctgttgccttctgccatacgtacttcagcaacttctgatgataaggaagatgacatcagcctgaactttggtaagttaacgcctggactaagaaacaaacccaggcaacccccaccatacaccaaagtttccagggagagcattctgcctaagcagtccttgcctaaggtttctgctggcactgaagagtcagtcgattctgaagagaatactacattcaaacaggatagaagtagtccccaaagctcattttcagccaggacttcttcaggtaaagactacgacagtggactttatgaaaggaaccgaagtgttggaacacactgggaagcaaaatcaaccatagcaagaaattcctctggtttagatgatgctgagaagttatctgatctacctactaatataagtcttccaacaactaagagttctgaacgctggaattcgagtaaagtgccttatcatgaaaaaccaggtattggaacacgccgagaagtgagatcaacactggctagaaattattttgattcagatgacagtgaagaagaactagagcaacagcagattcctcagtcgaagcaatctggagtgctgatacagtcacgcaggacacgggaggtgacatcagacacaaagagagatggtcgtttccaaaccggagctcagtatggtgatgaaactgagagtgtgacaagtaagacacaagtccatcaaggattcaacagctcaagtactgaacggagtgaaaggagggatccaagtgtgtaccccagggttgcagtacagcgctcttcgtctaaagctgagcagattgaatctccgatggagagagggaagccacaaggagctgaaatgagaagcaccttatttcgaggaaatgaagaggacacagaaacctcatctggaactccaaaagaaagcacccccaaaacaccccctgcacatgttcatcccaagcttccaacagactatgattctttcgccgcacattttaggtctcttcgaacaaaccggccttaggtttacacgacatatagagtttggagtttcagttgaattaagtcatatatacgatactatgatacgttttatggaggttgagttgagatttgtacattatagcaacactgttttctggacactatcgtgctgtgctagtttgggcgtacaattcttttgttctcttgtatcctcatatactcaatagaatcatattgtaaagactttaatttcctgttagtgattattaataagcacggcatgttggcatatgtatagaacatgcggggttctttcattccattgtaacgggatctgctacactcatgctatgagattgttt

SEQ ID NO: 74253 - DNA, 1542 bp, Zea Mays
ccctgctacgtggttggtacctctagcacaagtgcatatgaacatatacgtccagcaagaccagatagtagataggcctcccacgacagcaactcacctcccgggcctaccaagcagtctctagaaacaaacaaacagcggcaatgtgctaatctcttctgcatttgggcacggcaatcctgacccgaccctccagatttcccgtcgccgagccacgcggatcgagtacccgtcgaactcgccgctgtcggatcgagtacccgtcgaactcgccgctgtcggatcgttctcgcttggggcgatcaagctaacgggatttgaggagatctaggccagccgcgggcagcagccatcagccatgagcgaggtgttcgagggctacgagcggcagtactgcgaggcctccgcctcgctctcccgcaagtgcacggctgcatccgccctcgatggagagaggaagaagcagaagctctccgagatccagtccggcgttgaggaagctgaatcgctgattcggaagatggacctggaggcaaggagcctacagcctagcattaaggctggtttgcttgcaaagctgagggagtataaatctgacctcaacaacgtcaagagtgagctcaagaggatatctgcgcccaatgccaggcaggctacccgggaggagctcctggagtctggaatggctgatactctcgcggtgtctactgatcagaggggaagattgatgatgacaactgaaagactgaatcagtccactgacagaattaaagagagccgaagaactatgttggagacagaagaacttggtgtctcgattcttcaggaccttcaccaacagaggcagtcactactacatgctcatactactttgcacggagttgatgataacattggcaagagcaagaagatcctggctgcaatgtcaaagaggatggataggaacaagtggatcattgggggaatcatcacggctctcgctctggccatccttttcatactctacttcaagctcgctcattaagcttgcctgcagatgcttcctgaatgaatgagtggtactagactgataggtgggccttggcatctagtgtgtatgcgcagaaggtgcaggtctatcagtactgcagtaacttcagttacagagcttggttggcaactagcaagtgggatacgcgatgaggccggtgcatcctgtgcttgatccccatctaaattttggatggggtacatgggcatttagggcttgatgtgatgcatggtgaattgtcgatatagacaataatgaaccgcgactaggattgattaatttagcatagttagcgcagctcgcgagccgtctcgactcgactcgcttgaccaacgaccccaaaatacaggatcgacttaactcgttcgaggcttgcaagccgctccgagctcgagctggctcgagagcctaaaggttatgttccagctctaatcatagggacgagttgtgtaccgttggtgaatgagctactgtgataagtgttcactactgtggcaacacttaatcttgtg

SEQ ID NO: 74254 - DNA, 3481 bp, Zea Mays
caaccttcaccccaccccgcccaacaaaaaagcatatacgttaaataaaataaattagaaagctatctatccaggtggattagggtttttgcctcggctagcagtagtagctaatttggacgcaggagatacggagtagggcgaaccgcgaggagagcaagctatgggcgcgccgaagcagaagtggacgtcggaagaggaggatgcgctccgccgtggcgttcgcaagcacggcgccggcaaatggcggaccatccagaaggacccccagttcagcccgatcctctcctcccgctccaatatcgacctcaaggacaaatggaggaatttaagtttcagtgcaagtggactgggatcgagtaaagtacgggttccaaagataactggatcctcatcttcaccatcatctagctcacaggctctgcttctcccagcggcaaataatgttacagaagctatgctgcctgcagatgctgacaaaaagccacgggatgggaaaactccgccaaagtatggtgccatgattatggaagctctttcggaattgaatcagccgaatggttcagatattgatgcaatcttcgacttcataaagcaaaggcatgtggtgcaatcgacctttagaagatttctaccctcaaagttacggcgacttgcagactcaaacaaaattgaaaaggtcgataacttctataggctcccagattcatttgcaacaaggactccagctcaaataaaagtttcagatccaaaacagaaggatccatctaaggcgtcaaagaccataggcttgtttgctgcctccagccctgcactagaggcagcgatggcagctgctgtcaaggtgactgacgccgaggcaaaagcacatgatgcacatgatcagatgatggaggcagaaaggatgctgaagatggctgaggataccgagtctatcctcacaattgcagcagagatctatgatcgatgttcaaggggggagataaccacattagttccagtggcgcaaagggagttttgaaatctattggagactcttgtcttgtacatgggataggttttggaatccggaggcccttacttgggatatgccctagggttaataacaacagcgcaccgcctgtcttcagactttgtaatgatatgtaatcccatctttcccattcccagcctgtcactgcaagctgcggtcgtgaatcctgatggcagtaaagttttttttttgttgacatgacgaaagaatagagcaggaaaaagtggtttaaacagatgaggtagggtagtaggatggtaaagtgttactggtataagataatataatgtgccgcagttattttccaaatcgagaatgttgtgttctgtgagaactgttcctttgagagcactttcttgttactagtgcgacattgccgatagcctttccaacgacagagattcgaccataacagtcttctctgcatttctgttttagtaggatgatgtcaactttctagttacatagtgtttgactggtgcattgccatattataagtgtatctgaatcaagtatcgaaagtactatgttggccctgcttaaaatgttacttatgtttttatcgatcgatcgatcaccaccatggttacgagtaaacatcttatgcttacgattttataatcttggtgaaaaagaacttacagcagtaacgcatttgttttttctgctggagtgctgatgagggcgcttcgctaattgctacgcttacgaggagaggagcccacaagacgagatctacccgctgccccctcgcaacgcattcccctcccccgcgtcgtcatctccccaaatccccccaaaccctaccgccgatccgggcccagatcgccatggccgcgcccaacagcaatgacgccgccagcgccagcggcaccggcccggctggcgaggaggacatctccatcgaggcgttggcgcggcgcgtgcaagagcacatgaccctcaactcgaaccccgccgctcgccgccacaagttctgggagacacagcccgtcggccagttccgtgacgccgccgacgcatcgctaccgaacggccccatcgagccgcccacgccactctccgaggtgcgcgccgacccctacccgctgcccgccgccttcgagtggctcacctgcgacctcgatgacgacgcgctcctcgccgacctctactcgttgctcgcccacaactacgtcgaggatgacgagaacatgttccgcttcaactactccccggccttcctccgctgggcgctcaagccgccgtccttcttccgggcctggcacatcggcgttcgcgccaaggagtccaagaagctcgtcgccttcatctcgggcgtccccgcccgcatccgcgcccgcgacgacgtcgtccgcatggccgagatcaactttctctgcgtccacaagaagctccgatccaagcgcctggcacccgtgctcatccgggaggtcacccgccgcgtccaccaggagaacatctggcaggctgcatacaccgcggggatcgtcctcccaacccccatcaccacctgccgctactggcaccgatccctcaaccccaagaagcttatcgatgttggattctctcgccttggtccgcgcatgactatgagccgcacggtccggctatacaagctgcctgatgcgccgctcacccctgggtttcgcaggatggagctgcgggatgtcgctgcggtcacacggctgctgagggcataccttgcgaggtttgtggtagcaccggattttgatgaggtagatgtggagcactggttgctgccccaagaggatgtggtggacagctaccttgtggagagccctgagacgcatgagctgatgaatgatgctcttattgttgccaaacggaacaattatgatgtgttcaatgctctcgatgtcatggagaatgagtcattcctcaaggagctcaagtttggtcctggagatgggcagctccactattacctctacaattaccgtattcgcaatggcatcaagccctctgagcttggtcttgtgctgttatagggcagtctaatcaggacagtcctgagtttacaccttccagttccaagctgtgctgatggtctgttgaatataaatgtgaatcgatatctgcacatgtaaggaatctaaaagcaggcgtgcagtgcagcaaaccctgatgttcatccattcattatccaatttgtatgccggcatgttcaagagatagcttaagttattgcatccccagctgagcagagggcaagtcagttgttattgtgtgctcgctcagtcgctccgttccaaataaaatttgttttagttaattaataggttcatataatttttgatgtatatgttttatatatgtctagattcatcatcatctatttgaatatatacataaaaataagagctaaacgaggaagaaagtattattttgaggttgccaatttgggcttatattcttggaacaacg

SEQ ID NO: 74255 - DNA, 3742 bp, Zea Mays
cttcaccccaccccgcccaacaaaaaagcatatacgttaaataaaataaattagaaagctatctatccaggtggattagggtttttgcctcggctagcagtagtagctaatttggacgcaggagatacggagtagggcgaaccgcgaggagagcaagctatgggcgcgccgaagcagaagtggacgtcggaagaggaggatgcgctccgccgtggcgttcgcaagcacggcgccggcaaatggcggaccatccagaaggacccccagttcagcccgatcctctcctcccgctccaatatcgacctcaaggacaaatggaggaatttaagtttcagtgcaagtggactgggatcgagtaaagtacgggttccaaagataactggatcctcatcttcaccatcatctagctcacaggctctgcttctcccagcggcaaataatgttacagaagctatgctgcctgcagatgctgacaaaaagccacgggatgggaaaactccgccaaagtatggtgccatgattatggaagctctttcggaattgaatcagccgaatggttcagatattgatgcaatcttcgacttcataaagcaaaggcatgtggtgcaatcgacctttagaagatttctaccctcaaagttacggcgacttgcagactcaaacaaaattgaaaaggtcgataacttctataggctcccagattcatttgcaacaaggactccagctcaaataaaagtttcagatccaaaacagaaggatccatctaaggcgtcaaagaccataggcttgtttgctgcctccagccctgcactagaggcagcgatggcagctgctgtcaaggtgactgacgccgaggcaaaagcacatgatgcacatgatcagatgatggaggcagaaaggatgctgaagatggctgaggataccgagtctatcctcacaattgcagcagagatctatgatcgatgttcaaggggggagataaccacattagttccagtggcgcaaagggagttttgaaatctattggagactcttgtcttgtacatgggataggttttggaatccggaggcccttacttgggatatgccctagggttaataacaacagcgcaccgcctgtcttcagactttgtaatgatatgtaatcccatctttcccattcccagcctgtcactgcaagctgcggtcgtgaatcctgatggcagtaaagttttttttttgttgacatgacgaaagaatagagcaggaaaaagtggtttaaacagatgaggtagggtagtaggatggtaaagtgttactggtataagataatataatgtgccgcagttattttccaaatcgagaatgttgtgttctgtgagaactgttcctttgagagcactttcttgttactagtgcgacattgccgatagcctttccaacgacagagattcgaccataacagtcttctctgcatttctgttttagtaggatgatgtcaactttctagttacatagtgtttgactggtgcattgccatattataagtgtatctgaatcaagtatcgaaagtactatgttggccctgcttaaaatgttacttatgtttttatcgatcgatcgatcaccaccatggttacgagtaaacatcttatgcttacgattttataatcttggtgaaaaagaacttacagcagtaacgcatttgttttttctgctggagtgctgatgagggcgcttcgctaattgctacgcttacgaggagaggagcccacaagacgagatctacccgctgccccctcgcaacgcattcccctcccccgcgtcgtcatctccccaaatccccccaaaccctaccgccgatccgggcccagatcgccatggccgcgcccaacagcaatgacgccgccagcgccagcggcaccggcccggctggcgaggaggacatctccatcgaggcgttggcgcggcgcgtgcaagagcacatgaccctcaactcgaaccccgccgctcgccgccacaagttctgggagacacagcccgtcggccagttccgtgacgccgccgacgcatcgctaccgaacggccccatcgagccgcccacgccactctccgaggtgcgcgccgacccctacccgctgcccgccgccttcgagtggctcacctgcgacctcgatgacgacgcgctcctcgccgacctctactcgttgctcgcccacaactacgtcgaggatgacgagaacatgttccgcttcaactactccccggccttcctccgctgggcgctcaagccgccgtccttcttccgggcctggcacatcggcgttcgcgccaaggagtccaagaagctcgtcgccttcatctcgggcgtccccgcccgcatccgcgcccgcgacgacgtcgtccgcatggccgagatcaactttctctgcgtccacaagaagctccgatccaagcgcctggcacccgtgctcatccgggaggtcacccgccgcgtccaccaggagaacatctggcaggctgcatacaccgcggggatcgtcctcccaacccccatcaccacctgccgctactggcaccgatccctcaaccccaagaagcttatcgatgttggattctctcgccttggtccgcgcatgactatgagccgcacggtccggctatacaagctgcctgatgcgccgctcacccctgggtttcgcaggatggagctgcgggatgtcgctgcggtcacacggctgctgagggcataccttgcgaggtttgtggtagcaccggattttgatgaggtagatgtggagcactggttgctgccccaagaggatgtggtggacagctaccttgtggagagccctgagacgcatgaggtcacagatttctgcagcttttacacactgccctcatcagtgttgaacaatgctaactatgcgacgctcaaagcggcgtactcatattacaacgtttcaaccaaaactccattgcagcagctgatgaatgatgctcttattgttgccaaacggaacaattatgatgtgttcaatgctctcgatgtcatggagaatgagtcattcctcaaggagctcaagtttggtcctggagatgggcagctccactattacctctacaattaccgtattcgcaatggcatcaagccctctgagcttggtcttgtgctgttatagggcagtctaatcaggacagtcctgagtttacaccttccaggtctcactgtgcaatcccagtggtttcctcattttgtctattgtggtagtggtttctttgatatgattgccatgcccattgatgggagtccaagatgatttgcaaacaaggagactggaattagaaatcctttccttaatttaagttccaagctgtgctgatggtctgttgaatataaatgtgaatcgatatctgcacatgtaaggaatctaaaagcaggcgtgcagtgcagcaaaccctgatgttcatccattcattatccaatttgtatgccggcatgttcaagagatagcttaagttattgcatccccagctgagcagagggcaagtcagttgttattgtgtgctcgctcagtcgctccgttccaaataaaatttgttttagttaattaataggttcatataatttttgatgtatatgttttatatatgtctagattcatcatcatctatttgaatatatacataaaaataagagctaaacgaggaagaaagtattattttgaggttgccaatttgggcttatattcttggaacaacg

SEQ ID NO: 74256 - DNA, 4805 bp, Zea Mays
cttcaccccaccccgcccaacaaaaaagcatatacgttaaataaaataaattagaaagctatctatccaggtggattagggtttttgcctcggctagcagtagtagctaatttggacgcaggagatacggagtagggcgaaccgcgaggagagcaagctatgggcgcgccgaagcagaagtggacgtcggaagaggaggatgcgctccgccgtggcgttcgcaagcacggcgccggcaaatggcggaccatccagaaggacccccagttcagcccgatcctctcctcccgctccaatatcgacctcaaggacaaatggaggaatttaagtttcagtgcaagtggactgggatcgagtaaagtacgggttccaaagataactggatcctcatcttcaccatcatctagctcacaggctctgcttctcccagcggcaaataatgttacagaagctatgctgcctgcagatgctgacaaaaagccacgggatgggaaaactccgccaaagtatggtgccatgattatggaagctctttcggaattgaatcagccgaatggttcagatattgatgcaatcttcgacttcataaagcaaaggcatgtggtgcaatcgacctttagaagatttctaccctcaaagttacggcgacttgcagactcaaacaaaattgaaaaggtcgataacttctataggctcccagattcatttgcaacaaggactccagctcaaataaaagtttcagatccaaaacagaaggatccatctaaggcgtcaaagaccataggcttgtttgctgcctccagccctgcactagaggcagcgatggcagctgctgtcaaggtgactgacgccgaggcaaaagcacatgatgcacatgatcagatgatggaggcagaaaggatgctgaagatggctgaggataccgagtctatcctcacaattgcagcagagatctatgatcgatgttcaaggggggagataaccacattagttccagtggcgcaaagggagttttgaaatctattggagactcttgtcttgtacatgggataggttttggaatccggaggcccttacttgggatatgccctagggttaataacaacagcgcaccgcctgtcttcagactttgtaatgatatgtaatcccatctttcccattcccagcctgtcactgcaagctgcggtcgtgaatcctgatggcagtaaagttttttttttgttgacatgacgaaagaatagagcaggaaaaagtggtttaaacagatgaggtagggtagtaggatggtaaagtgttactggtataagataatataatgtgccgcagttattttccaaatcgagaatgttgtgttctgtgagaactgttcctttgagagcactttcttgttactagtgcgacattgccgatagcctttccaacgacagagattcgaccataacagtcttctctgcatttctgttttagtaggatgatgtcaactttctagttacatagtgtttgactggtgcattgccatattataagtgtatctgaatcaagtatcgaaagtactatgttggccctgcttaaaatgttacttatgtttttatcgatcgatcgatcaccaccatggttacgagtaaacatcttatgcttacgattttataatcttggtgaaaaagaacttacagcagtaacgcatttgttttttctgctggagtgctgatgagggcgcttcgctaattgctacgcttacgaggagaggagcccacaagacgagatctacccgctgccccctcgcaacgcattcccctcccccgcgtcgtcatctccccaaatccccccaaaccctaccgccgatccgggcccagatcgccatggccgcgcccaacagcaatgacgccgccagcgccagcggcaccggcccggctggcgaggaggacatctccatcgaggcgttggcgcggcgcgtgcaagagcacatgaccctcaactcgaaccccgccgctcgccgccacaagttctgggagacacagcccgtcggccagttccgtgacgccgccgacgcatcgctaccgaacggccccatcgagccgcccacgccactctccgaggtgcgcgccgacccctacccgctgcccgccgccttcgagtggctcacctgcgacctcgatgacgacgcgctcctcgccgacctctactcgttgctcgcccacaactacgtcgaggatgacgagaacatgttccgcttcaactactccccggccttcctccgctgggcgctcaagccgccgtccttcttccgggcctggcacatcggcgttcgcgccaaggagtccaagaagctcgtcgccttcatctcgggcgtccccgcccgcatccgcgcccgcgacgacgtcgtccgcatggccgagatcaactttctctgcgtccacaagaagctccgatccaagcgcctggcacccgtgctcatccgggaggtcacccgccgcgtccaccaggagaacatctggcaggctgcatacaccgcggggatcgtcctcccaacccccatcaccacctgccgctactggcaccgatccctcaaccccaagaagcttatcgatgttggattctctcgccttggtccgcgcatgactatgagccgcacggtccggctatacaagctgcctgatgcgccgctcacccctgggtttcgcaggatggagctgcgggatgtcgctgcggtcacacggctgctgagggcataccttgcgaggtttgtggtagcaccggattttgatgaggtagatgtggagcactggttgctgccccaagaggatgtggtggacagctaccttgtggagagccctgagacgcatgaggtcacagatttctgcagcttttacacactgccctcatcagtgttgaacaatgctaactatgcgacgctcaaagcggcgtactcatattacaacgtttcaaccaaaactccattgcagcagctgatgaatgatgctcttattgttgccaaacggaacaattatgatgtgttcaatgctctcgatgtcatggagaatgagtcattcctcaaggagctcaagtttggtcctggagatgggcagctccactattacctctacaattaccgtattcgcaatggcatcaagccctctgagcttggtcttgtgctgttatagggcagtctaatcaggacagtcctgagtttacaccttccaggtctcactgtgcaatcccagtggtttcctcattttgtctattgtggtagtggtttctttgatatgattgccatgcccattgatgggagtccaagatgatttgcaaacaaggagactggaattagaaatcctttccttaatttaaggttattattcccattagtgacattttgtgtgcgtggtccacaacttgtatgctggcattgattttactgagaaattttgatacaacttgtgttatcgaagttgtttgtgtgctgttgtgttatgtttgcccatgtatggctgtatggatgtcttgatgctaggacatttgccatagctctttctgccctacccaaatggtttcttttttattatgattatgagcaggttctattattagttttagtttttgtcattctttgtccacattccaaaataaccagaaatgtactgattgtggccttctgggatgtctcaactcatttgtccttttctaggttataacatcttctaaaaagtaataacccctgcttgatgtcttattgcttgcgcattactggaaatagattgattatcatgggctcatggctgtgtgggtgtcacaatcgttcgtccttttccaggttatgacatgtttctagcagtaataactcctaggtactctttggttcacatatttgtaatgtaatgaataactgataacgttaaaccatgtttgtttaagctaaactgtaatcagataccacactagaaattgataccggtctattcaaacttaatatcgctggtactcaagtgtgaatcattaccgttgccatttacgtaatatttcgtgaaccaaacagcaccctagttgacacttgtagcgcctaggcacttcaccaactcagtctgctgtattctcctctatataatgctgttataggattctagctttctctgtttggaatatgcatcattgacttgtggttaacatgaatcatttagattattctgagataatattagctgcttacaaatagtttaactggtggcttgcctaaataattcactacctaaaaatttgcatgcaacagccgtttaatcctttaaggttgtgcaattgtagctccattttgtagctgctggtgataattatacaaaataaatgtagaccaggcatgtaactttatttccagcatacttatggggtgtgatttgtgcttgccatttgttgcactgcagttccaagctgtgctgatggtctgttgaatataaatgtgaatcgatatctgcacatgtaaggaatctaaaagcaggcgtgcagtgcagcaaaccctgatgttcatccattcattatccaatttgtatgccggcatgttcaagagatagcttaagttattgcatccccagctgagcagagggcaagtcagttgttattgtgtgctcgctcagtcgctccgttccaaataaaatttgttttagttaattaataggttcatataatttttgatgtatatgttttatatatgtctagattcatcatcatctatttgaatatatacataaaaataagagctaaacgaggaagaaagtattattttgaggttgccaatttgggcttatattcttggaacaacg

SEQ ID NO: 74257 - DNA, 703 bp, Zea Mays
cgttaaataaaataaattagaaagctatctatccaggtggattagggtttttgcctcggctagcagtagtagctaatttggacgcaggagatacggagtagggcgaaccgcgaggagagcaagctatgggcgcgccgaagcagaagtggacgtcggaagaggaggatgcgctccgccgtggcgttcgcaagcacggcgccggcaaatggcggaccatccagaaggacccccagttcagcccgatcctctcctcccgctccaatatcgacctcaaggacaaatggaggaatttaagtttcagtgcaagtggactgggatcgagtaaagtacgggttccaaagataactggatcctcatcttcaccatcatctagctcacaggctctgcttctcccagcggcaaataatgttacagaagctatgctgcctgcagatgctgacaaaaagccacgggatgggaaaactccgccaaagtatggtgccatgattatggaagctctttcggaattgaatcagccgaatggttcagatattgatgcaatcttcgacttcataaagcaaaggcatgtggtgcaatcgacctttagaagatttctaccctcaaagttacggcgacttgcagactcaaacaaaattgaaaagtttatcccatggatctggctgaaattctacatgtcttgaacgaatccaatcgaacactctgt

SEQ ID NO: 74258 - DNA, 1128 bp, Zea Mays
gagacgacctagagttgagtcggttccagcagcgcgtgaaactgaaaaaggtttcccatctcatgcttctctggcaatttaggtctttgatattttaataataaattctcccgcatattactcgtccctctatgggctttgtggccgccctgtcggaaaacccgcgcaagaaaagagaaacccgcaagccgcccgcgcagaccatcgccccgttgccacggtcaaattcgtcggcgtttggtgccgcggcgtgactgtccgccggtcgcggcgcgcgtcctgcctggttggatcccttcggacttccgcagattcccgcgcgggggtgtttgatttggatgagaggagcgcggcggcgggatggggaccccttcgcagggctcggcggccgtgacggcggcccgggtcgacctctgcgcgctcgacctcatgcctgtctttgccaaggagatgatcgccggcggcgtcgccggcgccttctccaaaaccgccatcgcgccgctcgagcgcgtcaagatattgctgcagaacaaatgagtttgggtctcttggagttctcaaatcattgaagaaactgagacaacttgatggagtcatggggttttacaaaggaaatggtgccagtgtgatgagaattgttccttatgctgcattacatttcatggcatatgagcggtaccggtgttggattttgaataactgtccctcactgggaacagggcctttagtagatcttttagccggttcagcatcagggggaactgctgtattgtgtacttatcccttggatttggcccggactaagcttgcctttcaggtcaatagttcagatgaactcagcagagctttgaaaaggggaagtccccagccagcatatggaggaatcattgatgtctttagatgtgtttactcagaaggtggagtgcgggctctttaccgaggtgtaggtatagttattcccttcatatgtcatattatcattaattagtcaagcacatggaaatctctagtcagttcactaggcgcatcatattttagttgtctggatgaattttttacttgttgatgtagttatactgttcagagtttagtcagcacactagacgctataaacagtttagattcagg

SEQ ID NO: 74259 - DNA, 1783 bp, Zea Mays
gagacgacctagagttgagtcggttccagcagcgcgtgaaactgaaaaaggtttcccatctcatgcttctctggcaatttaggtctttgatattttaataataaattctcccgcatattactcgtccctctatgggctttgtggccgccctgtcggaaaacccgcgcaagaaaagagaaacccgcaagccgcccgcgcagaccatcgccccgttgccacggtcaaattcgtcggcgtttggtgccgcggcgtgactgtccgccggtcgcggcgcgcgtcctgcctggttggatcccttcggacttccgcagattcccgcgcgggggtgtttgatttggatgagaggagcgcggcggcgggatggggaccccttcgcagggctcggcggccgtgacggcggcccgggtcgacctctgcgcgctcgacctcatgcctgtctttgccaaggagatgatcgccggcggcgtcgccggcgccttctccaaaaccgccatcgcgccgctcgagcgcgtcaagatattgctgcagaccagaacaaatgagtttgggtctcttggagttctcaaatcattgaagaaactgagacaacttgatggagtcatggggttttacaaaggaaatggtgccagtgtgatgagaattgttccttatgctgcattacatttcatggcatatgagcggtaccggtgttggattttgaataactgtccctcactgggaacagggcctttagtagatcttttagccggttcagcatcagggggaactgctgtattgtgtacttatcccttggatttggcccggactaagcttgcctttcaggtttttcattttgcactattaattttgtctttacaatctcaagtctttcatcaccttccttttgtcattctggattactaaatatttacttgaacatctatacatcttggatcaagaatatattttttaagattagttgcttcataaataataatagtgatagataaatcgttcgatcaacaaagttttgacctctaacgattacattccatcacaatcaatgtttatatgagcatttgaattggtcaaatgacgattatttgtggcatcccttatttttctcactttttttaagaaaaaaaaaagtgttgctcatttttctgtctggagatctttacacagtaaatcagtaatatttatttgtcaaacaaagggagtagtatttacatccatacaggatggataacctttctcccaccttgttaccatgtcgggttcatctaactggcagtgactgtagttcttttggccaaattggtgggtaactgaaaatttcttgctggtactcaccaccctgttaggttatcttctacatcaaaatgcatgtgcttgttctaaaattcaagtctccaaaatttctatttgaaattcacacatcaagcgagagcagctttcagggctgaatagtttgtgattatcttttgtcataggtcaatagttcagatgaactcagcagagctttgaaaaggggaagtccccagccagcatatggaggaatcattgatgtctttagatgtgtttactcagaaggtggagtgcgggctctttaccgaggtgtaggtatagttattcccttcatatgtcatattatcattaattagtcaagcacatggaaatctctagtcagttcactaggcgcatcatattttagttgtctggatgaattttttacttgttgatgtagttatactgttcagagtttagtcagcacactagacgctataaacagtttagattcagg

SEQ ID NO: 74260 - DNA, 1901 bp, Zea Mays
cagaaaaggagcctcaccctacagcctatacgtaaaagcgggcccggtcttgaaatccataaagaacgcctatttcagtccatttgcacttcctcgccaccgccgcttcgttggtacatctctctcttccccacgccatccccgacaagcggcaaataacctctccggcggcgagacagatggagtcgacctccggcgaggatgctccgaagcgcaacccgctcccgtccgcgctcgtctccaacctacagtccgtgctcgccgcccgccgcccgtccgcggcagaggtcagcaccgccgccacagctagcgaggctgaggctgaggctcaggaagcggaggcgtccgatgcccccgcgggagatgggacgccggcgaggcccatcgtgctgctgacctgtgccggggggatccggtcggcgggtctcgcggcgctcgtcgacgccctcgttgccgccggccgctgcgacgtccacgtgtgtgcccccgaatcggacaagcaagcctgtggccattcaattaccatccgtgaaaccatcgctgcgtcatccgtggatttcacaggcgctaaagcttttgagacatcaggcacgccggttgactgtgtctcgttggccttatctgggaggctgtttccttggtcgtctcctgctttggtgatcagtggtatcaacacgggatcaaattgtggatatgagatgttccactcttctgccattgctgctgcgagggaggccttagtgtatggggtgccttcaattgcaatctcattgaattgaaggacgaaaccaaagacagtgacttcaaggatgcagctcaggcctgtttaccattgataaatgctgctttggatgacattgagaaaggaactttcctcagaggttgcctattgaatattggagttccaagtgcaccatctgcaaataagggtttcaagttgaccaaacagagtggatacagtcctgctcaaagttgggaagctgtgtcaacaagcaggcccttatctgctactcacttcatgggcatgcatcaaagcctcggtattcagttggcacagcttgggaaggatgcatctgcagcaggagctgcacgtagagttagtgcccaacgaaaggcagtcgaggttgagtctgttgcagctgctggtaaacaagagattcgagaagtagtgaagaagttattccgtgctgagtttgtcgagaagcgatatgaaggtttagatgaggatatcgatttgagagctttggagaatggatttatatctgtcacccctctgaatgttcatggacaagtggagcttgaaatcggagccacagcttctgattggctctcagcagctgtatcactagacaaagaaaaggtagctgcttcagctacagctgaccaacaagatgttgcagctgaggaaaaggaagctccctcagcagcctaacaaacacgcagacatgtccacactccgtaggtgtctttagttcctgtggtgatgtcgatcttttattacctcttgtcagtttggtttgtctagtgttttgccctcaatatttgtttgttgcaatgtctattttttttgttcaccttctctgccgattaccggcttccttggccctacaaatgatttggtgcaggcagccctgcattttggatgtaacgatgtaggctacggcaactaccagatgaatactgcccagcccccactatttttttcagtgtggtttgttataggaaggtgttgtattcagcatggggtatgtgattgattttgtcttgctcccgtctgaaccatggcaaccaaatgtggccgtatggatcccttcactttacaagaattgaaatttacggccccgtaggaattggaatcttactattgaaatagtatattttttttgaatgtgacattccac

SEQ ID NO: 74261 - DNA, 1646 bp, Zea Mays
cccgaatcgtacgtgctgcgacttagaaaaccaaggcgtcttaatttccccttacatttgctcttatgattgcaaagtactgtttgctttccattggatttgttgggagataaattaagtagtcctgatttgggacgccctgcgcctgtttactcccattaatgtactaatttggttgccatttgcctgtgattgtggaaccgaactgatttggggccctttgtttatttgaagggacaagcaagcctgtggccattcaattaccatccgtgaaaccatcgctgcgtcatccgtggatttcacaggcgctaaagcttttgagacatcaggcacgccggttgactgtgtctcgttggccttatctgggaggctgtttccttggtcgtctcctgctttggtgatcagtggtatcaacacgggatcaaattgtggatatgagatgttccactcttctgccattgctgctgcgagggaggccttagtgtatggggtgccttcaattgcaatctcattgaattggaagaaggacgaaaccaaagacagtgacttcaaggatgcagctcaggcctgtttaccattgataaatgctgctttggatgacattgagaaaggaactttcctcagaggttgcctattgaatattggagttccaagtgcaccatctgcaaataagggtttcaagttgaccaaacagagtggatacagtcctgctcaaagttgggaagctgtgtcaacaagcaggcccttatctgctactcacttcatgggcatgcatcaaagcctcggtattcagttggcacagcttgggaaggatgcatctgcagcaggagctgcacgtagagttagtgcccaacgaaaggcagtcgaggttgagtctgttgcagctgctggtaaacaagagattcgagaagtagtgaagaagttattccgtgctgagtttgtcgagaagcgatatgaaggtttagatgaggatatcgatttgagagctttggagaatggatttatatctgtcacccctctgaatgttcatggacaagtggagcttgaaatcggagccacagcttctgattggctctcagcagctgtatcactagacaaagaaaaggtagctgcttcagctacagctgaccaacaagatgttgcagctgaggaaaaggaagctccctcagcagcctaacaaacacgcagacatgtccacactccgtaggtgtctttagttcctgtggtgatgtcgatcttttattacctcttgtcagtttggtttgtctagtgttttgccctcaatatttgtttgttgcaatgtctattttttttgttcaccttctctgccgattaccggcttccttggccctacaaatgatttggtgcaggcagccctgcattttggatgtaacgatgtaggctacggcaactaccagatgaatactgcccagcccccactatttttttcagtgtggtttgttataggaaggtgttgtattcagcatggggtatgtgattgattttgtcttgctcccgtctgaaccatggcaaccaaatgtggccgtatggatcccttcactttacaagaattgaaatttacggccccgtaggaattggaatcttactattgaaatagtatattttttttgaatgtgacattccac

SEQ ID NO: 74262 - DNA, 998 bp, Zea Mays
cttaaactccactttagagggaacgggtttcaagttgaccaaacagagtggatacagtcctgctcaaagttgggaagctgtgtcaacaagcaggcccttatctgctactcacttcatgggcatgcatcaaagcctcggtattcagttggcacagcttgggaaggatgcatctgcagcaggagctgcacgtagagttagtgcccaacgaaaggcagtcgaggttgagtctgttgcagctgctggtaaacaagagattcgagaagtagtgaagaagttattccgtgctgagtttgtcgagaagcgatatgaaggtttagatgaggatatcgatttgagagctttggagaatggatttatatctgtcacccctctgaatgttcatggacaagtggagcttgaaatcggagccacagcttctgattggctctcagcagctgtatcactagacaaagaaaaggtagctgcttcagctacagctgaccaacaagatgttgcagctgaggaaaaggaagctccctcagcagcctaacaaacacgcagacatgtccacactccgtaggtgtctttagttcctgtggtgatgtcgatcttttattacctcttgtcagtttggtttgtctagtgttttgccctcaatatttgtttgttgcaatgtctattttttttgttcaccttctctgccgattaccggcttccttggccctacaaatgatttggtgcaggcagccctgcattttggatgtaacgatgtaggctacggcaactaccagatgaatactgcccagcccccactatttttttcagtgtggtttgttataggaaggtgttgtattcagcatggggtatgtgattgattttgtcttgctcccgtctgaaccatggcaaccaaatgtggccgtatggatcccttcactttacaagaattgaaatttacggccccgtaggaattggaatcttactattgaaatagtatattttttttgaatgtgacattccac

SEQ ID NO: 74263 - DNA, 1035 bp, Zea Mays
ctgacccatcgtcaacgaggacttcgagggggtcagagacgaagaccccaagacgatggcatgggtttcaagttgaccaaacagagtggatacagtcctgctcaaagttgggaagctgtgtcaacaagcaggcccttatctgctactcacttcatgggcatgcatcaaagcctcggtattcagttggcacagcttgggaaggatgcatctgcagcaggagctgcacgtagagttagtgcccaacgaaaggcagtcgaggttgagtctgttgcagctgctggtaaacaagagattcgagaagtagtgaagaagttattccgtgctgagttgtcgagaagcgatatgaaggtttagatgaggatatcgatttgagagctttggagaatggatttatatctgtcacccctctgaatgttcatggacaagtggagcttgaaatcggagccacagcttctgattggctctcagcagctgtatcactagacaaagaaaaggtagctgcttcagctacagctgaccaacaagatgttgcagctgaggaaaaggaagctccctcagcagcctaacaaacacgcagacatgtccacactccgtaggtgtctttagttcctgtggtgatgtcgatcttttattacctcttgtcagtttggtttgtctagtgttttgccctcaatatttgtttgttgcaatgtctattttttttgttcaccttctctgccgattaccggcttccttggccctacaaatgatttggtgcaggcagccctgcattttggatgtaacgatgtaggctacggcaactaccagatgaatactgcccagcccccactatttttttcagtgtggtttgttataggaaggtgttgtattcagcatggggtatgtgattgattttgtcttgctcccgtctgaaccatggcaaccaaatgtggccgtatggatcccttcactttacaagaattgaaatttacggccccgtaggaattggaatcttactattgaaatagtatattttttttgaatgtgacattccac

SEQ ID NO: 74264 - DNA, 1009 bp, Zea Mays
gggggtcagagacgaagaccccaagacgatggcatgggtttcaagttgaccaaacagagtggatacagtcctgctcaaagttgggaagctgtgtcaacaagcaggcccttatctgctactcacttcatgggcatgcatcaaagcctcggtattcagttggcacagcttgggaaggatgcatctgcagcaggagctgcacgtagagttagtgcccaacgaaaggcagtcgaggttgagtctgttgcagctgctggtaaacaagagattcgagaagtagtgaagaagttattccgtgctgagtttgtcgagaagcgatatgaaggtttagatgaggatatcgatttgagagctttggagaatggatttatatctgtcacccctctgaatgttcatggacaagtggagcttgaaatcggagccacagcttctgattggctctcagcagctgtatcactagacaaagaaaaggtagctgcttcagctacagctgaccaacaagatgttgcagctgaggaaaaggaagctccctcagcagcctaacaaacacgcagacatgtccacactccgtaggtgtctttagttcctgtggtgatgtcgatcttttattacctcttgtcagtttggtttgtctagtgttttgccctcaatatttgtttgttgcaatgtctattttttttgttcaccttctctgccgattaccggcttccttggccctacaaatgatttggtgcaggcagccctgcattttggatgtaacgatgtaggctacggcaactaccagatgaatactgcccagcccccactatttttttcagtgtggtttgttataggaaggtgttgtattcagcatggggtatgtgattgattttgtcttgctcccgtctgaaccatggcaaccaaatgtggccgtatggatcccttcactttacaagaattgaaatttacggccccgtaggaattggaatcttactattgaaatagtatattttttttgaatgtgacattccac

SEQ ID NO: 74265 - DNA, 2031 bp, Zea Mays
ctcttgattgaagaagcatactaggagtattgaatataacaggaaaataaagttaaaagaacaattgaacttgaaggaatatagacacgctaatagaagtggagggaaagaacgggaagaaaaatcggaaactaacttcttcacaagctaagtccatgatccagcccaacttacagaagcccacaaagtattcacttaacgtctgtaactaccggcccatcccaggaagaggccccgctcctctccctgctcgctgcacagggactcggcctccgggacggcagacccacaagcgccagcacgctcgagactgtgccgtgggagtgggaggttcctcaggtgctgagcagtcgccggcggcgaccgccggtgtcggagatgaaggagagaagcggctccagggcggcggtggacgagcgctacgcgcagtggaagtcgctcatccccgtcctctacgactggtttgccaaccacaacctcgtctggccatccctctcctgccggtgggggccacagtttgagaaagctacctacaagaatcgtcagcgcctgtacctatctgaacaggcaagtgcatctgcaattgtgaaacctagggttgcagctgctgaacatatctcacagttcaatgaggaagcacggtcaccttttgtaaagaagtacaaaactatagttcatcctggtgaggttaacagaatcagggaacttccacagaacagtaagatcatagccactcacactgacagtccagatgtacttatttgggatgttgaagcacaaccaaatagacatgctgtcctaggagcaagcgagtctcgccctgatctgatattaacaggacataaggaaaatgcggaatttgcgcttgccatgtgtccagcagaaccatatgtcctatcaggaggaaaggacaaatctgttgtcttgtggagcatccaagaccatatatctgcccttggggattcctcgtcttctcctggagcatctggcagcaagcagtctattaaaactgcaaatgaaaaggagagccctaaagttgatcctagaggtatatttcatggacatgacagcacggttgaagatgttcagttctgcccttccagtgcgcaggagttttgtagtgtgggtgatgatgcttgtcttattctgtgggatgctcgaactggcactgccccagctgttaaggttgagaaagctcacagtggagatgttcattgtgttgattggaatccccttgatgttaactatatcttaactgggtctgccgataactctgtccgaatgtgggatcgtcggaatctgggttcaggaggagctggttctccaattcacaaatttgaaggccataaagctgctgttctttgtgttcagtggtcacctgacagagcatctgtttttggaagttctgcagaagatggtttcttaaacgtgtgggatcatgagaaggtggggaagaagaaaaattctaatgtcccagccgggcttttctttcagcacgctggtcatagggataagattgtagacttccactggaattcgtcagatccttggacaattgtcagtgtctctgatgatggcgagagcactggtggaggtggaacactgcagatttggcgcatgagtgatttgatctaccgcccagaggatgaagttcttgcagagctggagaatttcaaggctcatttggccagctgtgcaccgaagaattgagtcatgtgggttacctgcggaatgcaatcctgtggaaactgagtaggtgatgtagtttcatggccataagtatgagccccagttgacattgaatctgtcctctgatgctcctagagctgtacccttgaggggcttgtgcttttgtgagcttgtgttaaacctgctgtacgagtaaactagtatgtccgcaaacgcgtcagagccggatgtctgtgggccagctattgggatactgccggatatcgtcaacaattgttccagattggtgtattggatctaatgagattgtcagcaattgcttgtttttatggcttcacgaat

SEQ ID NO: 74266 - DNA, 1984 bp, Zea Mays
ctcttgattgaagaagcatactaggagtattgaatataacaggaaaataaagttaaaagaacaattgaacttgaaggaatatagacacgctaatagaagtggagggaaagaacgggaagaaaaatcggaaactaacttcttcacaagctaagtccatgatccagcccaacttacagaagcccacaaagtattcacttaacgtctgtaactaccggcccatcccaggaagaggccccgctcctctccctgctcgctgcacagggactcggcctccgggacggcagacccacaagcgccagcacgctcgagactgtgccgtgggagtgggaggttcctcaggtgctgagcagtcgccggcggcgaccgccggtgtcggagatgaaggagagaagcggctccagggcggcggtggacgagcgctacgcgcagtggaagtcgctcatccccgtcctctacgactggtttgccaaccacaacctcgtctggccatccctctcctgccggtgggggccacagtttgagaaagctacctacaagaatcgtcagcgcctgtacctatctgaacagacggatgggagtgtgcctaatactctggttatcgcaaattgtgaagttgtgaaacctagggttgcagctgctgaacatatctcacagttcaatgaggaagcacggtcaccttttgtaaagaagtacaaaactatagttcatcctggtgaggttaacagaatcagggaacttccacagaacagtaagatcatagccactcacactgacagtccagatgtacttatttgggatgttgaagcacaaccaaatagacatgctgtcctaggagcaagcgagtctcgccctgatctgatattaacaggacataaggaaaatgcggaatttgcgcttgccatgtgtccagcagaaccatatgtcctatcaggaggaaaggacaaatctgttgtcttgtggagcatccaagaccatatatctgcccttggggattcctcgtcttctcctggagcatctggcagcaagcagtctattaaaactgcaaatgaaaaggagagccctaaagttgatcctagaggtatatttcatggacatgacagcacggttgaagatgttcagttctgcccttccagtgcgcaggagttttgtagtgtgggtgatgatgcttgtcttattctgtgggatgctcgaactggcactgccccagctgttaaggttgagaaagctcacagtggagatgttcattgtgttgattggaatccccttgatgttaactatatcttaactgggtctgccgataactctgtccgaatgtgggatcgtcggaatctgggttcaggaggagctggttctccaattcacaaatttgaaggccataaagctgctgttctttgtgttcagtggtcacctgacagagcatctgtttttggaagttctgcagaagatggtttcttaaacgtgtgggatcatgagaaggtggggaagaagaaaaattctaatgtcccagccgggcttttctttcagcacgctggtcatagggataagattgtagacttccactggaattcgtcagatccttggacaattgtcagtgtctctgatgatggcgagagcactggtggaggtggaacactgcagatttggcgcatgagtgatttgatctaccgcccagaggatgaagttcttgcagagctggagaatttcaaggctcatttggccagctgtgcaccgaagaattgagtcatttgacattgaatctgtcctctgatgctcctagagctgtacccttgaggggcttgtgcttttgtgagcttgtgttaaacctgctgtacgagtaaactagtatgtccgcaaacgcgtcagagccggatgtctgtgggccagctattgggatactgccggatatcgtcaacaattgttccagattggtgtattggatctaatgagattgtcagcaattgcttgtttttatggcttcacgaat

SEQ ID NO: 74267 - DNA, 1561 bp, Zea Mays
cggtagccctcccaccgccgcgagcccgcaagaataaacagaagagtagagaaaaaaccaaaccaaaacccggagccctcctcgtctcccccgttcggcggcgcgacggtagagagattccgtcgaacacatggccgctctcgcctcagccgcccgctcgaggcgccggctccttccctatctgtaccgcctcctccactccgcgtccacaaccgctgtctccccgtcgccctccaccagccgcttcctccgccacgcctcgccggtgccccgcacccctgaccactccccttaccttcggttccccgccgcgcgcgtctctacgctcccctcaggcctccgcgtcgtcacgcaggcctacccggtcgccacacggattgcctccgtcggcgtctgggtcgatgcggggagccgcttcgagctccctggaaccaacggaaccgcacacttcctggagcacatggccttcaagggcacacggcgccggcccaacgcgcaggtgctcgaggtggagatcgaggacatgggcgcgcgcctcaacgcgtatacctcccgcgagcagaccaccttttttgccgacgtgcaggcgcgccacgttccggcggcactcgacgtcctcagcgacatcctacagcacccgcgattccccgaaagggctatccagcgggagcgcggcgtcatcctccgtgagatggaggaggtgcaaggtatgatggaagaggtgatatttgatcacttgcatgcagcagcattccaaggccatccactaggggacacaatattaggtcctgaagaaaatattaggtccatttctaagaaagatttggagcaatatatctcaactcactatacctgtcctcgaatggttgtatctgctgctggaagtgtcagtcacgatgaggttgttgatcaagtgaaagaattattcacagaattctccactgatccaactactgctgatcagcttgttcaggcgaacccagctatttttactggatctgaggttcgtgtagaaaatgcagagtttcctctagcacacatcgcaatagctttcaaaggttcatcatggactgaccctagctccattccccttatggtgatccaaagcatattgggatcctggaacaggagcattggggttgggaactgctcagggtcttctttagctcgtggtatcagcaatgctaatttagctgagagcctgatggcgttcaatactaactatcgggacacaggaatatttggcatttatactattgctccgcctgacaccctgcaagacttgtcacggttaataatggcggagtttagaagacttgcatcccaggtgtcagaaacagaggttgcccgtgcccgcaatcagctgaaatcttctctgttacttcacattgatggatccactgcagttactgagaataatggtcgccagatgctaacttatgggcgagtcatgccgttcctagagctttttgcacgcattgatgctgttgactgtgctacagtaatggaaactgccaaggagtacataattgataaggtctgcagtatagtggtcacagga

SEQ ID NO: 74268 - DNA, 1894 bp, Zea Mays
cggtagccctcccaccgccgcgagcccgcaagaataaacagaagagtagagaaaaaaccaaaccaaaacccggagccctcctcgtctcccccgttcggcggcgcgacggtagagagattccgtcgaacacatggccgctctcgcctcagccgcccgctcgaggcgccggctccttccctatctgtaccgcctcctccactccgcgtccacaaccgctgtctccccgtcgccctccaccagccgcttcctccgccacgcctcgccggtgccccgcacccctgaccactccccttaccttcggttccccgccgcgcgcgtctctacgctcccctcaggcctccgcgtcgtcacgcaggcctacccggtcgccacacggattgcctccgtcggcgtctgggtcgatgcggggagccgcttcgagctccctggaaccaacggaaccgcacacttcctggagcacatggccttcaagggcacacggcgccggcccaacgcgcaggtgctcgaggtggagatcgaggacatgggcgcgcgcctcaacgcgtatacctcccgcgagcagaccaccttttttgccgacgtgcaggcgcgccacgttccggcggcactcgacgtcctcagcgacatcctacagcacccgcgattccccgaaagggctatccagcgggagcgcggcgtcatcctccgtgagatggaggaggtgcaaggtatgatggaagaggtgatatttgatcacttgcatgcagcagcattccaaggccatccactaggggacacaatattaggtcctgaagaaaatattaggtccatttctaagaaagatttggagcaatatatctcaactcactatacctgtcctcgaatggttgtatctgctgctggaagtgtcagtcacgatgaggttgttgatcaagtgaaagaattattcacagaattctccactgatccaactactgctgatcagcttgttcaggcgaacccagctatttttactggatctgaggttcgtgtagaaaatgcagagtttcctctagcacacatcgcaatagctttcaaaggttcatcatggactgaccctagctccattccccttatggtgatccaaagcatattgggatcctggaacaggagcattggggttgggaactgctcaggctcgtggtatcagcaatgctaatttagctgagagcctgatggcgttcaatactaactatcgggacacaggaatatttggcatttatactattgctccgcctgacaccctgcaagacttgtcacggttaataatggcggagtttagaagacttgcatcccaggtgtcagaaacagaggttgcccgtgcccgcaatcagctgaaatcttctctgttacttcacattgatggatccactgcagttactgagaataatggtcgccagatgctaacttatgggcgagtcatgccgttcctagagctttttgcacgcattgatgctgttgactgtgctacagtaatggaaactgccaaggagtacataattgataaggatattgctctggctgcagtgggacagctcacggaattaccagaacttagttggtttcgctccgaaacatgttctgacgatgattttactcgaagaatattatttgggaatgcaaagtagttgaagctgtggctctgttttggtattgttgtaactctaggtcaatcattctaagaaactatcaattgatagatagcatcagctatttcagttatttgttagttttgcgcttgtactgtgtacttatttgacgcaaaatgtgcaaataatttactttgctgtggtgctctacttatgaattcatttcatctatgagttctaagaatatatattttttgctattaagcatattgaaattataaactggc

SEQ ID NO: 74269 - DNA, 1876 bp, Zea Mays
cggtagccctcccaccgccgcgagcccgcaagaataaacagaagagtagagaaaaaaccaaaccaaaacccggagccctcctcgtctcccccgttcggcggcgcgacggtagagagattccgtcgaacacatggccgctctcgcctcagccgcccgctcgaggcgccggctccttccctatctgtaccgcctcctccactccgcgtccacaaccgctgtctccccgtcgccctccaccagccgcttcctccgccacgcctcgccggtgccccgcacccctgaccactccccttaccttcggttccccgccgcgcgcgtctctacgctcccctcaggcctccgcgtcgtcacgcaggcctacccggtcgccacacggattgcctccgtcggcgtctgggtcgatgcggggagccgcttcgagctccctggaaccaacggaaccgcacacttcctggagcacatggccttcaagggcacacggcgccggcccaacgcgcaggtgctcgaggtggagatcgaggacatgggcgcgcgcctcaacgcgtatacctcccgcgagcagaccaccttttttgccgacgtgcaggcgcgccacgttccggcggcactcgacgtcctcagcgacatcctacagcacccgcgattccccgaaagggctatccagcgggagcgcggcgtcatcctccgtgagatggaggaggtgcaaggtatgatggaagaggtgatatttgatcacttgcatgcagcagcattccaaggccatccactaggggacacaatattaggtcctgaagaaaatattaggtccatttctaagaaagatttggagcaatatatctcaactcactatacctgtcctcgaatggttgtatctgctgctggaagtgtcagtcacgatgaggttgttgatcaagtgaaagaattattcacagaattctccactgatccaactactgctgatcagcttgttcaggcgaacccagctatttttactggatctgagaaaatgcagagtttcctctagcacacatcgcaatagctttcaaaggttcatcatggactgaccctagctccattccccttatggtgatccaaagcatattgggatcctggaacaggagcattggggttgggaactgctcagggtcttctttagctcgtggtatcagcaatgctaatttagctgagagcctgatggcgttcaatactaactatcgggacacaggaatatttggcatttatactattgctccgcctgacaccctgcaagacttgtcacggttaataatggcggagtttagaagacttgcatcccaggtgtcagaaacagaggttgcccgtgcccgcaatcagctgaaatcttctctgttacttcacattgatggatccactgcagttactgagaataatggtcgccagatgctaacttatgggcgagtcatgccgttcctagagctttttgcacgcattgatgctgttgactgtgctacagtaatggaaactgccaaggagtacataattgataagtgggacagctcacggaattaccagaacttagttggtttcgctccgaaacatgttctgacgatgattttactcgaagaatattatttgggaatgcaaagtagttgaagctgtggctctgttttggtattgttgtaactctaggtcaatcattctaagaaactatcaattgatagatagcatcagctatttcagttatttgttagttttgcgcttgtactgtgtacttatttgacgcaaaatgtgcaaataatttactttgctgtggtgctctacttatgaattcatttcatctatgagttctaagaatatatattttttgctattaagcatattgaaattataaactggc

SEQ ID NO: 74270 - DNA, 1895 bp, Zea Mays
cggtagccctcccaccgccgcgagcccgcaagaataaacagaagagtagagaaaaaaccaaaccaaaacccggagccctcctcgtctcccccgttcggcggcgcgacggtagagagattccgtcgaacacatggccgctctcgcctcagccgcccgctcgaggcgccggctccttccctatctgtaccgcctcctccactccgcgtccacaaccgctgtctccccgtcgccctccaccagccgcttcctccgccacgcctcgccggtgccccgcacccctgaccactccccttaccttcggttccccgccgcgcgcgtctctacgctcccctcaggcctccgcgtcgtcacgcaggcctacccggtcgccacacggattgcctccgtcggcgtctgggtcgatgcggggagccgcttcgagctccctggaaccaacggaaccgcacacttcctggagcacatggccttcaagggcacacggcgccggcccaacgcgcaggtgctcgaggtggagatcgaggacatgggcgcgcgcctcaacgcgtatacctcccgcgagcagaccaccttttttgccgacgtgcaggcgcgccacgttccggcggcactcgacgtcctcagcgacatcctacagcacccgcgattccccgaaagggctatccagcgggagcgcggcgtcatcctccgtgagatggaggaggtgcaaggtatgatggaagaggtgatatttgatcacttgcatgcagcagcattccaaggccatccactaggggacacaatattaggtcctgaagaaaatattaggtccatttctaagaaagatttggagcaatatatctcaactcactatacctgtcctcgaatggttgtatctgctgctggaagtgtcagtcacgatgaggttgttgatcaagtgaaagaattattcacagaattctccactgatccaactactgctgatcagcttgttcaggcgaacccagctatttttactggatctgagcttctgtaggttcgtgtagaaaatgcagagtttcctctagcacacatcgcaatagctttcaaaggttcatcatggactgaccctagctccattccccttatggtgatccaaagcatattgggatcctggaacaggagcattggggttgggaactgctcagggtcttctttagctcgtggtatcagcaatgctaatttagctgagagcctgatggcgttcaatactaactatcgggacacaggaatatttggcatttatactattgctccgcctgacaccctgcaagacttgtcacggttaataatggcggagtttagaagacttgcatcccaggtgtcagaaacagaggttgcccgtgcccgcaatcagctgaaatcttctctgttacttcacattgatggatccactgcagttactgagaataatggtcgccagatgctaacttatgggcgagtcatgccgttcctagagctttttgcacgcattgatgctgttgactgtgctacagtaatggaaactgccaaggagtacataattgataagtgggacagctcacggaattaccagaacttagttggtttcgctccgaaacatgttctgacgatgattttactcgaagaatattatttgggaatgcaaagtagttgaagctgtggctctgttttggtattgttgtaactctaggtcaatcattctaagaaactatcaattgatagatagcatcagctatttcagttatttgttagttttgcgcttgtactgtgtacttatttgacgcaaaatgtgcaaataatttactttgctgtggtgctctacttatgaattcatttcatctatgagttctaagaatatatattttttgctattaagcatattgaaattataaactggc

SEQ ID NO: 74271 - DNA, 2854 bp, Zea Mays
actaacaaactttaaatcttttttgaaaaaaatcatacatattccttccaccctactctaattatatacataatttcaaatttaaattcattatactttagctataataaaaaaataaaattgtagacgattttctaatttaaacttgttagaaattttatttttttattactctttatgtatttcaaaatttaacttgaaattttgtatatgattagagtagggtggaaagtatatgtatgaattttttcaatttttttaaactttattagttcatgtgtacagatatgttctcaacaaataaagaaaactttaggcttcatgcaagctgaatttgaagtgtccaagttctgacattgtgccacctgatttgtcctcgactctccacgtcgcgcgctcccatttgagagtctgactggtaggccttggttggattcgaactcacaacgatacggcggagtcccgtgttcggtgttccctgatgggcaactccatcaaccgactcgccggcggcgcgcctctcccgccggagttcgctggaggcatgcctttttgtcgtcaccccatcccaaacatctaggcgttcctcttccccacctctacccgcggttctccctggcccctgggcccgtttgcgtgctactaccggctacggctacggcctacggggaaagcaactgtggcaagtacggagaatgcaagtgcaaccgtccggcacggaggcacaaaagaaagccgccgacgaaacgaaagcgcctgccacctgcgggtgctccccatccggtccaggtgcatgcatctttccctcctcctccccacatcacaatcaccgtcctcctctataaccgcgcctcccctccactctttctctctcgagtcatcttcttcctgcccaatacggcgagcatcggcggcggcgacccaagcaggttgacctcgccccttcaccgaccagcgggtcgtacagcaagccgatccaattcctccggtgagttctcctgttactacaccccttccggctttggttctcggcgctgtgttatgtgatgtcggtctgctcgagagcagggatagatacaccatccgcccatacgcctgaaatcgaacttgctactaaattgccagtaacactgagcgcgattatcgcacccacctacgtacatagaaattgatttcacgtactgttcagggcctcggcgtttcacttcgccatttcgttgaactgctggaagacacgtcggtgcacactagatttggattggggagaggagaagcgacagctttcggatgtgcaaatgtgcctaggttggtttcaaacataggagtatattcagtacccatttattaccaattcgtaactatcttcttcgacttattgtattcaagggaccccttgatatgttagacaaaaaagaagaagctacattaacaaatatcgaaagcctgtaaaatcttttaccaatagatggtgctgataaggacgtagtgatagatttcctacttgtgtatgggtacctcctcagacatagcaaaattaaagcctggtccagctatgcccaaagtacaaatgtgttgggagaagtgagcagcaactgtacttgaggaagaacttgtatcagtggtaaagatattatggtttcgggacccattgcttgcactcttacgtccacgttcggtgtattacatagtgacattgccatatgaaattgtaaagtaaataaaggttgataagctgtgaggttgaagctagagacgccgctgttttaagtttcttcaaggacaagggaacattaatgtcacctaaagtactttcctcgatggaggttgaagctggttttgctggcgatggcgtcggttcaaataatggaccacaagacatgtggtcacttggcgagatagatccaaaaagagcaaggttcccgtgctgcattgtctggactcctcttcctgtagtttcatggcttgctccttacatagggcatgtcggaatctgtcaggaggacggggctgtcttggattttgctggttcgaatttggtgagcgtggataattttgcttatggttcagttgccagatacctccagcttgacagaaagaagtgctgccttcccgttaatcttgcagaacacgtatgcaagcagtcttacaaccattcagaattaggagcagcgatatcatgggacgatgctctgcgatcgagcatgagacgcttccagcacaagtactacaacctgttcacctgcaactgccactcgtttgtggcgagctgcctgaaccggcttgcctacaatggctccctggagtggaatgtcttgaacgtggctgcccttgtctggtttcatggccgatgggtggacagaatgtcttccgttcggtcgttcttacctgtcctacccgtgacatgcatcggcatcttaatggctggctggtctttcctgctagggatggcagcgttctctgctctttctgattggatggtttgttttcacagtgtactgcgttaagggtttggtatgttgactggaaaaagaattactgaaagcactccattagtgcattgcagtctaggaattatggatgtaatcgctgtgctggagtcaggtaaatcactcgtgtcctcagcctcagtgattcagacctgtgcaagttcgtcaaacaaaaaaattgacctatggaggtggtctggagataatttggttcatggcaagttcgtcaatttatttagtgctgttccaaggaaaaaagaaattcttttgattcaagcatctctttctgaacttaacaacttgatgtattagttttatatttaatattccaagaaatcacatcatagtatatcaatgctctctaatat

SEQ ID NO: 74272 - DNA, 1958 bp, Zea Mays
actaacaaactttaaatcttttttgaaaaaaatcatacatattccttccaccctactctaattatatacataatttcaaatttaaattcattatactttagctataataaaaaaataaaattgtagacgattttctaatttaaacttgttagaaattttatttttttattactctttatgtatttcaaaatttaacttgaaattttgtatatgattagagtagggtggaaagtatatgtatgaattttttcaatttttttaaactttattagttcatgtgtacagatatgttctcaacaaataaagaaaactttaggcttcatgcaagctgaatttgaagtgtccaagttctgacattgtgccacctgatttgtcctcgactctccacgtcgcgcgctcccatttgagagtctgactggtaggccttggttggattcgaactcacaacgatacggcggagtcccgtgttcggtgttccctgatgggcaactccatcaaccgactcgccggcggcgcgcctctcccgccggagttcgctggaggcatgcctttttgtcgtcaccccatcccaaacatctaggcgttcctcttccccacctctacccgcggttctccctggcccctgggcccgtttgcgtgctactaccggctacggctacggcctacggggaaagcaactgtggcaagtacggagaatgcaagtgcaaccgtccggcacggaggcacaaaagaaagccgccgacgaaacgaaagcgcctgccacctgcgggtgctccccatccggtccagtcatcttcttcctgcccaatacggcgagcatcggcggcggcgacccaagcaggttgacctcgccccttcaccgaccagcgggtcgtacagcaagccgatccaattcctccgtaaataaaggttgataagctgtgaggttgaagctagagacgccgctgttttaagtttcttcaaggacaagggaacattaatgtcacctaaagtactttcctcgatggaggttgaagctggttttgctggcgatggcgtcggttcaaataatggaccacaagacatgtggtcacttggcgagatagatccaaaaagagcaaggaggacggggctgtcttggattttgctggttcgaatttggtgagcgtggataattttgcttatggttcagttgccagatacctccagcttgacagaaagaagtgctgccttcccgttaatcttgcagaacacgtatgcaagcagtcttacaaccattcagaattaggagcagcgatatcatgggacgatgctctgcgatcgagcatgagacgcttccagcacaagtactacaacctgttcacctgcaactgccactcgtttgtggcgagctgcctgaaccggcttgcctacaatggctccctggagtggaatgtcttgaacgtggctgcccttgtctggtttcatggccgatgggtggacagaatgtcttccgttcggtcgttcttacctgtcctacccgtgacatgcatcggcatcttaatggctggctggtctttcctgctagggatggcagcgttctctgctctttctgattggatggtttgttttcacagtgtactgcgttaagggtttggtatgttgactggaaaaagaattactgaaagcactccattagtgcattgcagtctaggaattatggatgtaatcgctgtgctggagtcaggtaaatcactcgtgtcctcagcctcagtgattcagacctgtgcaagttcgtcaaacaaaaaaattgacctatggaggtggtctggagataatttggttcatggcaagttcgtcaatttatttagtgctgttccaaggaaaaaagaaattcttttgattcaagcatctctttctgaacttaacaacttgatgtattagttttatatttaatattccaagaaatcacatcatagtatatcaatgctctctaatat

SEQ ID NO: 74273 - DNA, 1238 bp, Zea Mays
cgccatttcgttgaactgctggaagacacgtcggtgcacactagatttggattggggagaggagaagcgacagctttcggatgtgcaaatgtgcctagtaaataaaggttgataagctgtgaggttgaagctagagacgccgctgttttaagtttcttcaaggacaagggaacattaatgtcacctaaagtactttcctcgatggaggttgaagctggttttgctggcgatggcgtcggttcaaataatggaccacaagacatgtggtcacttggcgagatagatccaaaaagagcaaggttcccgtgctgcattgtctggactcctcttcctgtagtttcatggcttgctccttacatagggcatgtcggaatctgtcaggaggacggggctgtcttggattttgctggttcgaatttggtgagcgtggataattttgcttatggttcagttgccagatacctccagcttgacagaaagaagtgctgccttcccgttaatcttgcagaacacgtatgcaagcagtcttacaaccattcagaattaggagcagcgatatcatgggacgatgctctgcgatcgagcatgagacgcttccagcacaagtactacaacctgttcacctgcaactgccactcgtttgtggcgagctgcctgaaccggcttgcctacaatggctccctggagtggaatgtcttgaacgtggctgcccttgtctggtttcatggccgatgggtggacagaatgtcttccgttcggtcgttcttacctgtcctacccgtgacatgcatcggcatcttaatggctggctggtctttcctgctagggatggcagcgttctctgctctttctgattggatggtttgttttcacagtgtactgcgttaagggtttggtatgttgactggaaaaagaattactgaaagcactccattagtgcattgcagtctaggaattatggatgtaatcgctgtgctggagtcaggtaaatcactcgtgtcctcagcctcagtgattcagacctgtgcaagttcgtcaaacaaaaaaattgacctatggaggtggtctggagataatttggttcatggcaagttcgtcaatttatttagtgctgttccaaggaaaaaagaaattcttttgattcaagcatctctttctgaacttaacaacttgatgtattagttttatatttaatattccaagaaatcacatcatagtatatcaatgctctctaatat

SEQ ID NO: 74274 - DNA, 860 bp, Zea Mays
aaatttgtaggtttcctatttcagaggtgttcctgtttcaatatagatgacatgttaaagttcaattctgaagtttcgtaaactgtttggtttgatttttttctgtgctgccttcccgttaatcttgcagaacacgtatgcaagcagtcttacaaccattcagaattaggagcagcgatatcatgggacgatgctctgcgatcgagcatgagacgcttccagcacaagtactacaacctgttcacctgcaactgccactcgtttgtggcgagctgcctgaaccggcttgcctacaatggctccctggagtggaatgtcttgaacgtggctgcccttgtctggtttcatggccgatgggtggacagaatgtcttccgttcggtcgttcttacctgtcctacccgtgacatgcatcggcatcttaatggctggctggtctttcctgctagggatggcagcgttctctgctctttctgattggatggtttgttttcacagtgtactgcgttaagggtttggtatgttgactggaaaaagaattactgaaagcactccattagtgcattgcagtctaggaattatggatgtaatcgctgtgctggagtcaggtaaatcactcgtgtcctcagcctcagtgattcagacctgtgcaagttcgtcaaacaaaaaaattgacctatggaggtggtctggagataatttggttcatggcaagttcgtcaatttatttagtgctgttccaaggaaaaaagaaattcttttgattcaagcatctctttctgaacttaacaacttgatgtattagttttatatttaatattccaagaaatcacatcatagtatatcaatgctctctaatat

SEQ ID NO: 74275 - DNA, 1569 bp, Zea Mays
ctctttcctctcgctccctctgcttctggatacttccgatgcctctcctcgctccctcggtcgctgctgatgcgccacgccgccgccggcgcctcatcggcaggaatcatatggacagcccagaggtggtggcctccgcgtccccggctgcggcggcgagcgagcgccaggagaggcccgcgaggctgcggcggaagatctcgtccgcgttctgcgcctgcatgggccatcccccggcgtcgcacgcgcagcagtaggcatgctacggtgcgtactcaaatctaccagctgcgtgcggtccgtcgtggggtatggctgacgagcggcctggggttctcgctctctttcttgctatgcaacaaacatttgtgatttgtgcttacacgtgagaccgtgcttgctgtaagatttttctcccctcttttttgtggaggtcataggaatccctccacatcgccctctccccgttgtccctctcccgtcacttcatcatctcttccagtcgtttcatctttctcggcagctttggcttcagtcatcggcttcgcaagttcgcatcgacatggggttctaattggacaacctaaggcttacaacgagccgtggtctaaccacccaaactgactgctcagtgacagaaatcagacaggttggtatctaatgtttaaatataatggcataaattctagcaccttgaaaaagacaaactcggcacgccccattgtgcagctgatcattttttagcttatggaaaattcataatattaaacgctggagcagagcttgcctcacatgctagggtcttagagcatctccaagagcaagcaatgtattcaatattgattaattttttcaatatttcaaatgtttatcgatattattgagctgtaaatttatgaattcataaacgagattttctgtctgctaaatggttgcttgccaaagatttgtgattagaagcaaacaaacttaatcttcaatagcaattctgttccacacatggccctgatccatgtctcggttttactttcaaccggaggatttggaattctggaaccaaggaatcagatacagagaaatagaagaacatatagaatagagtagtttagggcagatttagagtttgttattttagcccaatgatggatgttgtctcttctaaacattcgcactactactttctatatattaagagtgggagccaatctggaatgctagaccatccgcatcatttttatgtcgttcgatcatccattaactatctgattgtatcagtcacatatgagtttaactgtatgattgccttttaatatcgtaggattattgtgttcattggatttgactgtctgattgtgtcagtcaaatttgagttcattttgtttgcgagctagaatgaaaaacaaaattttgagtggctcaaacaggacttacactggttgcctgcatatatatcgcgggattctcacgtcgttgtttcatatttcatttgcacgaatggttctcgatggccaggacacaacctctgaattttaggccacaaccaactgcggtcgaaggagcaagtatttt

SEQ ID NO: 74276 - DNA, 1213 bp, Zea Mays
ctcctcccttccttccttctccgctcgtcgtcgttctaccggcatggccggcattaccaagcgccgcacctccccggcctccacctcctcttcgtccggcgacgtcttgccgcagcgggtcacccggaagcgtcggtccgcccgccgcgggccccggagcaccgcccgtaggccgtcggcgcctccacctatgaatgaactggacttgaatacagctgctcttgatccggatgtaagcattatgctacaggattgagagttcttcttcagaaggagctccgaaatagcgatgtaagccagcttgggagaattgttctcccaaagaaggaggcggagtcttacctccctattctgatggcaaaggatggaaagagtttatgcatgcatgacttgctaaattcacaactgtggaccttcaagtatagatattggttcaacaacaaaagcaggatgtatgtgcttgaaaataccggagattatgtaaaagctcatgaccttcagcaaggagacttcatcgtgatctacaaggacgacgagaacaaccgctttgtcataggagcaaagaaggcaggagatgagcagaccgccactgtacctcaagtccatgaacacatgcacatctctgccgcactgccagctccacaagcgttccatgactatgcaggccccgtcgcagcagaagctggtatgctcgcgatcgtgccacagggtgacgagatattcgacggcatactgaactccctgccggagataccagtggcgaacgtgaggtactccgacttcttcgacccgttcggtgactccatggacatggcgaatccgctgagctcctccaataacccctcggtcaacctggctacgcatttccatgacgagaggatcgggagctgctcgtttccctacccaaaatccgggcctcagatgtgagatccgggcagaaaaactgccgcggtcaaaaccatcatcccctgcgtggaactcagagatcccctggttgacgccattgctgtacatccaaataaatggcgtcctcattttgtatgtttagtagtatatgattgggtacgcgtgttgtttatgtgtaaaagggtaactctgcaaaactgaactgagcgttacatcagatgcaacgctgtgacgactgacgaggaggcaggctctggtgtttcctgtcctgcaccctgtgaatgtgtgtgcaggtacataaacgaaa

SEQ ID NO: 74277 - DNA, 1223 bp, Zea Mays
cttccttccttctccgctcgtcgtcgttctaccggcatggccggcattaccaagcgccgcacctccccggcctccacctcctcttcgtccggcgacgtcttgccgcagcgggtcacccggaagcgtcggtccgcccgccgcgggccccggagcaccgcccgtaggccgtcggcgcctccacctatgaatgaactggacttgaatacagctgctcttgatccggatagattctgcaatgtttgtgtagcattatgctacaggattgagagttcttcttcagaaggagctccgaaatagcgatgtaagccagcttgggagaattgttctcccaaagaaggaggcggagtcttacctccctattctgatggcaaaggatggaaagagtttatgcatgcatgacttgctaaattcacaactgtggaccttcaagtatagatattggttcaacaacaaaagcaggatgtatgtgcttgaaaataccggagattatgtaaaagctcatgaccttcagcaaggagacttcatcgtgatctacaaggacgacgagaacaaccgctttgtcataggagcaaagaaggcaggagatgagcagaccgccactgtacctcaagtccatgaacacatgcacatctctgccgcactgccagctccacaagcgttccatgactatgcaggccccgtcgcagcagaagctggtatgctcgcgatcgtgccacagggtgacgagatattcgacggcatactgaactccctgccggagataccagtggcgaacgtgaggtactccgacttcttcgacccgttcggtgactccatggacatggcgaatccgctgagctcctccaataacccctcggtcaacctggctacgcatttccatgacgagaggatcgggagctgctcgtttccctacccaaaatccgggcctcagatgtgagatccgggcagaaaaactgccgcggtcaaaaccatcatcccctgcgtggaactcagagatcccctggttgacgccattgctgtacatccaaataaatggcgtcctcattttgtatgtttagtagtatatgattgggtacgcgtgttgtttatgtgtaaaagggtaactctgcaaaactgaactgagcgttacatcagatgcaacgctgtgacgactgacgaggaggcaggctctggtgtttcctgtcctgcaccctgtgaatgtgtgtgcaggtacataaacgaaa

SEQ ID NO: 74278 - DNA, 4869 bp, Zea Mays
ttatgattctaccagatatgtctttttgattccgtcgaaaatcgattttacggtataggcgcttatgacctcccctctatgccttgcggtaatgattcctctggcattacggcctttaccacaacggtgccgtccatggaccaatttatttcgtggattggatttcacttgcctgtctatggtttccttgcgtgtgctcaggataggtgttttgtataaatgtttcgccgtattattaagtattctcctttagttcgtttctctatctagaagtagaatagaataacccggttgaagggtaatgatcatacgtctgtaatacattgtatgtcccaaaataagtctcattcttctaccctttccgggtagtcgatggcagctaccttaacaccaaagaagagttcgactagttgaactcgaaagctcgaggcccaggcgacgcgacgcggccacgcccacgtccttccatggcgaccgctctccccgcctccgcctccgccgcttgccttctccagctctcccggcgcggtctccctggaacatcttctgtgctctccccgcttcgcaccgccactttccgctggcacggtgcctgtaacgtggcctgttcatgctctcccggcccccggccggcggttcccgcggagcgaagggacggcgtcgctggccatgccacttctccagagggaactgtacgaatcgtcgccgtggttggagaaggtagcatcagcccgattaaggacgcgccctgggaagaggtcatgcgccacacggctgataggctgaagtgggtcgatgaaggatttgaaatgcttgtcttcacggataatttggttggtcatgataacctcaggaaagagttactatcacactgtgatatgctagtcaatgttgcaataacaaatcaggatgctgttcagtggcttataaacaacagcaaacacatttctaatgtaatttgctttcagtcatctccgtctttagtaaacaaactaggtggcacatatgttcagtacactggagagcaggacatgtttgggaagctaacaagtattggaaaaccaagtggcatagaggaatcaactgaagttatgaagaccatatctaatgcttgggaaagacacaattcagatgacattagattttgcttgcttgttgttgtaaatgcatacataagaccggttgctatgctgaaaaatctaagggcaaaaggcctttctaccctaacttgcatgataaagaactgtggtcctcagatactcaattgtctgtttgaccctaactgtaggaaggcccttcagtgtttgaattcctgttctccaactgatcaagtctgcaactatcgttgcattgcatcatatgaaagtccatatctggaggctttttccctctgtgttttgcagaagaacaattgccttgacctcaatgctgagatacccagtaaaccgaatgtaatgccactaaccatgttcagagaacaaaaactaagccatgaaatagcggaagatctttttgttggttggttggacagcatggaatggagttggcgagtggcagctggacaaaatccagcatatgatcaattcccatgtcagtaccagttattttacagagggaaagctaaaggttcattttggtatgagccggtttttcaggtcaaaaccctggaaggggagctggtttggaggcgcaggaggtatcgtgtgagaagggctagcactcctggtacattttacttcagtgtgttggataatggtgtcatttccaaagaatattggacaattgttgacgttgcggaggatttcagctggggtctgttccattatcatggcgcagcacaagctgctgggctatcatacactggagcagtgcttgttactccagatgggtcttatcctgacctggaagacccaagattggcctctgctttagagaactgtgctataaagaaatgggagctctatacagtcgataactgctcctgcatgggtgcaccactgggaactcctgagggttcaaagctgcaccatcaaatttctccaggaaaagaaagtagtgttttgcagagaagatgataatctgtaatatgttaaagtgactcccaaatgattatgtcgtacgtacaaagatgtacagccaagtggacatgtattgctgaagagagctcatatgtaacctgcaggccttatttatatttacagcaacagatcacactggttgcagcaatgcagcctgcactggtgagcagatgtcttcaattctgcatcacctgtgtagagctgcattactgtttgcaagatcagagccgatttcctgccatgttgtgccagtattaaatccctcataacagaacccaggagttctgaacggctgcctgggttgcggctgcggctgcagcccaacagccaaattattatcagcccctctgatttttcttgtactaaattgccttgggatttagtaatctttgattgagtacttgtattagaaattacatctaatgtagtgatgtatttatggtcatcgatgagaccaagagttgactactcgttgtacatctggaataaagatgaagttgtcttgtagatgattcagtattttatacgcactcgtacttttttagcatcttcggtgttcccatcggtacctgtcgaagcatcttgtagtgttcagacagttcagttggctatcagtgcgaaggagacacattggtcaagcagaactgcagaggaggtgtacctgggcagacaagttagagttagcaactgacccacttcactttgattttacgttattgagttgctctgcgatgtacaggtttggatctccttatgttgacccaagttctatatcctacaggtttgttttaaatttggtatactttcataaatgcaattctcacttttcgagaagtaggacaatttaaagtctgactaaaattattttaaaaaggtattaatattgaggatacagaataaatatcattatattgattataaaatatattttggtagtaaacttagttgaagacataaatgttaatgttcctctatagttttagttaaattgaatctagtttgatttgcacacatcccgtagtttggacggaagagtaagctcttgtttttccctgaattgctctgaacaacctgttcctgctttcctgaatcctggtaccatgagaaaaaacatctcatgttgtatatggtttctgctgctgcacaagattccccatgaccccatgtgatgttgcagtttgagtcaacatatgtgattcgtcagtggataatgcaaagttctttttgaacgggatcatatgactagtttgacttggctatgactctgaccgcttttgttttgtggctataaattccatccaacatcagaccctgcaatccgcacttgacagctgataggcaggcgataccgtaccgagagagttgaagctgagaaagaatggcggggctctacgagaagcagtcggagacgtacgccaagaagcgtccgcagtaccccaaggagtggttctccatgctggccagcctcaccgcggggcaccagcgcgcctgggacgccgggtgtggcaccggccaggccgccatcagcatggcggagcactacgagagcgtggtggcgacggacgtgagcgaggggcagctccggcacgccaccgcgcacccgaaggtgcggtacctccacaccccggagcacctctcggaggacgagctggtgtcgctggtcggcggcgagggctccctggacctggtcgtggtggccacctccatccactggttcgacgtcccgctcttctacgccgtcgtgagccgcgccctgcggaagcccggcggcatgctcgccgtgtggggctacaactacgagatccacccgttcgaggacgcgctgcacggccagctctacccggccctgcggccgtacctggacccgcgggcgggactggccatggagcggtacaggtccctgccgttcccgttcgagcccgtcggggtgggcgccgagggcgcgcccgccgacgtggacatcgaggtggagatgacgctggaggacctggtcgggttcctgaacaccggctctgtcgtgaccacggcgagggccaagggcgtggacctggaggcggtcacgagggccgcgctgaagcgtgtggaggagcagtggggcggcgcgcccaccgtgccgaggaagctcgtgttcaaggcgttcatgctcgccgggaggcccaagtgctgaagtgataatgccgaataagtgtttgcttgtcagtcagcgtgagattgagatgagatcacagactacaatacatcatatagccagccactggattatgtctggcgatctaatgacatctgaagccactacatccaacccaggtagaggtagcaaactgcgtattcctttcatgctgtatgcagaatgaagaagaaatacctatttccattgcctagtgaattcccattagtatttcttctttcactggattatgttgtatgcagaatgaagaagaaatacctattttcattgcctagtgaattcccattagtatttcttctttcactggattatgttgtatgcagaatgaagaagaaatacctattttcattgcctagtgaattcccattagtatttcttctttcactggattatgttgtatgcagaatgaagaagaaatacctattttcattgcctagtgaattcccattagtatttcttctttcactggattatgttgtatgagaaaaataattgttgctcgctcatatttcacgtctaagacataagataggcttgacgtgagagaagtgttggaatataatataagagtgtttggtttgaggaatgaaatgattcatcttc

SEQ ID NO: 74279 - DNA, 3901 bp, Zea Mays
ttatgattctaccagatatgtctttttgattccgtcgaaaatcgattttacggtataggcgcttatgacctcccctctatgccttgcggtaatgattcctctggcattacggcctttaccacaacggtgccgtccatggaccaatttatttcgtggattggatttcacttgcctgtctatggtttccttgcgtgtgctcaggataggtgttttgtataaatgtttcgccgtattattaagtattctcctttagttcgtttctctatctagaagtagaatagaataacccggttgaagggtaatgatcatacgtctgtaatacattgtatgtcccaaaataagtctcattcttctaccctttccgggtagtcgatggcagctaccttaacaccaaagaagagttcgactagttgaactcgaaagctcgaggcccaggcgacgcgacgcggccacgcccacgtccttccatggcgaccgctctccccgcctccgcctccgccgcttgccttctccagctctcccggcgcggtctccctggaacatcttctgtgctctccccgcttcgcaccgccactttccgctggcacggtgcctgtaacgtggcctgttcatgctctcccggcccccggccggcggttcccgcggagcgaagggacggcgtcgctggccatgccacttctccagagggaactgtacgaatcgtcgccgtggttggagaaggtagcatcagcccgattaaggacgcgccctgggaagaggtcatgcgccacacggctgataggctgaagtgggtcgatgaaggatttgaaatgcttgtcttcacggataatttggttggtcatgataacctcaggaaagagttactatcacactgtgatatgctagtcaatgttgcaataacaaatcaggatgctgttcagtggcttataaacaacagcaaacacatttctaatgtaatttgctttcagtcatctccgtctttagtaaacaaactaggtggcacatatgttcagtacactggagagcaggacatgtttgggaagctaacaagtattggaaaaccaagtggcatagaggaatcaactgaagttatgaagaccatatctaatgcttgggaaagacacaattcagatgacattagattttgcttgcttgttgttgtaaatgcatacataagaccggttgctatgctgaaaaatctaagggcaaaaggcctttctaccctaacttgcatgataaagaactgtggtcctcagatactcaattgtctgtttgaccctaactgtaggaaggcccttcagtgtttgaattcctgttctccaactgatcaagtctgcaactatcgttgcattgcatcatatgaaagtccatatctggaggctttttccctctgtgttttgcagaagaacaattgccttgacctcaatgctgagatacccagtaaaccgaatgtaatgccactaaccatgttcagagaacaaaaactaagccatgaaatagcggaagatctttttgttggttggttggacagcatggaatggagttggcgagtggcagctggacaaaatccagcatatgatcaattcccatgtcagtaccagttattttacagagggaaagctaaaggttcattttggtatgagccggtttttcaggtcaaaaccctggaaggggagctggtttggaggcgcaggaggtatcgtgtgagaagggctagcactcctggtacattttacttcagtgtgttggataatggtgtcatttccaaagaatattggacaattgttgacgttgcggaggatttcagctggggtctgttccattatcatggcgcagcacaagctgctgggctatcatacactggagcagtgcttgttactccagatgggtcttatcctgacctggaagacccaagattggcctctgctttagagaactgtgctataaagaaatgggagctctatacagtcgataactgctcctgcatgggtgcaccactgggaactcctgagggttcaaagctgcaccatcaaatttctccaggaaaagaaagtagtgttttgcagagaagatgataatctgtaatatgttaaagtgactcccaaatgattatgtcgtacgtacaaagatgtacagccaagtggacatgtattgctgaagagagctcatatgtaacctgcagcatcttcggtgttcccatcggtacctgtcgaagcatcttgtagtgttcagacagttcagttggctatcagtgcgaaggagacacattggtcaagcagaactgcagaggaggtgtacctgggcagacaagttagagttagcaactgacccacttcactttgattttacgttattgagttgctctgcgatgtacaggtttggatctccttatgttgacccaagttctatatcctacagaccctgcaatccgcacttgacagctgataggcaggcgataccgtaccgagagagttgaagctgagaaagaatggcggggctctacgagaagcagtcggagacgtacgccaagaagcgtccgcagtaccccaaggagtggttctccatgctggccagcctcaccgcggggcaccagcgcgcctgggacgccgggtgtggcaccggccaggccgccatcagcatggcggagcactacgagagcgtggtggcgacggacgtgagcgaggggcagctccggcacgccaccgcgcacccgaaggtgcggtacctccacaccccggagcacctctcggaggacgagctggtgtcgctggtcggcggcgagggctccctggacctggtcgtggtggccacctccatccactggttcgacgtcccgctcttctacgccgtcgtgagccgcgccctgcggaagcccggcggcatgctcgccgtgtggggctacaactacgagatccacccgttcgaggacgcgctgcacggccagctctacccggccctgcggccgtacctggacccgcgggcgggactggccatggagcggtacaggtccctgccgttcccgttcgagcccgtcggggtgggcgccgagggcgcgcccgccgacgtggacatcgaggtggagatgacgctggaggacctggtcgggttcctgaacaccggctctgtcgtgaccacggcgagggccaagggcgtggacctggaggcggtcacgagggccgcgctgaagcgtgtggaggagcagtggggcggcgcgcccaccgtgccgaggaagctcgtgttcaaggcgttcatgctcgccgggaggcccaagtgctgaagtgataatgccgaataagtgtttgcttgtcagtcagcgtgagattgagatgagatcacagactacaatacatcatatagccagccactggattatgtctggcgatctaatgacatctgaagccactacatccaacccaggtagaggtagcaaactgcgtattcctttcatgctgtatgcagaatgaagaagaaatacctatttccattgcctagtgaattcccattagtatttcttctttcactggattatgttgtatgcagaatgaagaagaaatacctattttcattgcctagtgaattcccattagtatttcttctttcactggattatgttgtatgcagaatgaagaagaaatacctattttcattgcctagtgaattcccattagtatttcttctttcactggattatgttgtatgcagaatgaagaagaaatacctattttcattgcctagtgaattcccattagtatttcttctttcactggattatgttgtatgagaaaaataattgttgctcgctcatatttcacgtctaagacataagataggcttgacgtgagagaagtgttggaatataatataagagtgtttggtttgaggaatgaaatgattcatcttc

SEQ ID NO: 74280 - DNA, 4428 bp, Zea Mays
ttatgattctaccagatatgtctttttgattccgtcgaaaatcgattttacggtataggcgcttatgacctcccctctatgccttgcggtaatgattcctctggcattacggcctttaccacaacggtgccgtccatggaccaatttatttcgtggattggatttcacttgcctgtctatggtttccttgcgtgtgctcaggataggtgttttgtataaatgtttcgccgtattattaagtattctcctttagttcgtttctctatctagaagtagaatagaataacccggttgaagggtaatgatcatacgtctgtaatacattgtatgtcccaaaataagtctcattcttctaccctttccgggtagtcgatggcagctaccttaacaccaaagaagagttcgactagttgaactcgaaagctcgaggcccaggcgacgcgacgcggccacgcccacgtccttccatggcgaccgctctccccgcctccgcctccgccgcttgccttctccagctctcccggcgcggtctccctggaacatcttctgtgctctccccgcttcgcaccgccactttccgctggcacggtgcctgtaacgtggcctgttcatgctctcccggcccccggccggcggttcccgcggagcgaagggacggcgtcgctggccatgccacttctccagagggaactgtacgaatcgtcgccgtggttggagaaggtagcatcagcccgattaaggacgcgccctgggaagaggtcatgcgccacacggctgataggctgaagtgggtcgatgaaggatttgaaatgcttgtcttcacggataatttggttggtcatgataacctcaggaaagagttactatcacactgtgatatgctagtcaatgttgcaataacaaatcaggatgctgttcagtggcttataaacaacagcaaacacatttctaatgtaatttgctttcagtcatctccgtctttagtaaacaaactaggtggcacatatgttcagtacactggagagcaggacatgtttgggaagctaacaagtattggaaaaccaagtggcatagaggaatcaactgaagttatgaagaccatatctaatgcttgggaaagacacaattcagatgacattagattttgcttgcttgttgttgtaaatgcatacataagaccggttgctatgctgaaaaatctaagggcaaaaggcctttctaccctaacttgcatgataaagaactgtggtcctcagatactcaattgtctgtttgaccctaactgtaggaaggcccttcagtgtttgaattcctgttctccaactgatcaagtctgcaactatcgttgcattgcatcatatgaaagtccatatctggaggctttttccctctgtgttttgcagaagaacaattgccttgacctcaatgctgagatacccagtaaaccgaatgtaatgccactaaccatgttcagagaacaaaaactaagccatgaaatagcggaagatctttttgttggttggttggacagcatggaatggagttggcgagtggcagctggacaaaatccagcatatgatcaattcccatgtcagtaccagttattttacagagggaaagctaaaggttcattttggtatgagccggtttttcaggtcaaaaccctggaaggggagctggtttggaggcgcaggaggtatcgtgtgagaagggctagcactcctggtacattttacttcagtgtgttggataatggtgtcatttccaaagaatattggacaattgttgacgttgcggaggatttcagctggggtctgttccattatcatggcgcagcacaagctgctgggctatcatacactggagcagtgcttgttactccagatgggtcttatcctgacctggaagacccaagattggcctctgctttagagaactgtgctataaagaaatgggagctctatacagtcgataactgctcctgcatgggtgcaccactgggaactcctgagggttcaaagctgcaccatcaaatttctccaggaaaagaaagtagtgttttgcagagaagatgataatctgtaatatgttaaagtgactcccaaatgattatgtcgtacgtacaaagatgtacagccaagtggacatgtattgctgaagagagctcatatgtaacctgcagcatcttcggtgttcccatcggtacctgtcgaagcatcttgtagtgttcagacagttcagttggctatcagtgcgaaggagacacattggtcaagcagaactgcagaggaggtgtacctgggcagacaagttagagttagcaactgacccacttcactttgattttacgttattgagttgctctgcgatgtacaggtttggatctccttatgttgacccaagttctatatcctacaggtttgttttaaatttggtatactttcataaatgcaattctcacttttcgagaagtaggacaatttaaagtctgactaaaattattttaaaaaggtattaatattgaggatacagaataaatatcattatattgattataaaatatattttggtagtaaacttagttgaagacataaatgttaatgttcctctatagttttagttaaattgaatctagtttgatttgcacacatcccgtagtttggacggaagagtaagctcttgtttttccctgaattgctctgaacaacctgttcctgctttcctgaatcctggtaccatgagaaaaaacatctcatgttgtatatggtttctgctgctgcacaagattccccatgaccccatgtgatgttgcagtttgagtcaacatatgtgattcgtcagtggataatgcaaagttctttttgaacgggatcatatgactagtttgacttggctatgactctgaccgcttttgttttgtggctataaattccatccaacatcagaccctgcaatccgcacttgacagctgataggcaggcgataccgtaccgagagagttgaagctgagaaagaatggcggggctctacgagaagcagtcggagacgtacgccaagaagcgtccgcagtaccccaaggagtggttctccatgctggccagcctcaccgcggggcaccagcgcgcctgggacgccgggtgtggcaccggccaggccgccatcagcatggcggagcactacgagagcgtggtggcgacggacgtgagcgaggggcagctccggcacgccaccgcgcacccgaaggtgcggtacctccacaccccggagcacctctcggaggacgagctggtgtcgctggtcggcggcgagggctccctggacctggtcgtggtggccacctccatccactggttcgacgtcccgctcttctacgccgtcgtgagccgcgccctgcggaagcccggcggcatgctcgccgtgtggggctacaactacgagatccacccgttcgaggacgcgctgcacggccagctctacccggccctgcggccgtacctggacccgcgggcgggactggccatggagcggtacaggtccctgccgttcccgttcgagcccgtcggggtgggcgccgagggcgcgcccgccgacgtggacatcgaggtggagatgacgctggaggacctggtcgggttcctgaacaccggctctgtcgtgaccacggcgagggccaagggcgtggacctggaggcggtcacgagggccgcgctgaagcgtgtggaggagcagtggggcggcgcgcccaccgtgccgaggaagctcgtgttcaaggcgttcatgctcgccgggaggcccaagtgctgaagtgataatgccgaataagtgtttgcttgtcagtcagcgtgagattgagatgagatcacagactacaatacatcatatagccagccactggattatgtctggcgatctaatgacatctgaagccactacatccaacccaggtagaggtagcaaactgcgtattcctttcatgctgtatgcagaatgaagaagaaatacctatttccattgcctagtgaattcccattagtatttcttctttcactggattatgttgtatgcagaatgaagaagaaatacctattttcattgcctagtgaattcccattagtatttcttctttcactggattatgttgtatgcagaatgaagaagaaatacctattttcattgcctagtgaattcccattagtatttcttctttcactggattatgttgtatgcagaatgaagaagaaatacctattttcattgcctagtgaattcccattagtatttcttctttcactggattatgttgtatgagaaaaataattgttgctcgctcatatttcacgtctaagacataagataggcttgacgtgagagaagtgttggaatataatataagagtgtttggtttgaggaatgaaatgattcatcttc

SEQ ID NO: 74281 - DNA, 3665 bp, Zea Mays
ttatgattctaccagatatgtctttttgattccgtcgaaaatcgattttacggtataggcgcttatgacctcccctctatgccttgcggtaatgattcctctggcattacggcctttaccacaacggtgccgtccatggaccaatttatttcgtggattggatttcacttgcctgtctatggtttccttgcgtgtgctcaggataggtgttttgtataaatgtttcgccgtattattaagtattctcctttagttcgtttctctatctagaagtagaatagaataacccggttgaagggtaatgatcatacgtctgtaatacattgtatgtcccaaaataagtctcattcttctaccctttccgggtagtcgatggcagctaccttaacaccaaagaagagttcgactagttgaactcgaaagctcgaggcccaggcgacgcgacgcggccacgcccacgtccttccatggcgaccgctctccccgcctccgcctccgccgcttgccttctccagctctcccggcgcggtctccctggaacatcttctgtgctctccccgcttcgcaccgccactttccgctggcacggtgcctgtaacgtggcctgttcatgctctcccggcccccggccggcggttcccgcggagcgaagggacggcgtcgctggccatgccacttctccagagggaactgtacgaatcgtcgccgtggttggagaaggtagcatcagcccgattaaggacgcgccctgggaagaggtcatgcgccacacggctgataggctgaagtgggtcgatgaaggatttgaaatgcttgtcttcacggataatttggttggtcatgataacctcaggaaagagttactatcacactgtgatatgctagtcaatgttgcaataacaaatcaggatgctgttcagtggcttataaacaacagcaaacacatttctaatgtaatttgctttcagtcatctccgtctttagtaaacaaactaggtggcacatatgttcagtacactggagagcaggacatgtttgggaagctaacaagtattggaaaaccaagtggcatagaggaatcaactgaagttatgaagaccatatctaatgcttgggaaagacacaattcagatgacattagattttgcttgcttgttgttgtaaatgcatacataagaccggttgctatgctgaaaaatctaagggcaaaaggcctttctaccctaacttgcatgataaagaactgtggtcctcagatactcaattgtctgtttgaccctaactgtaggaaggcccttcagtgtttgaattcctgttctccaactgatcaagtctgcaactatcgttgcattgcatcatatgaaagtccatatctggaggctttttccctctgtgttttgcagaagaacaattgccttgacctcaatgctgagatacccagtaaaccgaatgtaatgccactaaccatgttcagagaacaaaaactaagccatgaaatagcggaagatctttttgttggttggttggacagcatggaatggagttggcgagtggcagctggacaaaatccagcatatgatcaattcccatgtcagtaccagttattttacagagggaaagctaaaggttcattttggtatgagccggtttttcaggtcaaaaccctggaaggggagctggtttggaggcgcaggaggtatcgtgtgagaagggctagcactcctggtacattttacttcagtgtgttggataatggtgtcatttccaaagaatattggacaattgttgacgttgcggaggatttcagctggggtctgttccattatcatggcgcagcacaagctgctgggctatcatacactggagcagtgcttgttactccagatgggtcttatcctgacctggaagacccaagattggcctctgctttagagaactgtgctataaagaaatgggagctctatacagtcgataactgctcctgcatgggtgcaccactgggaactcctgagggttcaaagctgcaccatcaaatttctccaggaaaagaaagtagtgttttgcagagaagatgataatctgtaatatgttaaagtgactcccaaatgattatgtcgtacgtacaaagatgtacagccaagtggacatgtattgctgaagagagctcatatgtaacctgcagaccctgcaatccgcacttgacagctgataggcaggcgataccgtaccgagagagttgaagctgagaaagaatggcggggctctacgagaagcagtcggagacgtacgccaagaagcgtccgcagtaccccaaggagtggttctccatgctggccagcctcaccgcggggcaccagcgcgcctgggacgccgggtgtggcaccggccaggccgccatcagcatggcggagcactacgagagcgtggtggcgacggacgtgagcgaggggcagctccggcacgccaccgcgcacccgaaggtgcggtacctccacaccccggagcacctctcggaggacgagctggtgtcgctggtcggcggcgagggctccctggacctggtcgtggtggccacctccatccactggttcgacgtcccgctcttctacgccgtcgtgagccgcgccctgcggaagcccggcggcatgctcgccgtgtggggctacaactacgagatccacccgttcgaggacgcgctgcacggccagctctacccggccctgcggccgtacctggacccgcgggcgggactggccatggagcggtacaggtccctgccgttcccgttcgagcccgtcggggtgggcgccgagggcgcgcccgccgacgtggacatcgaggtggagatgacgctggaggacctggtcgggttcctgaacaccggctctgtcgtgaccacggcgagggccaagggcgtggacctggaggcggtcacgagggccgcgctgaagcgtgtggaggagcagtggggcggcgcgcccaccgtgccgaggaagctcgtgttcaaggcgttcatgctcgccgggaggcccaagtgctgaagtgataatgccgaataagtgtttgcttgtcagtcagcgtgagattgagatgagatcacagactacaatacatcatatagccagccactggattatgtctggcgatctaatgacatctgaagccactacatccaacccaggtagaggtagcaaactgcgtattcctttcatgctgtatgcagaatgaagaagaaatacctatttccattgcctagtgaattcccattagtatttcttctttcactggattatgttgtatgcagaatgaagaagaaatacctattttcattgcctagtgaattcccattagtatttcttctttcactggattatgttgtatgcagaatgaagaagaaatacctattttcattgcctagtgaattcccattagtatttcttctttcactggattatgttgtatgcagaatgaagaagaaatacctattttcattgcctagtgaattcccattagtatttcttctttcactggattatgttgtatgagaaaaataattgttgctcgctcatatttcacgtctaagacataagataggcttgacgtgagagaagtgttggaatataatataagagtgtttggtttgaggaatgaaatgattcatcttc

SEQ ID NO: 74282 - DNA, 3673 bp, Zea Mays
ttatgattctaccagatatgtctttttgattccgtcgaaaatcgattttacggtataggcgcttatgacctcccctctatgccttgcggtaatgattcctctggcattacggcctttaccacaacggtgccgtccatggaccaatttatttcgtggattggatttcacttgcctgtctatggtttccttgcgtgtgctcaggataggtgttttgtataaatgtttcgccgtattattaagtattctcctttagttcgtttctctatctagaagtagaatagaataacccggttgaagggtaatgatcatacgtctgtaatacattgtatgtcccaaaataagtctcattcttctaccctttccgggtagtcgatggcagctaccttaacaccaaagaagagttcgactagttgaactcgaaagctcgaggcccaggcgacgcgacgcggccacgcccacgtccttccatggcgaccgctctccccgcctccgcctccgccgcttgccttctccagctctcccggcgcggtctccctggaacatcttctgtgctctccccgcttcgcaccgccactttccgctggcacggtgcctgtaacgtggcctgttcatgctctcccggcccccggccggcggttcccgcggagcgaagggacggcgtcgctggccatgccacttctccagagggaactgtacgaatcgtcgccgtggttggagaaggtagcatcagcccgattaaggacgcgccctgggaagaggtcatgcgccacacggctgataggctgaagtgggtcgatgaaggatttgaaatgcttgtcttcacggataatttggttggtcatgataacctcaggaaagagttactatcacactgtgatatgctagtcaatgttgcaataacaaatcaggatgctgttcagtggcttataaacaacagcaaacacatttctaatgtaatttgctttcagtcatctccgtctttagtaaacaaactaggtggcacatatgttcagtacactggagagcaggacatgtttgggaagctaacaagtattggaaaaccaagtggcatagaggaatcaactgaagttatgaagaccatatctaatgcttgggaaagacacaattcagatgacattagattttgcttgcttgttgttgtaaatgcatacataagaccggttgctatgctgaaaaatctaagggcaaaaggcctttctaccctaacttgcatgataaagaactgtggtcctcagatactcaattgtctgtttgaccctaactgtaggaaggcccttcagtgtttgaattcctgttctccaactgatcaagtctgcaactatcgttgcattgcatcatatgaaagtccatatctggaggctttttccctctgtgttttgcagaagaacaattgccttgacctcaatgctgagatacccagtaaaccgaatgtaatgccactaaccatgttcagagaacaaaaactaagccatgaaatagcggaagatctttttgttggttggttggacagcatggaatggagttggcgagtggcagctggacaaaatccagcatatgatcaattcccatgtcagtaccagttattttacagagggaaagctaaaggttcattttggtatgagccggtttttcaggtcaaaaccctggaaggggagctggtttggaggcgcaggaggtatcgtgtgagaagggctagcactcctggtacattttacttcagtgtgttggataatggtgtcatttccaaagaatattggacaattgttgacgttgcggaggatttcagctggggtctgttccattatcatggcgcagcacaagctgctgggctatcatacactggagcagtgcttgttactccagatgggtcttatcctgacctggaagacccaagattggcctctgctttagagaactgtgctataaagaaatgggagctctatacagtcgataactgctcctgcatgggtgcaccactgggaactcctgagggttcaaagctgcaccatcaaatttctccaggaaaagaaagtagtgttttgcagagaagatgataatctgtaatatgttaaagtgactcccaaatgattatgtcgtacgtacaaagatgtacagccaagtggacatgtattgctgaagagagctcatatgtaacctgcaggccttatttatatttacagcaacagatcacactggttgcagcaatgcagcctgcactgagagttgaagctgagaaagaatggcggggctctacgagaagcagtcggagacgtacgccaagaagcgtccgcagtaccccaaggagtggttctccatgctggccagcctcaccgcggggcaccagcgcgcctgggacgccgggtgtggcaccggccaggccgccatcagcatggcggagcactacgagagcgtggtggcgacggacgtgagcgaggggcagctccggcacgccaccgcgcacccgaaggtgcggtacctccacaccccggagcacctctcggaggacgagctggtgtcgctggtcggcggcgagggctccctggacctggtcgtggtggccacctccatccactggttcgacgtcccgctcttctacgccgtcgtgagccgcgccctgcggaagcccggcggcatgctcgccgtgtggggctacaactacgagatccacccgttcgaggacgcgctgcacggccagctctacccggccctgcggccgtacctggacccgcgggcgggactggccatggagcggtacaggtccctgccgttcccgttcgagcccgtcggggtgggcgccgagggcgcgcccgccgacgtggacatcgaggtggagatgacgctggaggacctggtcgggttcctgaacaccggctctgtcgtgaccacggcgagggccaagggcgtggacctggaggcggtcacgagggccgcgctgaagcgtgtggaggagcagtggggcggcgcgcccaccgtgccgaggaagctcgtgttcaaggcgttcatgctcgccgggaggcccaagtgctgaagtgataatgccgaataagtgtttgcttgtcagtcagcgtgagattgagatgagatcacagactacaatacatcatatagccagccactggattatgtctggcgatctaatgacatctgaagccactacatccaacccaggtagaggtagcaaactgcgtattcctttcatgctgtatgcagaatgaagaagaaatacctatttccattgcctagtgaattcccattagtatttcttctttcactggattatgttgtatgcagaatgaagaagaaatacctattttcattgcctagtgaattcccattagtatttcttctttcactggattatgttgtatgcagaatgaagaagaaatacctattttcattgcctagtgaattcccattagtatttcttctttcactggattatgttgtatgcagaatgaagaagaaatacctattttcattgcctagtgaattcccattagtatttcttctttcactggattatgttgtatgagaaaaataattgttgctcgctcatatttcacgtctaagacataagataggcttgacgtgagagaagtgttggaatataatataagagtgtttggtttgaggaatgaaatgattcatcttc

SEQ ID NO: 74283 - DNA, 2444 bp, Zea Mays
ttactccagatgggtcttatcctgacctggaagacccaagattggcctctgctttagagaactgtgctataaagaaatgggagctctatacagtcgataactgctcctgcatgggtgcaccactgggaactcctgagggttcaaagctgcaccatcaaatttctccaggaaaagaaagtagtgttttgcagagaagatgataatctgtaatatgttaaagtgactcccaaatgattatgtcgtacgtacaaagatgtacagccaagtggacatgtattgctgaagagagctcatatgtaacctgcaggccttatttatatttacagcaacagatcacactggttgcagcaatgcagcctgcactggtgagcagatgtcttcaattctgcatcacctgtgtagagctgcattactgtttgcaagatcagagccgatttcctgccatgttgtgccagtattaaatccctcataacagaacccaggagttctgaacggctgcctgggttgcggctgcggctgcagcccaacagccaaattattatcagcccctctgatttttcttgtactaaattgccttgggatttagtaatctttgattgagtacttgtattagaaattacatctaatgtagtgatgtatttatggtcatcgatgagaccaagagttgactactcgttgtacatctggaataaagatgaagttgtcttgtagatgattcagtattttatacgcactcgtacttttttagcatcttcggtgttcccatcggtacctgtcgaagcatcttgtagtgttcagacagttcagttggctatcagtgcgaaggagacacattggtcaagcagaactgcagaggaggtgtacctgggcagacaagttagagttagcaactgacccacttcactttgattttacgttattgagttgctctgcgatgtacaggtttggatctccttatgttgacccaagttctatatcctacagctgataggcaggcgataccgtaccgagagagttgaagctgagaaagaatggcggggctctacgagaagcagtcggagacgtacgccaagaagcgtccgcagtaccccaaggagtggttctccatgctggccagcctcaccgcggggcaccagcgcgcctgggacgccgggtgtggcaccggccaggccgccatcagcatggcggagcactacgagagcgtggtggcgacggacgtgagcgaggggcagctccggcacgccaccgcgcacccgaaggtgcggtacctccacaccccggagcacctctcggaggacgagctggtgtcgctggtcggcggcgagggctccctggacctggtcgtggtggccacctccatccactggttcgacgtcccgctcttctacgccgtcgtgagccgcgccctgcggaagcccggcggcatgctcgccgtgtggggctacaactacgagatccacccgttcgaggacgcgctgcacggccagctctacccggccctgcggccgtacctggacccgcgggcgggactggccatggagcggtacaggtccctgccgttcccgttcgagcccgtcggggtgggcgccgagggcgcgcccgccgacgtggacatcgaggtggagatgacgctggaggacctggtcgggttcctgaacaccggctctgtcgtgaccacggcgagggccaagggcgtggacctggaggcggtcacgagggccgcgctgaagcgtgtggaggagcagtggggcggcgcgcccaccgtgccgaggaagctcgtgttcaaggcgttcatgctcgccgggaggcccaagtgctgaagtgataatgccgaataagtgtttgcttgtcagtcagcgtgagattgagatgagatcacagactacaatacatcatatagccagccactggattatgtctggcgatctaatgacatctgaagccactacatccaacccaggtagaggtagcaaactgcgtattcctttcatgctgtatgcagaatgaagaagaaatacctatttccattgcctagtgaattcccattagtatttcttctttcactggattatgttgtatgcagaatgaagaagaaatacctattttcattgcctagtgaattcccattagtatttcttctttcactggattatgttgtatgcagaatgaagaagaaatacctattttcattgcctagtgaattcccattagtatttcttctttcactggattatgttgtatgcagaatgaagaagaaatacctattttcattgcctagtgaattcccattagtatttcttctttcactggattatgttgtatgagaaaaataattgttgctcgctcatatttcacgtctaagacataagataggcttgacgtgagagaagtgttggaatataatataagagtgtttggtttgaggaatgaaatgattcatcttc

SEQ ID NO: 74284 - DNA, 2094 bp, Zea Mays
aagttgtgcccaagattcatgatcatgaggtagtacatgttcccaagctcctttgggatctccgagtcgagttgattaaatgacaaatccagaaatatcatggatccattcttattgaaggtatactctgtgctccccatgtacacccgagtgaagttgcacagcttcttgcttggcatccggctgagctcttcaggccgaatgctggtgaactctagcaagctccccttgccatggcactcgctgctcagctcgtcatttcgaagatacacatatggccgcccaaggacaaggccgacgttcatcttcccagactgttttgccagttccgccggtattgaccctttaagctggttactgttcaagtccagccagaccaagctctggcagttgccaagctcagccggtattggccccgagaaggaattgttgctcagcttcaagatggccaagttgctgagctgcccaagccaagccgggatcggaccagacagctggttgctcgccaaggatatccagttcagctccttgcacttggagagttcccgcgggatgccaccggtgagcccgttgtagtcgaggatgagatgctcgagcctgaccaaattttccagggacgccggaatctcgccctccaacaagttctgccacagaatgaggtcccggagctcccggagttttccgagggatgcgggaagggtgccgttgatgttgttgaggctgaggtcgagagattcgagcttggtgcagttggagattgactccgggatggcgccggagaggtagttgttctggaggtacagcatgcggaggctggagttggggccttggcagatggacgaagggatggtgccggagaaggtgttggagctgaggtccagcacgtcgagctccggcagcgctgccaaggagtccggaatggtgccgttgaagtggttgaaggagagggacagcaccttgagctgccgtagttcgttgtaagcgtcggcggggagctcgctggagaagttgttgtttgacaggtttagcgcggtgagagcggtgagggcggcgacgtccggcgggaacgggccgaccaggtggttgcctgagaggttgagcgttctcaggccacggcagtcagcgagaatcccgccggctacctcgcccgcgatgaggttgccggagaggtcgaggtactcaagcccagagcagttggtgagctctgggagccgagagatcttgttcccggagaggtccagacggcggaccgcgccgacgccggcgcccaccatccaccggaggtcgccatcgccggagatcttgttgtcggacaagtcgagagcgtctagccggccaaatccggaagaagcgacagcgccggcagacctcggcccaccgaccgaaccgccggagaggttcagagcgctaaggccggtgcaggaagcggccagcgcctcgacgtcggcgacggtgccccgcaggccggcattccctgacaggtcgagcgactgcagcttggccccgcacctcggcgcggcggccagcgcgccgctgacgttggtgccgcgcaggctgagcgtctcgaggctgctcagctgcagcagggtggccgcgacggcccggaagtcggcattgagcgggacggcggcgagcgacagcgacgtgaggcgaccgcccctgcagccggcgcctgggaacctgcaggcgccatcgctggcgctccacccgcgcaggtccggggcctggctaggcacggcctccttgaactgctccagcagctgggcatcgtcgccgtcggaggcggtggccgccacgacgacgacgaagagtgccactacagcgaccagcaccagccccggagattccatgagctagcgcgctaccttataaaaccattaaagaagcgggacggcgacgggggaggagccgacgagatggtacgggagggagggagaggtggggaggagatggtgagtgcaggagggaggtgggggagtgtggagaatgggctgctatacctagagagagaagcacaaggaaggaagaagcaacagtgaaagagagggagagtggaggagacgggagcaaattaacagctgtaggtgagggaag

SEQ ID NO: 74285 - DNA, 1303 bp, Zea Mays
attggcatctatctgtttctccgtatgcagttgcagtacattggctacagtgtcacggactcgcggtgagccccacggaggaacgggctacccaaactcgccggattcctacctgtcccggccaacccacctcgccgaaccactccaccaaccacgaacctgaaaccctagccacgcccatgagcgacgacgcgaccgccgccgcgccctcttcgccgtcgacctccccttccccatcctctgcttcctcatcaggcgcctccccgtcgccttcctccccgcgcaccaagcgccgccgcaccgaccggtacgctctcggtttcgagttcgccccgcgactcgcgccctacgaactccctgaggaaccgctccccgacaagcacaagcgctcctggcccaactggacggagcgctccaccttggctctcctcgacgcctggggcgacagcttcgtccgcgcggggcgcagcatcatccgcgccgacgagtggctcgaggtcgcccgcctcgtgtgcgccgccgtgggccgtcccgcggggtatttctctgatgcgcagtgccgcaaccgagtggacacgcttaggaagaagtttaagaaggagagggagagagcgcgccgtgccgcgcgccgctccggtccctccccttccaaatgggtttattacgacaagatggtggcaattctgtgcccgaccccgcctccgctgccgaccctgcctccgcctgcccgtccccctccgctgcctctccagttgctgcctctggtcgcaaagcgccgccgcgacaggcagccagcgcggcgctttcagtgggggatgaaagctcctgagcgtcttcttggtggtgccggagacgtcgtaggtcccagggtttcagggtcaggtgcgaagttgggtgaacttggaccgcagaaaaatagtgctgttcaagggaagcggaatggtttcatggccctcacagagtcaattcagaagtttgaggaggcttttgcgaggatggagagtagcaagaggcagcacatggtgaaggtggagcaaatgaggagggatttgcaaagggacctagatgcaaagtggagggagatattggagaaggcgcaagcggagattggtcgccttagtaatgaggatggggatgaacatgatgtggacgaagatggggatgttggcgatggtaagagattggagggtggtgatgagcaaaacaatggtgctatggatgcttctccttagcatatagcctagatgcttacaaaatgagagttgtgggggtggaacattttcgtgagccagtaatagtttct

SEQ ID NO: 74286 - DNA, 256 bp, Zea Mays
gtgagtcatgactttatatggaacaaaattggggttatcatgtcgatagatgaatccacatgatagacatgtggttatgattaactccgtagctgctgatattagtattattgtataattctcatatgtgtttctttttttttactccgcaatgctaagcaaaagattactgctattttggttactgtacatagctatttgcttaccgacgtgtgttttcaagataataatatcatttggtcgctcttagttataa

SEQ ID NO: 74287 - DNA, 1078 bp, Zea Mays
cggcaggtgcccgaaaaccgcaggcatggctgacatcattcccggcggtcctattcatcaaatcatcagtcattcaccttcccggctttccacaaactcaaaccctgctacccatgaccgccgccgccgccgccgcccgcgcggcgcgccggcacttctcttctcggctccagactaccacctcgcgccttctccatgcaagtgattctcaggcagcggcgcgggagacatccgggagcttcatccaccccgccgctgtcgtccacccggatgcagccatcgggcaggctgtctcaataggtcccttttgcactgttgggccttcagccagagttggtgatacctgtcagttacatgccgggagccatgtcatgggccatactgagctaggggagggatgcattgttcaaacactggagatgaatgctttctacatattggtagaaataatgagatcagagagtactgctctgttcaccgctcttctaaatcttgtgactgcacggttattggtgacaataatctcattatgggttcgtctcatattgctcatgattgcaagattggtaacaataacatctttgctaataatactctatttgctggtcacgtaattgttgaagattggactcacactgcaggggctgttgttgtccatcaattttgtcatattgggtcatactcatttcttggcggaggctccgtggtatgtttctatataaatttgatctgcattacttaccacagaactttatgctaaaaatgagacttcatgtagttttaccaaccatgcctgaaaactatgaaaaaatgtactctcacaaatttaaaatgggtaattaggaaccaggaatatcaatcagcatgcacttgatgttatggtgtttccggaggaataggtacatgattacctggagttcacgagttgtcaattatggtgtattttctcatcaagggggctctcagcctctcacagttaatatcatttattttatagttgtttccagttttccacagttttttctttccctctatctgcttgttgaaacctgattgagttgtagctctcactatcttg

SEQ ID NO: 74288 - DNA, 2792 bp, Zea Mays
ggcaggtgcccgaaaaccgcaggcatggctgacatcattcccggcggtcctattcatcaaatcatcagtcattcaccttcccggctttccacaaactcaaaccctgctacccatgaccgccgccgccgccgccgcccgcgcggcgcgccggcacttctcttctcggctccagactaccacctcgcgccttctccatgcaagtgattctcaggcagcggcgcgggagacatccgggagcttcatccaccccgccgctgtcgtccacccggatgcagccatcgggcaggctgtctcaataggtcccttttgcactgttgggccttcagccagagttggtgatacctgtcagttacatgccgggagccatgtcatgggccatactgagctaggggagggatgcattgttcaaacgtgagatagcatctttctctctcttttgtcgcctgaatttgtgccccttttgtgaataatatatgctcacaatgcctacattgggaatccatattcggacatataattgaagcaaagaaagatacattgaatgttttttgtgaaataaaactacaaccaaattaaacatggatcactgttacgaacacaaagtttgatgccatcacaacagcacatgagatggagctctagcccttcaggtccattattttgttttaggtgtgtttcacataagcagttgaaaatagttcttgtcttgttgcttctctgtcattagtggagtatcactccctcaggccttggtcccttttgactcgagcacttgacaagtacatctgtgaaaacttttttgatgaaaaataacaaaggagattgaaaattcaccatatagagttacttggctcaatttattttgtttcttaacaactgaaccataggaaatgacactctatgcatgaatttgcaaaatcaaggataacgcatcatatcgcaaacccctaatataccttacagtgtgatgtgtgtaggagactctagagtccaaaggttttagacgcagtagaactaaaataaaatacatgagatgtgacttcaacactactacacatgagaaaggaaatgctagtttggaaggttaagtagtggctaggaaggatacctttcggtatttaggtgcaatgctacagagagatgaagatattgatgaaaatgttaaccatagaatcaaagcaaggtcgaggaagtgtcaacaagcatctcactttctatgtgacaagagggtaccatagaagctaaaatgcaagttttataggatgacgattagacctactatgttatatagtgcagaatgttggtctaaaaaagatgttatgtttagtagataggtgttgtagaatgagtatgttgcgttgaatttatggacatataagaagggatcaagtctgaaaccccgaaacgatgatgtacatgataggctaggggtagaaccaattgaagaaaagcttttcaataccgattaagatggtttgaaggtgtccaacgaagacctccagaggcactagtacgtagtgggaatgtgggatcttaaggcgcgatactaacgggaggagaggcaggggaagaccgaagttgacatgggatagacagtaaaagaggaccggaaaaatgaaatatttcttaagacttagccttgaatatgagcgaatagaaaacaactatttacatgcctgaaccttgatttatggattttgttgggttttaactctagcctatcgtaacttacttgggactaaaaaggcttggttgttgcagtggtgctattgttggtgcagatatccctggacggacaattattggggaaaacaatgtcatcggacactatgctgttgttggtgcaaaatgccaagatttgaaatataaggtttattttttttaaatagtcactagaaagttgcaggttctgtaataaaatttccacatggcaccaaatttacttactattcatataaagtatgtctatgaactttaaaaccaatggttcttgcatctttggactagttatggaaatgtttaggctcacacatgcacacttttcatttgtagaatgagtatgttgtttggctacttcaaatgcttttctctgtgcagaccaataatgcccgtttcctcttgtttagactggagatgaatgctttctacatattggtagaaataatgagatcagagagtactgctctgttcaccgctcttctaaatcttgtgactgcacggttattggtgacaataatctcattatgggttcgtctcatattgctcatgattgcaagattggtaacaataacatctttgctaataatactctatttgctggtcacgtaattgttgaagattggactcacactgcaggggctgttgttgtccatcaattttgtcatattgggtcatactcatttcttggcggaggctccgtggtatgtttctatataaatttgatctgcattacttaccacagaactttatgctaaaaatgagacttcatgtagttttaccaaccatgcctgaaaactatgaaaaaatgtactctcacaaatttaaaatgggtaattaggaaccaggaatatcaatcagcatgcacttgatgttatggtgtttccggaggaataggtacatgattacctggagttcacgagttgtcaattatggtgtattttctcatcaagggggctctcagcctctcacagttaatatcatttattttatagttgtttccagttttccacagttttttctttccctctatctgcttgttgaaacctgattgagttgtagctctcactatcttg

SEQ ID NO: 74289 - DNA, 2399 bp, Zea Mays
ggcaggtgcccgaaaaccgcaggcatggctgacatcattcccggcggtcctattcatcaaatcatcagtcattcaccttcccggctttccacaaactcaaaccctgctacccatgaccgccgccgccgccgccgcccgcgcggcgcgccggcacttctcttctcggctccagactaccacctcgcgccttctccatgcaagtgattctcaggcagcggcgcgggagacatccgggagcttcatccaccccgccgctgtcgtccacccggatgcagccatcgggcaggctgtctcaataggtcccttttgcactgttgggccttcagccagagttggtgatacctgtcagttacatgccgggagccatgtcatgggccatactgagctaggggagggatgcattgttcaaacgtgagatagcatctttctctctcttttgtcgcctgaatttgtgccccttttgtgaataatatatgctcacaatgcctacattgggaatccatattcggacatataattgaagcaaagaaagatacattgaatgttttttgtgaaataaaactacaaccaaattaaacatggatcactgttacgaacacaaagtttgatgccatcacaacagcacatgagatggagctctagcccttcaggtccattattttgttttaggtgtgtttcacataagcagttgaaaatagttcttgtcttgttgcttctctgtcattagtggagtatcactccctcaggccttggtcccttttgactcgagcacttgacaagtacatctgtgaaaacttttttgatgaaaaataacaaaggagattgaaaattcaccatatagagttacttggctcaatttattttgtttcttaacaactgaaccataggaaatgacactctatgcatgaatttgcaaaatcaaggataacgcatcatatcgcaaacccctaatataccttacagtgtgatgtgtgtaggagactctagagtccaaaggttttagacgcagtagaactaaaataaaatacatgagatgtgacttcaacactactacacatgagaaaggaaatgctagtttggaaggttaagtagtggctaggaaggatacctttcggtatttaggtgcaatgctacagagagatgaagatattgatgaaaatgttaaccatagaatcaaagcaaggtcgaggaagtgtcaacaagcatctcactttctatgtgacaagagggtaccatagaagctaaaatgcaagttttataggatgacgattagacctactatgttatatagtgcagaatgttggtctaaaaaagatgttatgtttagtagataggtgttgtagaatgagtatgttgcgttgaatttatggacatataagaagggatcaagtctgaaaccccgaaacgatgatgtacatgataggctaggggtagaaccaattgaagaaaagcttttcaataccgattaagatggtttgaaggtgtccaacgaagacctccagaggcactagtacgtagtgggaatgtgggatcttaaggcgcgatactaacgggaggagaggcaggggaagaccgaagttgacatgggatagacagtaaaagaggaccggaaaaatgaaatatttcttaagacttagccttgaatatgagcgaatagaaaacaactatttacatgcctgaaccttgatttatggattttgttgggttttaactctagcctatcgtaacttacttgggactaaaaaggcttggttgttgcagtggtgctattgttggtgcagatatccctggacggacaattattggggaaaacaatgtcatcggacactatgctgttgttggtgcaaaatgccaagatttgaaatataagactggagatgaatgctttctacatattggtagaaataatgagatcagagagtactgctctgttcaccgctcttctaaatcttgtgactgcacggttattggtgacaataatctcattatgggttcgtctcatattgctcatgattgcaagattggtaacaataacatctttgctaataatactctatttgctggtcacgtaattgttgaagattggactcacactgcaggggctgttgttgtccatcaattttgtcatattgggtcatactcatttcttggcggaggctccgtggaaccaggaatatcaatcagcatgcacttgatgttatggtgtttccggaggaataggtacatgattacctggagttcacgagttgtcaattatggtgtattttctcatcaagggggctctcagcctctcacagttaatatcatttattttatagttgtttccagttttccacagttttttctttccctctatctgcttgttgaaacctgattgagttgtagctctcactatcttg

SEQ ID NO: 74290 - DNA, 1130 bp, Zea Mays
catcaaatcatcagtcattcaccttcccggctttccacaaactcaaaccctgctacccatgaccgccgccgccgccgccgcccgcgcggcgcgccggcacttctcttctcggctccagactaccacctcgcgccttctccatgcaagtgattctcaggcagcggcgcgggagacatccgggagcttcatccaccccgccgctgtcgtccacccggatgcagccatcgggcaggctgtctcaataggtcccttttgcactgttgggccttcagccagagttggtgatacctgtcagttacatgccgggagccatgtcatgggccatactgagctaggggagggatgcattgttcaaacgtgctattgttggtgcagatatccctggacggacaattattggggaaaacaatgtcatcggacactatgctgttgttggtgcaaaatgccaagatttgaaatataagactggagatgaatgctttctacatattggtagaaataatgagatcagagagtactgctctgttcaccgctcttctaaatcttgtgactgcacggttattggtgacaataatctcattatgggttcgtctcatattgctcatgattgcaagattggtaacaataacatctttgctaataatactctatttgctggtcacgtaattgttgaagattggactcacactgcaggggctgttgttgtccatcaattttgtcatattgggtcatactcatttcttggcggaggctccgtggtatgtttctatataaatttgatctgcattacttaccacagaactttatgctaaaaatgagacttcatgtagttttaccaaccatgcctgaaaactatgaaaaaatgtactctcacaaatttaaaatgggtaattaggaaccaggaatatcaatcagcatgcacttgatgttatggtgtttccggaggaataggtacatgattacctggagttcacgagttgtcaattatggtgtattttctcatcaagggggctctcagcctctcacagttaatatcatttattttatagttgtttccagttttccacagttttttctttccctctatctgcttgttgaaacctgattgagttgtagctctcactatcttg

SEQ ID NO: 74291 - DNA, 1161 bp, Zea Mays
catcaaatcatcagtcattcaccttcccggctttccacaaactcaaaccctgctacccatgaccgccgccgccgccgccgcccgcgcggcgcgccggcacttctcttctcggctccagactaccacctcgcgccttctccatgcaagtgattctcaggcagcggcgcgggagacatccgggagcttcatccaccccgccgctgtcgtccacccggatgcagccatcgggcaggctgtctcaataggtcccttttgcactgttgggccttcagccagagttggtgatacctgtcagttacatgccgggagccatgtcatgggccatactgagctaggggagggatgcattgttcaaactggtgctattgttggtgcagatatccctggacggacaattattggggaaaacaatgtcatcggacactatgctgttgttggtgcaaaatgccaagatttgaaatataagaccaataatgcccgtttcctcttgtttagactggagatgaatgctttctacatattggtagaaataatgagatcagagagtactgctctgttcaccgctcttctaaatcttgtgactgcacggttattggtgacaataatctcattatgggttcgtctcatattgctcatgattgcaagattggtaacaataacatctttgctaataatactctatttgctggtcacgtaattgttgaagattggactcacactgcaggggctgttgttgtccatcaattttgtcatattgggtcatactcatttcttggcggaggctccgtggtatgtttctatataaatttgatctgcattacttaccacagaactttatgctaaaaatgagacttcatgtagttttaccaaccatgcctgaaaactatgaaaaaatgtactctcacaaatttaaaatgggtaattaggaaccaggaatatcaatcagcatgcacttgatgttatggtgtttccggaggaataggtacatgattacctggagttcacgagttgtcaattatggtgtattttctcatcaagggggctctcagcctctcacagttaatatcatttattttatagttgtttccagttttccacagttttttctttccctctatctgcttgttgaaacctgattgagttgtagctctcactatcttg

SEQ ID NO: 74292 - DNA, 3925 bp, Zea Mays
gtttttttttcgaattttaaacgataattctggtcttgatctcgtcctcgaggcaaatctctttgggaatcgcctgggaagtatcagtagaacgggggagagcttgaggagtagccgagtagggttggagaggcgtaggggcgcgtgtgggcgctcgagctgttgttgctgggcctcgccggctccgttttcttccacctccgcgcgcagcggcagcgcggcagccagcgggggtgggcgtcaagtcaaggcagcgccgtcgtttcatgtccgcggtcaggtttggtgtctaatgcaggtgtggtactggagtactggactactggtcctgtagagcagttcgggggcgagggagatggactggccctggcccctggtcgctgtgccgctccgaactggggcgagggcgagggcgaggtgttcgtgggtaagggtcgcgggcgatgtgcggctgggaggcgggctaccgaggcgtaagaaataaagcagtagtagacgagagagccgcgatttataaagcgggtttgtgtggctcgctgctcgcctccgctccactcctctcacctggtgactgctcctcccacctcgctgtttcttctacgggatcaggttgctgcttgctgcggttcagatccttatccccttctgctttagatgggcctcgcggagcagtgcatggaggtggaggaggtgcgggactcggcgaatcggaggtgatcccggtcatggggtagagtggagtggagggggttgagcgtgtggtatggagccgtcccgtggcggtgttggcggcggcgggcggcggtggggggaggcggagggtgatgcggcggaggaagggagacgaggggaggacgggggcgaggtgagcctgcgggagtggctggaccggccgggccgagcggtggaggcggcagagtgcgtgcacgtgttcaggcaggtggcggaggcggtggcagtcgcgcacgcgcagggggtggccgtgggcagcgcgcggccgtcgtgcttcgtcgtgtcgccgcccttcgcgcgcgtcgccttcatcgagtccgcctccggctccgacgcctcgggctcgtgctcgggctctgacgcctccgaggacgccgacggcgacccggacccggacccggacccggacgcctcgcctccgctgcggcgacgcgacagcgccgtccccggcgaggagcgcgcggggaggtcgttcccgctcaagagcgtgctggccatggagctcagctggtacaccagccctgaggatgcggacgacagcgccgctaccttcgcctctgacgtctacagactgggtgtgctcttgttcgagctgttctatacgttcgaaacgatggaggacaagatgcgggcaatggcgaatctgcggcaccgggtgttgccaccgcagttgctgttcaaatggcccaaggaagcatccttctgccagttgctaatgcaccctgtgccagaaaccagaccgaagatgagtgaggtgctgcagagtgagttccttaatcagtcaaggaatagcctggaagagcatgaagcggcacttaggttacgcgaagagatagaagaacaagaattattgctggattttcttcagcagttgcagaaaagaaagcaagatatagccgacagtttgcagggcactattgctttcctctcttctgacatcaatgaggtaccccaccagcaatctacaattggccactgtgagaacttcttatccgatggggataaagaggtgtgctctggaactgttgaagagcagagtgattgtggatccaggaagcgttttagacctgagctgcaaggtgttgatatggaggaaaataatcgtagtgttgaagaatgttccagaacagtaccatcctctgagttaatccaggaaagtgttctgtctaaaagctccaggttgatgaagaacttcaaaaaacttgaaacagcctattttctaacaaggtccaagttgatgaagcaagttggcagccaaataagtagctgtgatcgagttgttaagaacactactggttcagctgttgggactgagggaagttcactagatgatttttctttggaaaggcaatatggtacaaggcaaagaggttgggtaaactcttttcttgaaggattgtgcaagtatttgtcattcagtaagttgaaagttcgggcagaactgaagcattgtgatttgctgaactcgtcaaacttagtatgctccgtagggtttgaccgagatagagagttttttgcaactgcaggtgtaaataagaagataaaagtgtttgagtataatatgattgtaaatgaacaccgtgatattcactatcctgtagtagagatgtctaatagatcaaagttgagttgtatttgctggaacagttatatgaagagccatattgcatctagtgattttgagggtatagtacaggtttgggatgttactaggagtcaagtttttgttgggatgagggagcatgagcgacgcgtgtggtcggtggacttctcaattgtggacccaacaaaattggtcagtgggagtgatgatggatctgtgaaactgtgggatatgaatcaggcaattttattcttgcacctactgctgggagtattggcactattagaacaagagcaaatgtgtgttctgtacaatttcaacctgatactgctcgctccattgccatcggctctgcagaccacaaaatttactgctatgatctacgtaacatacgagctccttattgtacactagttggccacacaaagactgaaggataattgacagtccagttcaaacatttacagggcatacaaatacaaagaacttcgttggtctttccatatctgatggttacattgctactggctctgaaacaaatgaggtttttgtctaccacaaagaatttcccatgccagtgttggcttataagttcagcgtgacggaccctatatcgggacaggagattgatgatcagtcacagttcatttcatgcgtctgctggagagggcagtcttcaactctactttctgcaaattccagcggcaacattaagatcttagaaatggactgaggagtttgcatctgtttgagtctcagctataaatagaccgacttcttaggccgtgctcaacaaatcatgcatatagccgtggtagatgtcactgtctagggagttgagtttaaaatgagagattggatgagtaatgctgctagagatagcttaccaagttgtgcgcgtgcgtggcttcaaaatttgtggcgattaaatccagagttgccaacggtgcagcttaatccgagttgcagagttgggaaaggtagtagctgtagcagatttagcgtggttttataggattacagattagcgtggtagcaaaagtagcataaataggaaacagaattggggcgtgggatagtaccacggggaaaggttttgtacatcattggtttgaggtatacttgtacaggcaatcaatccagtttctacctaccagtaccagcatcagacttgctcttgtcatagtgttacttgaaaggtgaaaggtataaatcgctgtacatctgttgaatcagacatcagcatttgcatcattatctcccttttttattttccatataatattgatgaatgtgttaggtcgcagacatcataagacttgttggcattcgtctgcagacgtgaggcgaggagctgtgcataagttaaaagaatcttcagtatttgtctaatgctccgtttgtattgtcgatattggagcacaaaacaaattggaatcagctttcctaaaagagcccagcataaggccgctacttcgagtagaaacattgatttcagcgttttattaagactctgaagctatccccgaacatatggtccgcatgatggattgaagccagtggtcatctgaaaaatgctccagactgaat

SEQ ID NO: 74293 - DNA, 3568 bp, Zea Mays
ggcaaatctctttgggaatcgcctgggaagtatcagtagaacgggggagagcttgaggagtagccgagtagggttggagaggcgtaggggcgcgtgtgggcgctcgagctgttgttgctgggcctcgccggctccgttttcttccacctccgcgcgcagcggcagcgcggcagccagcgggggtgggcgtcaagtcaaggcagcgccgtcgtttcatgtccgcggtcaggtttggtgtctaatgcaggtgtggtactggagtactggactactggtcctgtagagcagttcgggggcgagggagatggactggccctggcccctggtcgctgtgccgctccgaactggggcgagggcgagggcgaggtgttcgtgggtaagggtcgcgggcgatgtgcggctgggaggcgggctaccgaggcgtaagaaataaagcagtagtagacgagagagccgcgatttataaagcgggtttgtgtggctcgctgctcgcctccgctccactcctctcacctggtgactgctcctcccacctcgctgtttcttctacgggatcaggttgctgcttgctgcggttcagatccttatccccttctgctttagatgggcctcgcggagcagtgcatggaggtggaggaggtgcgggactcggcgaatcggaggtgatcccggtcatggggtagagtggagtggagggggttgagcgtgtggtatggagccgtcccgtggcggtgttggcggcggcgggcggcggtggggggaggcggagggtgatgcggcggaggaagggagacgaggggaggacgggggcgaggtgagcctgcgggagtggctggaccggccgggccgagcggtggaggcggcagagtgcgtgcacgtgttcaggcaggtggcggaggcggtggcagtcgcgcacgcgcagggggtggccgtgggcagcgcgcggccgtcgtgcttcgtcgtgtcgccgcccttcgcgcgcgtcgccttcatcgagtccgcctccggctccgacgcctcgggctcgtgctcgggctctgacgcctccgaggacgccgacggcgacccggacccggacccggacccggacgcctcgcctccgctgcggcgacgcgacagcgccgtccccggcgaggagcgcgcggggaggtcgttcccgctcaagagcgtgctggccatggagctcagctggtacaccagccctgaggatgcggacgacagcgccgctaccttcgcctctgacgtctacagactgggtgtgctcttgttcgagctgttctatacgttcgaaacgatggaggacaagatgcgggcaatggcgaatctgcggcaccgggtgttgccaccgcagttgctgttcaaatggcccaaggaagcatccttctgccagttgctaatgcaccctgtgccagaaaccagaccgaagatgagtgaggtgctgcagagtgagttccttaatcagtcaaggaatagcctggaagagcatgaagcggcacttaggttacgcgaagagatagaagaacaagaattattgctggattttcttcagcagttgcagaaaagaaagcaagatatagccgacagtttgcagggcactattgctttcctctcttctgacatcaatgaggtaccccaccagcaatctacaattggccactgtgagaacttcttatccgatggggataaagaggtgtgctctggaactgttgaagagcagagtgattgtggatccaggaagcgttttagacctgagctgcaaggtgttgatatggaggaaaataatcgtagtgttgaagaatgttccagaacagtaccatcctctgagttaatccaggaaagtgttctgtctaaaagctccaggttgatgaagaacttcaaaaaacttgaaacagcctattttctaacaaggtccaagttgatgaagcaagttggcagccaaataagtagctgtgatcgagttgttaagaacactactggttcagctgttgggactgagggaagttcactagatgatttttctttggaaaggcaatatggtacaaggcaaagaggtttgggatgttactaggagtcaagtttttgttgggatgagggagcatgagcgacgcgtgtggtcggtggacttctcaattgtggacccaacaaaattggctgggagtattggcactattagaacaagagcaaatgtgtgttctgtacaatttcaacctgatactgctcgctccattgccatcggctctgcagaccacaaaatttactgctatgatctacgtaacatacgagctccttattgtacactagttggccacacaaagactgtaagctatgttaagtatctggatgcatcaacaatactatccgcatctactgacaactcattgaagctttgggacttatcgatgaatccaggaaggataattgacagtccagttcaaacatttacagggcatacaaatacaaagaacttcgttggtctttccatatctgatggttacattgctactggctctgaaacaaatgaggtttttgtctaccacaaagaatttcccatgccagtgttggcttataagttcagcgtgacggaccctatatcgggacaggagattgatgatcagtcacagttcatttcatgcgtctgctggagagggcagtcttcaactctactttctgcaaattccagcggcaacattaagatcttagaaatggactgaggagtttgcatctgtttgagtctcagctataaatagaccgacttcttaggccgtgctcaacaaatcatgcatatagccgtggtagatgtcactgtctagggagttgagtttaaaatgagagattggatgagtaatgctgctagagatagcttaccaagttgtgcgcgtgcgtggcttcaaaatttgtggcgattaaatccagagttgccaacggtgcagcttaatccgagttgcagagttgggaaaggtagtagctgtagcagatttagcgtggttttataggattacagattagcgtggtagcaaaagtagcataaataggaaacagaattggggcgtgggatagtaccacggggaaaggttttgtacatcattggtttgaggtatacttgtacaggcaatcaatccagtttctacctaccagtaccagcatcagacttgctcttgtcatagtgttacttgaaaggtgaaaggtataaatcgctgtacatctgttgaatcagacatcagcatttgcatcattatctcccttttttattttccatataatattgatgaatgtgttaggtcgcagacatcataagacttgttggcattcgtctgcagacgtgaggcgaggagctgtgcataagttaaaagaatcttcagtatttgtctaatgctccgtttgtattgtcgatattggagcacaaaacaaattggaatcagctttcctaaaagagcccagcataaggccgctacttcgagtagaaacattgatttcagcgttttattaagactctgaagctatccccgaacatatggtccgcatgatggattgaagccagtggtcatctgaaaaatgctccagactgaat

SEQ ID NO: 74294 - DNA, 3882 bp, Zea Mays
ggcaaatctctttgggaatcgcctgggaagtatcagtagaacgggggagagcttgaggagtagccgagtagggttggagaggcgtaggggcgcgtgtgggcgctcgagctgttgttgctgggcctcgccggctccgttttcttccacctccgcgcgcagcggcagcgcggcagccagcgggggtgggcgtcaagtcaaggcagcgccgtcgtttcatgtccgcggtcaggtttggtgtctaatgcaggtgtggtactggagtactggactactggtcctgtagagcagttcgggggcgagggagatggactggccctggcccctggtcgctgtgccgctccgaactggggcgagggcgagggcgaggtgttcgtgggtaagggtcgcgggcgatgtgcggctgggaggcgggctaccgaggcgtaagaaataaagcagtagtagacgagagagccgcgatttataaagcgggtttgtgtggctcgctgctcgcctccgctccactcctctcacctggtgactgctcctcccacctcgctgtttcttctacgggatcaggttgctgcttgctgcggttcagatccttatccccttctgctttagatgggcctcgcggagcagtgcatggaggtggaggaggtgcgggactcggcgaatcggaggtgatcccggtcatggggtagagtggagtggagggggttgagcgtgtggtatggagccgtcccgtggcggtgttggcggcggcgggcggcggtggggggaggcggagggtgatgcggcggaggaagggagacgaggggaggacgggggcgaggtgagcctgcgggagtggctggaccggccgggccgagcggtggaggcggcagagtgcgtgcacgtgttcaggcaggtggcggaggcggtggcagtcgcgcacgcgcagggggtggccgtgggcagcgcgcggccgtcgtgcttcgtcgtgtcgccgcccttcgcgcgcgtcgccttcatcgagtccgcctccggctccgacgcctcgggctcgtgctcgggctctgacgcctccgaggacgccgacggcgacccggacccggacccggacccggacgcctcgcctccgctgcggcgacgcgacagcgccgtccccggcgaggagcgcgcggggaggtcgttcccgctcaagagcgtgctggccatggagctcagctggtacaccagccctgaggatgcggacgacagcgccgctaccttcgcctctgacgtctacagactgggtgtgctcttgttcgagctgttctatacgttcgaaacgatggaggacaagatgcgggcaatggcgaatctgcggcaccgggtgttgccaccgcagttgctgttcaaatggcccaaggaagcatccttctgccagttgctaatgcaccctgtgccagaaaccagaccgaagatgagtgaggtgctgcagagtgagttccttaatcagtcaaggaatagcctggaagagcatgaagcggcacttaggttacgcgaagagatagaagaacaagaattattgctggattttcttcagcagttgcagaaaagaaagcaagatatagccgacagtttgcagggcactattgctttcctctcttctgacatcaatgaggtaccccaccagcaatctacaattggccactgtgagaacttcttatccgatggggataaagaggtgtgctctggaactgttgaagagcagagtgattgtggatccaggaagcgttttagacctgagctgcaaggtgttgatatggaggaaaataatcgtagtgttgaagaatgttccagaacagtaccatcctctgagttaatccaggaaagtgttctgtctaaaagctccaggttgatgaagaacttcaaaaaacttgaaacagcctattttctaacaaggtccaagttgatgaagcaagttggcagccaaataagtagctgtgatcgagttgttaagaacactactggttcagctgttgggactgagggaagttcactagatgatttttctttggaaaggcaatatggtacaaggcaaagaggttgggtaaactcttttcttgaaggattgtgcaagtatttgtcattcagtaagttgaaagttcgggcagaactgaagcattgtgatttgctgaactcgtcaaacttagtatgctccgtagggtttgaccgagatagagagttttttgcaactgcaggtgtaaataagaagataaaagtgtttgagtataatatgattgtaaatgaacaccgtgatattcactatcctgtagtagagatgtctaatagatcaaagttgagttgtatttgctggaacagttatatgaagagccatattgcatctagtgattttgagggtatagtacaggtttgggatgttactaggagtcaagtttttgttgggatgagggagcatgagcgacgcgtgtggtcggtggacttctcaattgtggacccaacaaaattggtcagtgggagtgatgatggatctgtgaaactgtgggatatgaatcaggctgggagtattggcactattagaacaagagcaaatgtgtgttctgtacaatttcaacctgatactgctcgctccattgccatcggctctgcagaccacaaaatttactgctatgatctacgtaacatacgagctccttattgtacactagttggccacacaaagactgtaagctatgttaagtatctggatgcatcaacaatactatccgcatctactgacaactcattgaagctttgggacttatcgatgaatccaggaaggataattgacagtccagttcaaacatttacagggcatacaaatacaaaggtttttgtctaccacaaagaatttcccatgccagtgttggcttataagttcagcgtgacggaccctatatcgggacaggagattgatgatcagtcacagttcatttcatgcgtctgctggagagggcagtcttcaactctactttctgcaaattccagcggcaacattaagatcttagaaatggactgaggagtttgcatctgtttgagtctcagctataaatagaccgacttcttaggccgtgctcaacaaatcatgcatatagccgtggtagatgtcactgtctagggagttgagtttaaaatgagagattggatgagtaatgctgctagagatagcttaccaagttgtgcgcgtgcgtggcttcaaaatttgtggcgattaaatccagagttgccaacggtgcagcttaatccgagttgcagagttgggaaaggtagtagctgtagcagatttagcgtggttttataggattacagattagcgtggtagcaaaagtagcataaataggaaacagaattggggcgtgggatagtaccacggggaaaggttttgtacatcattggtttgaggtatacttgtacaggcaatcaatccagtttctacctaccagtaccagcatcagacttgctcttgtcatagtgttacttgaaaggtgaaaggtataaatcgctgtacatctgttgaatcagacatcagcatttgcatcattatctcccttttttattttccatataatattgatgaatgtgttaggtcgcagacatcataagacttgttggcattcgtctgcagacgtgaggcgaggagctgtgcataagttaaaagaatcttcagtatttgtctaatgctccgtttgtattgtcgatattggagcacaaaacaaattggaatcagctttcctaaaagagcccagcataaggccgctacttcgagtagaaacattgatttcagcgttttattaagactctgaagctatccccgaacatatggtccgcatgatggattgaagccagtggtcatctgaaaaatgctccagactgaat

SEQ ID NO: 74295 - DNA, 3019 bp, Zea Mays
ggcaaatctctttgggaatcgcctgggaagtatcagtagaacgggggagagcttgaggagtagccgagtagggttggagaggcgtaggggcgcgtgtgggcgctcgagctgttgttgctgggcctcgccggctccgttttcttccacctccgcgcgcagcggcagcgcggcagccagcgggggtgggcgtcaagtcaaggcagcgccgtcgtttcatgtccgcggtcaggtttggtgtctaatgcaggtgtggtactggagtactggactactggtcctgtagagcagttcgggggcgagggagatggactggccctggcccctggtcgctgtgccgctccgaactggggcgagggcgagggcgaggtgttcgtgggtaagggtcgcgggcgatgtgcggctgggaggcgggctaccgaggcgtaagaaataaagcagtagtagacgagagagccgcgatttataaagcgggtttgtgtggctcgctgctcgcctccgctccactcctctcacctggtgactgctcctcccacctcgctgtttcttctacgggatcaggttgctgcttgctgcggttcagatccttatccccttctgctttagatgggcctcgcggagcagtgcatggaggtggaggaggtgcgggactcggcgaatcggaggtgatcccggtcatggggtagagtggagtggagggggttgagcgtgtggtatggagccgtcccgtggcggtgttggcggcggcgggcggcggtggggggaggcggagggtgatgcggcggaggaagggagacgaggggaggacgggggcgaggtgagcctgcgggagtggctggaccggccgggccgagcggtggaggcggcagagtgcgtgcacgtgttcaggcaggtggcggaggcggtggcagtcgcgcacgcgcagggggtggccgtgggcagcgcgcggccgtcgtgcttcgtcgtgtcgccgcccttcgcgcgcgtcgccttcatcgagtccgcctccggctccgacgcctcgggctcgtgctcgggctctgacgcctccgaggacgccgacggcgacccggacccggacccggacccggacgcctcgcctccgctgcggcgacgcgacagcgccgtccccggcgaggagcgcgcggggaggtcgttcccgctcaagagcgtgctggccatggagctcagctggtacaccagccctgaggatgcggacgacagcgccgctaccttcgcctctgacgtctacagactgggtgtgctcttgttcgagctgttctatacgttcgaaacgatggaggacaagatgcgggcaatggcgaatctgcggcaccgggtgttgccaccgcagttgctgttcaaatggcccaaggaagcatccttctgccagttgctaatgcaccctgtgccagaaaccagaccgaagatgaggtttgggatgttactaggagtcaagtttttgttgggatgagggagcatgagcgacgcgtgtggtcggtggacttctcaattgtggacccaacaaaattggtcagtgggagtgatgatggatctgtgaaactgtgggatatgaatcaggcaattttattcttgcacctactgctgggagtattggcactattagaacaagagcaaatgtgtgttctgtacaatttcaacctgatactgctcgctccattgccatcggctctgcagaccacaaaatttactgctatgatctacgtaacatacgagctccttattgtacactagttggccacacaaagactgtaagctatgttaagtatctggatgcatcaacaatactatccgcatctactgacaactcattgaagctttgggacttatcgatgaatccaggaaggataattgacagtccagttcaaacatttacagggcatacaaatacaaagaacttcgttggtctttccatatctgatggttacattgctactggctctgaaacaaatgaggtttttgtctaccacaaagaatttcccatgccagtgttggcttataagttcagcgtgacggaccctatatcgggacaggagattgatgatcagtcacagttcatttcatgcgtctgctggagagggcagtcttcaactctactttctgcaaattccagcggcaacattaagatcttagaaatggactgaggagtttgcatctgtttgagtctcagctataaatagaccgacttcttaggccgtgctcaacaaatcatgcatatagccgtggtagatgtcactgtctagggagttgagtttaaaatgagagattggatgagtaatgctgctagagatagcttaccaagttgtgcgcgtgcgtggcttcaaaatttgtggcgattaaatccagagttgccaacggtgcagcttaatccgagttgcagagttgggaaaggtagtagctgtagcagatttagcgtggttttataggattacagattagcgtggtagcaaaagtagcataaataggaaacagaattggggcgtgggatagtaccacggggaaaggttttgtacatcattggtttgaggtatacttgtacaggcaatcaatccagtttctacctaccagtaccagcatcagacttgctcttgtcatagtgttacttgaaaggtgaaaggtataaatcgctgtacatctgttgaatcagacatcagcatttgcatcattatctcccttttttattttccatataatattgatgaatgtgttaggtcgcagacatcataagacttgttggcattcgtctgcagacgtgaggcgaggagctgtgcataagttaaaagaatcttcagtatttgtctaatgctccgtttgtattgtcgatattggagcacaaaacaaattggaatcagctttcctaaaagagcccagcataaggccgctacttcgagtagaaacattgatttcagcgttttattaagactctgaagctatccccgaacatatggtccgcatgatggattgaagccagtggtcatctgaaaaatgctccagactgaat

SEQ ID NO: 74296 - DNA, 2948 bp, Zea Mays
ggcaaatctctttgggaatcgcctgggaagtatcagtagaacgggggagagcttgaggagtagccgagtagggttggagaggcgtaggggcgcgtgtgggcgctcgagctgttgttgctgggcctcgccggctccgttttcttccacctccgcgcgcagcggcagcgcggcagccagcgggggtgggcgtcaagtcaaggcagcgccgtcgtttcatgtccgcggtcaggtttggtgtctaatgcaggtgtggtactggagtactggactactggtcctgtagagcagttcgggggcgagggagatggactggccctggcccctggtcgctgtgccgctccgaactggggcgagggcgagggcgaggtgttcgtgggtaagggtcgcgggcgatgtgcggctgggaggcgggctaccgaggcgtaagaaataaagcagtagtagacgagagagccgcgatttataaagcgggtttgtgtggctcgctgctcgcctccgctccactcctctcacctggtgactgctcctcccacctcgctgtttcttctacgggatcaggttgctgcttgctgcggttcagatccttatccccttctgctttagatgggcctcgcggagcagtgcatggaggtggaggaggtgcgggactcggcgaatcggaggtgatcccggtcatggggtagagtggagtggagggggttgagcgtgtggtatggagccgtcccgtggcggtgttggcggcggcgggcggcggtggggggaggcggagggtgatgcggcggaggaagggagacgaggggaggacgggggcgaggtgagcctgcgggagtggctggaccggccgggccgagcggtggaggcggcagagtgcgtgcacgtgttcaggcaggtggcggaggcggtggcagtcgcgcacgcgcagggggtggccgtgggcagcgcgcggccgtcgtgcttcgtcgtgtcgccgcccttcgcgcgcgtcgccttcatcgagtccgcctccggctccgacgcctcgggctcgtgctcgggctctgacgcctccgaggacgccgacggcgacccggacccggacccggacccggacgcctcgcctccgctgcggcgacgcgacagcgccgtccccggcgaggagcgcgcggggaggtcgttcccgctcaagagcgtgctggccatggagctcagctggtacaccagccctgaggatgcggacgacagcgccgctaccttcgcctctgacgtctacagactgggtgtgctcttgttcgagctgttctatacgttcgaaacgatggaggacaagatgcgggcaatggcgaatctgcggcaccgggtgttgccaccgcagttgctgttcaaatggcccaaggaagcatccttctgccagttgctaatgcaccctgtgccagaaaccagaccgaagatgaggtttgggatgttactaggagtcaagtttttgttgggatgagggagcatgagcgacgcgtgtggtcggtggacttctcaattgtggacccaacaaaattggctgggagtattggcactattagaacaagagcaaatgtgtgttctgtacaatttcaacctgatactgctcgctccattgccatcggctctgcagaccacaaaatttactgctatgatctacgtaacatacgagctccttattgtacactagttggccacacaaagactgtaagctatgttaagtatctggatgcatcaacaatactatccgcatctactgacaactcattgaagctttgggacttatcgatgaatccaggaaggataattgacagtccagttcaaacatttacagggcatacaaatacaaagaacttcgttggtctttccatatctgatggttacattgctactggctctgaaacaaatgaggtttttgtctaccacaaagaatttcccatgccagtgttggcttataagttcagcgtgacggaccctatatcgggacaggagattgatgatcagtcacagttcatttcatgcgtctgctggagagggcagtcttcaactctactttctgcaaattccagcggcaacattaagatcttagaaatggactgaggagtttgcatctgtttgagtctcagctataaatagaccgacttcttaggccgtgctcaacaaatcatgcatatagccgtggtagatgtcactgtctagggagttgagtttaaaatgagagattggatgagtaatgctgctagagatagcttaccaagttgtgcgcgtgcgtggcttcaaaatttgtggcgattaaatccagagttgccaacggtgcagcttaatccgagttgcagagttgggaaaggtagtagctgtagcagatttagcgtggttttataggattacagattagcgtggtagcaaaagtagcataaataggaaacagaattggggcgtgggatagtaccacggggaaaggttttgtacatcattggtttgaggtatacttgtacaggcaatcaatccagtttctacctaccagtaccagcatcagacttgctcttgtcatagtgttacttgaaaggtgaaaggtataaatcgctgtacatctgttgaatcagacatcagcatttgcatcattatctcccttttttattttccatataatattgatgaatgtgttaggtcgcagacatcataagacttgttggcattcgtctgcagacgtgaggcgaggagctgtgcataagttaaaagaatcttcagtatttgtctaatgctccgtttgtattgtcgatattggagcacaaaacaaattggaatcagctttcctaaaagagcccagcataaggccgctacttcgagtagaaacattgatttcagcgttttattaagactctgaagctatccccgaacatatggtccgcatgatggattgaagccagtggtcatctgaaaaatgctccagactgaat

SEQ ID NO: 74297 - DNA, 3894 bp, Zea Mays
ggcaaatctctttgggaatcgcctgggaagtatcagtagaacgggggagagcttgaggagtagccgagtagggttggagaggcgtaggggcgcgtgtgggcgctcgagctgttgttgctgggcctcgccggctccgttttcttccacctccgcgcgcagcggcagcgcggcagccagcgggggtgggcgtcaagtcaaggcagcgccgtcgtttcatgtccgcggtcaggtttggtgtctaatgcaggtgtggtactggagtactggactactggtcctgtagagcagttcgggggcgagggagatggactggccctggcccctggtcgctgtgccgctccgaactggggcgagggcgagggcgaggtgttcgtgggtaagggtcgcgggcgatgtgcggctgggaggcgggctaccgaggcgtaagaaataaagcagtagtagacgagagagccgcgatttataaagcgggtttgtgtggctcgctgctcgcctccgctccactcctctcacctggtgactgctcctcccacctcgctgtttcttctacgggatcaggttgctgcttgctgcggttcagatccttatccccttctgctttagatgggcctcgcggagcagtgcatggaggtggaggaggtgcgggactcggcgaatcggaggtgatcccggtcatggggtagagtggagtggagggggttgagcgtgtggtatggagccgtcccgtggcggtgttggcggcggcgggcggcggtggggggaggcggagggtgatgcggcggaggaagggagacgaggggaggacgggggcgaggtgagcctgcgggagtggctggaccggccgggccgagcggtggaggcggcagagtgcgtgcacgtgttcaggcaggtggcggaggcggtggcagtcgcgcacgcgcagggggtggccgtgggcagcgcgcggccgtcgtgcttcgtcgtgtcgccgcccttcgcgcgcgtcgccttcatcgagtccgcctccggctccgacgcctcgggctcgtgctcgggctctgacgcctccgaggacgccgacggcgacccggacccggacccggacccggacgcctcgcctccgctgcggcgacgcgacagcgccgtccccggcgaggagcgcgcggggaggtcgttcccgctcaagagcgtgctggccatggagctcagctggtacaccagccctgaggatgcggacgacagcgccgctaccttcgcctctgacgtctacagactgggtgtgctcttgttcgagctgttctatacgttcgaaacgatggaggacaagatgcgggcaatggcgaatctgcggcaccgggtgttgccaccgcagttgctgttcaaatggcccaaggaagcatccttctgccagttgctaatgcaccctgtgccagaaaccagaccgaagatgagtgaggtgctgcagagtgagttccttaatcagtcaaggaatagcctggaagagcatgaagcggcacttaggttacgcgaagagatagaagaacaagaattattgctggattttcttcagcagttgcagaaaagaaagcaagatatagccgacagtttgcagggcactattgctttcctctcttctgacatcaatgaggtaccccaccagcaatctacaattggccactgtgagaacttcttatccgatggggataaagaggtgtgctctggaactgttgaagagcagagtgattgtggatccaggaagcgttttagacctgagctgcaaggtgttgatatggaggaaaataatcgtagtgttgaagaatgttccagaacagtaccatcctctgagttaatccaggaaagtgttctgtctaaaagctccaggttgatgaagaacttcaaaaaacttgaaacagcctattttctaacaaggtccaagttgatgaagcaagttggcagccaaataagtagctgtgatcgagttgttaagaacactactggttcagctgttgggactgagggaagttcactagatgatttttctttggaaaggcaatatggtacaaggcaaagaggttgggtaaactcttttcttgaaggattgtgcaagtatttgtcattcagtaagttgaaagttcgggcagaactgaagcattgtgatttgctgaactcgtcaaacttagtatgctccgtagggtttgaccgagatagagagttttttgcaactgcaggtgtaaataagaagataaaagtgtttgagtataatatgattgtaaatgaacaccgtgatattcactatcctgtagtagagatgtctaatagatcaaagttgagttgtatttgctggaacagttatatgaagagccatattgcatctagtgattttgagggtatagtacaggtttgggatgttactaggagtcaagtttttgttgggatgagggagcatgagcgacgcgtgtggtcggtggacttctcaattgtggacccaacaaaattggctgggagtattggcactattagaacaagagcaaatgtgtgttctgtacaatttcaacctgatactgctcgctccattgccatcggctctgcagaccacaaaatttactgctatgatctacgtaacatacgagctccttattgtacactagttggccacacaaagactgtaagctatgttaagtatctggatgcatcaacaatactatccgcatctactgacaactcattgaagctttgggacttatcgatgaatccaggaaggataattgacagtccagttcaaacatttacagggcatacaaatacaaagaacttcgttggtctttccatatctgatggttacattgctactggctctgaaacaaatgaggtttttgtctaccacaaagaatttcccatgccagtgttggcttataagttcagcgtgacggaccctatatcgggacaggagattgatgatcagtcacagttcatttcatgcgtctgctggagagggcagtcttcaactctactttctgcaaattccagcggcaacattaagatcttagaaatggactgaggagtttgcatctgtttgagtctcagctataaatagaccgacttcttaggccgtgctcaacaaatcatgcatatagccgtggtagatgtcactgtctagggagttgagtttaaaatgagagattggatgagtaatgctgctagagatagcttaccaagttgtgcgcgtgcgtggcttcaaaatttgtggcgattaaatccagagttgccaacggtgcagcttaatccgagttgcagagttgggaaaggtagtagctgtagcagatttagcgtggttttataggattacagattagcgtggtagcaaaagtagcataaataggaaacagaattggggcgtgggatagtaccacggggaaaggttttgtacatcattggtttgaggtatacttgtacaggcaatcaatccagtttctacctaccagtaccagcatcagacttgctcttgtcatagtgttacttgaaaggtgaaaggtataaatcgctgtacatctgttgaatcagacatcagcatttgcatcattatctcccttttttattttccatataatattgatgaatgtgttaggtcgcagacatcataagacttgttggcattcgtctgcagacgtgaggcgaggagctgtgcataagttaaaagaatcttcagtatttgtctaatgctccgtttgtattgtcgatattggagcacaaaacaaattggaatcagctttcctaaaagagcccagcataaggccgctacttcgagtagaaacattgatttcagcgttttattaagactctgaagctatccccgaacatatggtccgcatgatggattgaagccagtggtcatctgaaaaatgctccagactgaat

SEQ ID NO: 74298 - DNA, 3860 bp, Zea Mays
ggcaaatctctttgggaatcgcctgggaagtatcagtagaacgggggagagcttgaggagtagccgagtagggttggagaggcgtaggggcgcgtgtgggcgctcgagctgttgttgctgggcctcgccggctccgttttcttccacctccgcgcgcagcggcagcgcggcagccagcgggggtgggcgtcaagtcaaggcagcgccgtcgtttcatgtccgcggtcaggtttggtgtctaatgcaggtgtggtactggagtactggactactggtcctgtagagcagttcgggggcgagggagatggactggccctggcccctggtcgctgtgccgctccgaactggggcgagggcgagggcgaggtgttcgtgggtaagggtcgcgggcgatgtgcggctgggaggcgggctaccgaggcgtaagaaataaagcagtagtagacgagagagccgcgatttataaagcgggtttgtgtggctcgctgctcgcctccgctccactcctctcacctggtgactgctcctcccacctcgctgtttcttctacgggatcaggttgctgcttgctgcggttcagatccttatccccttctgctttagatgggcctcgcggagcagtgcatggaggtggaggaggtgcgggactcggcgaatcggaggtgatcccggtcatggggtagagtggagtggagggggttgagcgtgtggtatggagccgtcccgtggcggtgttggcggcggcgggcggcggtggggggaggcggagggtgatgcggcggaggaagggagacgaggggaggacgggggcgaggtgagcctgcgggagtggctggaccggccgggccgagcggtggaggcggcagagtgcgtgcacgtgttcaggcaggtggcggaggcggtggcagtcgcgcacgcgcagggggtggccgtgggcagcgcgcggccgtcgtgcttcgtcgtgtcgccgcccttcgcgcgcgtcgccttcatcgagtccgcctccggctccgacgcctcgggctcgtgctcgggctctgacgcctccgaggacgccgacggcgacccggacccggacccggacccggacgcctcgcctccgctgcggcgacgcgacagcgccgtccccggcgaggagcgcgcggggaggtcgttcccgctcaagagcgtgctggccatggagctcagctggtacaccagccctgaggatgcggacgacagcgccgctaccttcgcctctgacgtctacagactgggtgtgctcttgttcgagctgttctatacgttcgaaacgatggaggacaagatgcgggcaatggcgaatctgcggcaccgggtgttgccaccgcagttgctgttcaaatggcccaaggaagcatccttctgccagttgctaatgcaccctgtgccagaaaccagaccgaagatgagtgaggtgctgcagagtgagttccttaatcagtcaaggaatagcctggaagagcatgaagcggcacttaggttacgcgaagagatagaagaacaagaattattgctggattttcttcagcagttgcagaaaagaaagcaagatatagccgacagtttgcagggcactattgctttcctctcttctgacatcaatgaggtaccccaccagcaatctacaattggccactgtgagaacttcttatccgatggggataaagaggtgtgctctggaactgttgaagagcagagtgattgtggatccaggaagcgttttagacctgagctgcaaggtgttgatatggaggaaaataatcgtagtgttgaagaatgttccagaacagtaccatcctctgagttaatccaggaaagtgttctgtctaaaagctccaggttgatgaagaacttcaaaaaacttgaaacagcctattttctaacaaggtccaagttgatgaagcaagttggcagccaaataagtagctgtgatcgagttgttaagaacactactggttcagctgttgggactgagggaagttcactagatgatttttctttggaaaggcaatatggtacaaggcaaagaggttgggtaaactcttttcttgaaggattgtgcaagtatttgtcattcagtaagttgaaagttcgggcagaactgaagcattgtgatttgctgaactcgtcaaacttagtatgctccgtagggtttgaccgagatagagagttttttgcaactgcaggtgtaaataagaagataaaagtgtttgagtataatatgattgtaaatgaacaccgtgatattcactatcctgtagtagagatgtctaatagatcaaagttgagttgtatttgctggaacagttatatgaagagccatattgcatctagtgattttgagggtatagtacaggtttgggatgttactaggagtcaagtttttgttgggatgagggagcatgagcgacgcgtgtggtcggtggacttctcaattgtggacccaacaaaattggtcagtgggagtgatgatggatctgtgaaactgtgggatatgaatcaggctgggagtattggcactattagaacaagagcaaatgtgtgttctgtacaatttcaacctgatactgctcgctccattgccatcggctctgcagaccacaaaatttactgctatgatctacgtaacatacgagctccttattgtacactagttggccacacaaagactgtaagctatgaaggataattgacagtccagttcaaacatttacagggcatacaaatacaaagaacttcgttggtctttccatatctgatggttacattgctactggctctgaaacaaatgaggtttttgtctaccacaaagaatttcccatgccagtgttggcttataagttcagcgtgacggaccctatatcgggacaggagattgatgatcagtcacagttcatttcatgcgtctgctggagagggcagtcttcaactctactttctgcaaattccagcggcaacattaagatcttagaaatggactgaggagtttgcatctgtttgagtctcagctataaatagaccgacttcttaggccgtgctcaacaaatcatgcatatagccgtggtagatgtcactgtctagggagttgagtttaaaatgagagattggatgagtaatgctgctagagatagcttaccaagttgtgcgcgtgcgtggcttcaaaatttgtggcgattaaatccagagttgccaacggtgcagcttaatccgagttgcagagttgggaaaggtagtagctgtagcagatttagcgtggttttataggattacagattagcgtggtagcaaaagtagcataaataggaaacagaattggggcgtgggatagtaccacggggaaaggttttgtacatcattggtttgaggtatacttgtacaggcaatcaatccagtttctacctaccagtaccagcatcagacttgctcttgtcatagtgttacttgaaaggtgaaaggtataaatcgctgtacatctgttgaatcagacatcagcatttgcatcattatctcccttttttattttccatataatattgatgaatgtgttaggtcgcagacatcataagacttgttggcattcgtctgcagacgtgaggcgaggagctgtgcataagttaaaagaatcttcagtatttgtctaatgctccgtttgtattgtcgatattggagcacaaaacaaattggaatcagctttcctaaaagagcccagcataaggccgctacttcgagtagaaacattgatttcagcgttttattaagactctgaagctatccccgaacatatggtccgcatgatggattgaagccagtggtcatctgaaaaatgctccagactgaat

SEQ ID NO: 74299 - DNA, 3743 bp, Zea Mays
ggcaaatctctttgggaatcgcctgggaagtatcagtagaacgggggagagcttgaggagtagccgagtagggttggagaggcgtaggggcgcgtgtgggcgctcgagctgttgttgctgggcctcgccggctccgttttcttccacctccgcgcgcagcggcagcgcggcagccagcgggggtgggcgtcaagtcaaggcagcgccgtcgtttcatgtccgcggtcaggtttggtgtctaatgcaggtgtggtactggagtactggactactggtcctgtagagcagttcgggggcgagggagatggactggccctggcccctggtcgctgtgccgctccgaactggggcgagggcgagggcgaggtgttcgtgggtaagggtcgcgggcgatgtgcggctgggaggcgggctaccgaggcgtaagaaataaagcagtagtagacgagagagccgcgatttataaagcgggtttgtgtggctcgctgctcgcctccgctccactcctctcacctggtgactgctcctcccacctcgctgtttcttctacgggatcaggttgctgcttgctgcggttcagatccttatccccttctgctttagatgggcctcgcggagcagtgcatggaggtggaggaggtgcgggactcggcgaatcggaggtgatcccggtcatggggtagagtggagtggagggggttgagcgtgtggtatggagccgtcccgtggcggtgttggcggcggcgggcggcggtggggggaggcggagggtgatgcggcggaggaagggagacgaggggaggacgggggcgaggtgagcctgcgggagtggctggaccggccgggccgagcggtggaggcggcagagtgcgtgcacgtgttcaggcaggtggcggaggcggtggcagtcgcgcacgcgcagggggtggccgtgggcagcgcgcggccgtcgtgcttcgtcgtgtcgccgcccttcgcgcgcgtcgccttcatcgagtccgcctccggctccgacgcctcgggctcgtgctcgggctctgacgcctccgaggacgccgacggcgacccggacccggacccggacccggacgcctcgcctccgctgcggcgacgcgacagcgccgtccccggcgaggagcgcgcggggaggtcgttcccgctcaagagcgtgctggccatggagctcagctggtacaccagccctgaggatgcggacgacagcgccgctaccttcgcctctgacgtctacagactgggtgtgctcttgttcgagctgttctatacgttcgaaacgatggaggacaagatgcgggcaatggcgaatctgcggcaccgggtgttgccaccgcagttgctgttcaaatggcccaaggaagcatccttctgccagttgctaatgcaccctgtgccagaaaccagaccgaagatgagtgaggtgctgcagagtgagttccttaatcagtcaaggaatagcctggaagagcatgaagcggcacttaggttacgcgaagagatagaagaacaagaattattgctggattttcttcagcagttgcagaaaagaaagcaagatatagccgacagtttgcagggcactattgctttcctctcttctgacatcaatgaggtaccccaccagcaatctacaattggccactgtgagaacttcttatccgatggggataaagaggtgtgctctggaactgttgaagagcagagtgattgtggatccaggaagcgttttagacctgagctgcaaggtgttgatatggaggaaaataatcgtagtgttgaagaatgttccagaacagtaccatcctctgagttaatccaggaaagtgttctgtctaaaagctccaggttgatgaagaacttcaaaaaacttgaaacagcctattttctaacaaggtccaagttgatgaagcaagttggcagccaaataagtagctgtgatcgagttgttaagaacactactggttcagctgttgggactgagggaagttcactagatgatttttctttggaaaggcaatatggtacaaggcaaagaggttgggtaaactcttttcttgaaggattgtgcaagtatttgtcattcagtgtaaataagaagataaaagtgtttgagtataatatgattgtaaatgaacaccgtgatattcactatcctgtagtagagatgtctaatagatcaaagttgagttgtatttgctggaacagttatatgaagagccatattgcatctagtgattttgagggtatagtacaggtttgggatgttactaggagtcaagtttttgttgggatgagggagcatgagcgacgcgtgtggtcggtggacttctcaattgtggacccaacaaaattggtcagtgggagtgatgatggatctgtgaaactgtgggatatgaatcaggctgggagtattggcactattagaacaagagcaaatgtgtgttctgtacaatttcaacctgatactgctcgctccattgccatcggctctgcagaccacaaaatttactgctatgatctacgtaacatacgagctccttattgtacactagttggccacacaaagactgaaggataattgacagtccagttcaaacatttacagggcatacaaatacaaagaacttcgttggtctttccatatctgatggttacattgctactggctctgaaacaaatgaggtttttgtctaccacaaagaatttcccatgccagtgttggcttataagttcagcgtgacggaccctatatcgggacaggagattgatgatcagtcacagttcatttcatgcgtctgctggagagggcagtcttcaactctactttctgcaaattccagcggcaacattaagatcttagaaatggactgaggagtttgcatctgtttgagtctcagctataaatagaccgacttcttaggccgtgctcaacaaatcatgcatatagccgtggtagatgtcactgtctagggagttgagtttaaaatgagagattggatgagtaatgctgctagagatagcttaccaagttgtgcgcgtgcgtggcttcaaaatttgtggcgattaaatccagagttgccaacggtgcagcttaatccgagttgcagagttgggaaaggtagtagctgtagcagatttagcgtggttttataggattacagattagcgtggtagcaaaagtagcataaataggaaacagaattggggcgtgggatagtaccacggggaaaggttttgtacatcattggtttgaggtatacttgtacaggcaatcaatccagtttctacctaccagtaccagcatcagacttgctcttgtcatagtgttacttgaaaggtgaaaggtataaatcgctgtacatctgttgaatcagacatcagcatttgcatcattatctcccttttttattttccatataatattgatgaatgtgttaggtcgcagacatcataagacttgttggcattcgtctgcagacgtgaggcgaggagctgtgcataagttaaaagaatcttcagtatttgtctaatgctccgtttgtattgtcgatattggagcacaaaacaaattggaatcagctttcctaaaagagcccagcataaggccgctacttcgagtagaaacattgatttcagcgttttattaagactctgaagctatccccgaacatatggtccgcatgatggattgaagccagtggtcatctgaaaaatgctccagactgaat

SEQ ID NO: 74300 - DNA, 3062 bp, Zea Mays
ggcaaatctctttgggaatcgcctgggaagtatcagtagaacgggggagagcttgaggagtagccgagtagggttggagaggcgtaggggcgcgtgtgggcgctcgagctgttgttgctgggcctcgccggctccgttttcttccacctccgcgcgcagcggcagcgcggcagccagcgggggtgggcgtcaagtcaaggcagcgccgtcgtttcatgtccgcggtcaggtttggtgtctaatgcaggtgtggtactggagtactggactactggtcctgtagagcagttcgggggcgagggagatggactggccctggcccctggtcgctgtgccgctccgaactggggcgagggcgagggcgaggtgttcgtgggtaagggtcgcgggcgatgtgcggctgggaggcgggctaccgaggcgtaagaaataaagcagtagtagacgagagagccgcgatttataaagcgggtttgtgtggctcgctgctcgcctccgctccactcctctcacctggtgactgctcctcccacctcgctgtttcttctacgggatcaggttgctgcttgctgcggttcagatccttatccccttctgctttagatgggcctcgcggagcagtgcatggaggtggaggaggtgcgggactcggcgaatcggaggtgatcccggtcatggggtagagtggagtggagggggttgagcgtgtggtatggagccgtcccgtggcggtgttggcggcggcgggcggcggtggggggaggcggagggtgatgcggcggaggaagggagacgaggggaggacgggggcgaggtgagcctgcgggagtggctggaccggccgggccgagcggtggaggcggcagagtgcgtgcacgtgttcaggcaggtggcggaggcggtggcagtcgcgcacgcgcagggggtggccgtgggcagcgcgcggccgtcgtgcttcgtcgtgtcgccgcccttcgcgcgcgtcgccttcatcgagtccgcctccggctccgacgcctcgggctcgtgctcgggctctgacgcctccgaggacgccgacggcgacccggacccggacccggacccggacgcctcgcctccgctgcggcgacgcgacagcgccgtccccggcgaggagcgcgcggggaggtcgttcccgctcaagagcgtgctggccatggagctcagctggtacaccagccctgaggatgcggacgacagcgccgctaccttcgcctctgacgtctacagactgggtgtgctcttgttcgagctgttctatacgttcgaaacgatggaggacaagatgcgggcaatggcgaatctgcggcaccgggtgttgccaccgcagttgctgttcaaatggcccaaggaagcatccttctgccagttgctaatgcaccctgtgccagaaaccagaccgaagatgaggtttgggatgttactaggagtcaagtttttgttgggatgagggagcatgagcgacgcgtgtggtcggtggacttctcaattgtggacccaacaaaattggtcagtgggagtgatgatggatctgtgaaactgtgggatatgaatcaggcaattttattcttgcacctactgtatgtcaggcttttaactaacgataacatggttatcgaacttgctgggagtattggcactattagaacaagagcaaatgtgtgttctgtacaatttcaacctgatactgctcgctccattgccatcggctctgcagaccacaaaatttactgctatgatctacgtaacatacgagctccttattgtacactagttggccacacaaagactgtaagctatgttaagtatctggatgcatcaacaatactatccgcatctactgacaactcattgaagctttgggacttatcgatgaatccaggaaggataattgacagtccagttcaaacatttacagggcatacaaatacaaagaacttcgttggtctttccatatctgatggttacattgctactggctctgaaacaaatgaggtttttgtctaccacaaagaatttcccatgccagtgttggcttataagttcagcgtgacggaccctatatcgggacaggagattgatgatcagtcacagttcatttcatgcgtctgctggagagggcagtcttcaactctactttctgcaaattccagcggcaacattaagatcttagaaatggactgaggagtttgcatctgtttgagtctcagctataaatagaccgacttcttaggccgtgctcaacaaatcatgcatatagccgtggtagatgtcactgtctagggagttgagtttaaaatgagagattggatgagtaatgctgctagagatagcttaccaagttgtgcgcgtgcgtggcttcaaaatttgtggcgattaaatccagagttgccaacggtgcagcttaatccgagttgcagagttgggaaaggtagtagctgtagcagatttagcgtggttttataggattacagattagcgtggtagcaaaagtagcataaataggaaacagaattggggcgtgggatagtaccacggggaaaggttttgtacatcattggtttgaggtatacttgtacaggcaatcaatccagtttctacctaccagtaccagcatcagacttgctcttgtcatagtgttacttgaaaggtgaaaggtataaatcgctgtacatctgttgaatcagacatcagcatttgcatcattatctcccttttttattttccatataatattgatgaatgtgttaggtcgcagacatcataagacttgttggcattcgtctgcagacgtgaggcgaggagctgtgcataagttaaaagaatcttcagtatttgtctaatgctccgtttgtattgtcgatattggagcacaaaacaaattggaatcagctttcctaaaagagcccagcataaggccgctacttcgagtagaaacattgatttcagcgttttattaagactctgaagctatccccgaacatatggtccgcatgatggattgaagccagtggtcatctgaaaaatgctccagactgaat

SEQ ID NO: 74301 - DNA, 3926 bp, Zea Mays
ggcaaatctctttgggaatcgcctgggaagtatcagtagaacgggggagagcttgaggagtagccgagtagggttggagaggcgtaggggcgcgtgtgggcgctcgagctgttgttgctgggcctcgccggctccgttttcttccacctccgcgcgcagcggcagcgcggcagccagcgggggtgggcgtcaagtcaaggcagcgccgtcgtttcatgtccgcggtcaggtttggtgtctaatgcaggtgtggtactggagtactggactactggtcctgtagagcagttcgggggcgagggagatggactggccctggcccctggtcgctgtgccgctccgaactggggcgagggcgagggcgaggtgttcgtgggtaagggtcgcgggcgatgtgcggctgggaggcgggctaccgaggcgtaagaaataaagcagtagtagacgagagagccgcgatttataaagcgggtttgtgtggctcgctgctcgcctccgctccactcctctcacctggtgactgctcctcccacctcgctgtttcttctacgggatcaggttgctgcttgctgcggttcagatccttatccccttctgctttagatgggcctcgcggagcagtgcatggaggtggaggaggtgcgggactcggcgaatcggaggtgatcccggtcatggggtagagtggagtggagggggttgagcgtgtggtatggagccgtcccgtggcggtgttggcggcggcgggcggcggtggggggaggcggagggtgatgcggcggaggaagggagacgaggggaggacgggggcgaggtgagcctgcgggagtggctggaccggccgggccgagcggtggaggcggcagagtgcgtgcacgtgttcaggcaggtggcggaggcggtggcagtcgcgcacgcgcagggggtggccgtgggcagcgcgcggccgtcgtgcttcgtcgtgtcgccgcccttcgcgcgcgtcgccttcatcgagtccgcctccggctccgacgcctcgggctcgtgctcgggctctgacgcctccgaggacgccgacggcgacccggacccggacccggacccggacgcctcgcctccgctgcggcgacgcgacagcgccgtccccggcgaggagcgcgcggggaggtcgttcccgctcaagagcgtgctggccatggagctcagctggtacaccagccctgaggatgcggacgacagcgccgctaccttcgcctctgacgtctacagactgggtgtgctcttgttcgagctgttctatacgttcgaaacgatggaggacaagatgcgggcaatggcgaatctgcggcaccgggtgttgccaccgcagttgctgttcaaatggcccaaggaagcatccttctgccagttgctaatgcaccctgtgccagaaaccagaccgaagatgagtgaggtgctgcagagtgagttccttaatcagtcaaggaatagcctggaagagcatgaagcggcacttaggttacgcgaagagatagaagaacaagaattattgctggattttcttcagcagttgcagaaaagaaagcaagatatagccgacagtttgcagggcactattgctttcctctcttctgacatcaatgaggtaccccaccagcaatctacaattggccactgtgagaacttcttatccgatggggataaagaggtgtgctctggaactgttgaagagcagagtgattgtggatccaggaagcgttttagacctgagctgcaaggtgttgatatggaggaaaataatcgtagtgttgaagaatgttccagaacagtaccatcctctgagttaatccaggaaagtgttctgtctaaaagctccaggttgatgaagaacttcaaaaaacttgaaacagcctattttctaacaaggtccaagttgatgaagcaagttggcagccaaataagtagctgtgatcgagttgttaagaacactactggttcagctgttgggactgagggaagttcactagatgatttttctttggaaaggcaatatggtacaaggcaaagaggttgggtaaactcttttcttgaaggattgtgcaagtatttgtcattcagtaagttgaaagttcgggcagaactgaagcattgtgatttgctgaactcgtcaaacttagtatgctccgtagggtttgaccgagatagagagttttttgcaactgcaggtgtaaataagaagataaaagtgtttgagtataatatgattgtaaatgaacaccgtgatattcactatcctgtagtagagatgtctaatagatcaaagttgagttgtatttgctggaacagttatatgaagagccatattgcatctagtgattttgagggtatagtacaggtttgggatgttactaggagtcaagtttttgttgggatgagggagcatgagcgacgcgtgtggtcggtggacttctcaattgtggacccaacaaaattggtcagtgggagtgatgatggatctgtgaaactgctgggagtattggcactattagaacaagagcaaatgtgtgttctgtacaatttcaacctgatactgctcgctccattgccatcggctctgcagaccacaaaatttactgctatgatctacgtaacatacgagctccttattgtacactagttggccacacaaagactgtaagctatgttaagtatctggatgcatcaacaatactatccgcatctactgacaactcattgaagctttgggacttatcgatgaatccaggaaggataattgacagtccagttcaaacatttacagggcatacaaatacaaagaacttcgttggtctttccatatctgatggttacattgctactggctctgaaacaaatgaggtttttgtctaccacaaagaatttcccatgccagtgttggcttataagttcagcgtgacggaccctatatcgggacaggagattgatgatcagtcacagttcatttcatgcgtctgctggagagggcagtcttcaactctactttctgcaaattccagcggcaacattaagatcttagaaatggactgaggagtttgcatctgtttgagtctcagctataaatagaccgacttcttaggccgtgctcaacaaatcatgcatatagccgtggtagatgtcactgtctagggagttgagtttaaaatgagagattggatgagtaatgctgctagagatagcttaccaagttgtgcgcgtgcgtggcttcaaaatttgtggcgattaaatccagagttgccaacggtgcagcttaatccgagttgcagagttgggaaaggtagtagctgtagcagatttagcgtggttttataggattacagattagcgtggtagcaaaagtagcataaataggaaacagaattggggcgtgggatagtaccacggggaaaggttttgtacatcattggtttgaggtatacttgtacaggcaatcaatccagtttctacctaccagtaccagcatcagacttgctcttgtcatagtgttacttgaaaggtgaaaggtataaatcgctgtacatctgttgaatcagacatcagcatttgcatcattatctcccttttttattttccatataatattgatgaatgtgttaggtcgcagacatcataagacttgttggcattcgtctgcagacgtgaggcgaggagctgtgcataagttaaaagaatcttcagtatttgtctaatgctccgtttgtattgtcgatattggagcacaaaacaaattggaatcagctttcctaaaagagcccagcataaggccgctacttcgagtagaaacattgatttcagcgttttattaagactctgaagctatccccgaacatatggtccgcatgatggattgaagccagtggtcatctgaaaaatgctccagactgaat

SEQ ID NO: 74302 - DNA, 2640 bp, Zea Mays
gtctatcccagcagcttccatatcccatcccatatttcaaactccaatgtgtaaacagtgccacctactaaaccctcatttttcatgatccaccggagacaactagtgaggtgctgcagagtgagttccttaatcagtcaaggaatagcctggaagagcatgaagcggcacttaggttacgcgaagagatagaagaacaagaattattgctggattttcttcagcagttgcagaaaagaaagcaagatatagccgacagtttgcagggcactattgctttcctctcttctgacatcaatgaggtaccccaccagcaatctacaattggccactgtgagaacttcttatccgatggggataaagaggtgtgctctggaactgttgaagagcagagtgattgtggatccaggaagcgttttagacctgagctgcaaggtgttgatatggaggaaaataatcgtagtgttgaagaatgttccagaacagtaccatcctctgagttaatccaggaaagtgttctgtctaaaagctccaggttgatgaagaacttcaaaaaacttgaaacagcctattttctaacaaggtccaagttgatgaagcaagttggcagccaaataagtagctgtgatcgagttgttaagaacactactggttcagctgttgggactgagggaagttcactagatgatttttctttggaaaggcaatatggtacaaggcaaagaggttgggtaaactcttttcttgaaggattgtgcaagtatttgtcattcagtaagttgaaagttcgggcagaactgaagcattgtgatttgctgaactcgtcaaacttagtatgctccgtagggtttgaccgagatagagagttttttgcaactgcaggtgtaaataagaagataaaagtgtttgagtataatatgattgtaaatgaacaccgtgatattcactatcctgtagtagagatgtctaatagatcaaagttgagttgtatttgctggaacagttatatgaagagccatattgcatctagtgattttgagggtatagtacaggtttgggatgttactaggagtcaagtttttgttgggatgagggagcatgagcgacgcgtgtggtcggtggacttctcaattgtggacccaacaaaattggtcagtgggagtgatgatggatctgtgaaactgtgggatatgaatcaggcaattttattcttgcacctactgctgggagtattggcactattagaacaagagcaaatgtgtgttctgtacaatttcaacctgatactgctcgctccattgccatcggctctgcagaccacaaaatttactgctatgatctacgtaacatacgagctccttattgtacactagttggccacacaaagactgtaagctatgttaagtatctggatgcatcaacaatactatccgcatctactgacaactcattgaagctttgggacttatcgatgaatccaggaaggataattgacagtccagttcaaacatttacagggcatacaaatacaaagaacttcgttggtctttccatatctgatggttacattgctactggctctgaaacaaatgaggtttttgtctaccacaaagaatttcccatgccagtgttggcttataagttcagcgtgacggaccctatatcgggacaggagattgatgatcagtcacagttcatttcatgcgtctgctggagagggcagtcttcaactctactttctgcaaattccagcggcaacattaagatcttagaaatggactgaggagtttgcatctgtttgagtctcagctataaatagaccgacttcttaggccgtgctcaacaaatcatgcatatagccgtggtagatgtcactgtctagggagttgagtttaaaatgagagattggatgagtaatgctgctagagatagcttaccaagttgtgcgcgtgcgtggcttcaaaatttgtggcgattaaatccagagttgccaacggtgcagcttaatccgagttgcagagttgggaaaggtagtagctgtagcagatttagcgtggttttataggattacagattagcgtggtagcaaaagtagcataaataggaaacagaattggggcgtgggatagtaccacggggaaaggttttgtacatcattggtttgaggtatacttgtacaggcaatcaatccagtttctacctaccagtaccagcatcagacttgctcttgtcatagtgttacttgaaaggtgaaaggtataaatcgctgtacatctgttgaatcagacatcagcatttgcatcattatctcccttttttattttccatataatattgatgaatgtgttaggtcgcagacatcataagacttgttggcattcgtctgcagacgtgaggcgaggagctgtgcataagttaaaagaatcttcagtatttgtctaatgctccgtttgtattgtcgatattggagcacaaaacaaattggaatcagctttcctaaaagagcccagcataaggccgctacttcgagtagaaacattgatttcagcgttttattaagactctgaagctatccccgaacatatggtccgcatgatggattgaagccagtggtcatctgaaaaatgctccagactgaat

SEQ ID NO: 74303 - DNA, 292 bp, Zea Mays
atggtcgatggatatcgtggctgtttggttcagcttctgggcggcttctggccgccagaagctgaagctgaaaccaaacgcccaacttctggcgcggcttctgagcgaagcgattgtgtaagaagccgcccgcccacttacctcgcgaagcgccgttcagttggcttccgtccgaagccgcgcgcagttaggctagagttccctggaccgctcctccgccgccgccgcgaaccgaacggagcgccgccggtccgcaccacacgcatcgccgccggtgtacgcagtgacgccg

SEQ ID NO: 74304 - DNA, 1501 bp, Zea Mays
ctcgtgctcttttttcgcgagatcgccgaaccacgtcttctcgcaaatgacatgctgctcgcgtcgacgatcctcgtctacccttcggtgtcgacctcgtcatcttggatcccgcgtggtcaccgagacgactagcaacacccccgccgccccacaggcacaacgctccacgcctccgccaggcgccggtgctaagcccgagcaaaaccaaccagctgatcggccagtcggccacccaatcctgagaccgccatcgccttattccgttgtggactgtgagttggactacattacctccatgtcgagactgcgagctctgtggcaggcttcctttaacgccacaaagagagctcttgtatggagttcagatgatctaattccgccaagtgaaagatgtatcttcaatttcaactcaaaagatgagctgaaaaggtggcatttgtactcagattcagagtatggaggtttgtcttctgcatccttagaaataactgatggcgcttcagttggagatactccattaactggtgtgttttctggtaacctttctttggatatgtctgaagagtcaacatggaggatcaggcgctatggattctgtgggatgcgatcaaagaagtttgatgggttcattgaccttgatgcatatgatacaatagcaatgaagatcaaaggggatggaagatgctacatatctacaatatacacggagaattgggtgaattcacccgggcaacaagaagacaactcgtggcaggcttttgtgtacatacctcctcaagacagatgggaagtcttgaagatccctcttgatcgctatttacccacatggagaggaaatgtgatccaggcaaagttggaaatgaaccctgctcggatcgtggggatgtctctctctgtaaacgcagaaggcggtgttcctggcgccaagactgggcctggtgattttaggcttgatgttgcttggatcaaagcgttgagagctttgtgaactccacaagtcatagttttatttcacatcggccctttccttctttatcaccctgccccagtggcgccgctgaactcatcacccgaccacaaccacaggagtaaccatagcacagattgccaactcctttatgcacttaataatggattttgttttgcttctgaggtttatgaataagtggtagaaaaatggagcatttagttaaggtgccccctttggacagatgttgctttttctctctctctagtatctgatcggccgataaaacgagtgcattccacccggacgataatgcgagagtaggattcagtttaattctttgactgttaagagtactactgtttgatcgtttgaattatacacgttcatttgagtaatttttttttcattcaaggtgatcatgtgatttaacatgaccacttgtcatatttggtccccgtatgagatgtgtaatgtgtggggatattttctctctttaatacaaagaagggcagctaatcttgttttttg

SEQ ID NO: 74305 - DNA, 2100 bp, Zea Mays
caataaaaaaatagggtagccctcagttcctcaaccagcggccgaccgtcgaccgagaagcccgagcagcggtccgatcaggtgagcagcggcgcggctgctgcctgcccgcgcctgcctccgcggctccgccggccgtcgaccgagcagccgagcagaggcgcggcggctgcctgcccgcgctcgcctccgcggctccgctggccgtcgttcgccgacccgaacgccgagtcgcgcgagcgtgccggcgtgccccgcctctcgtcggctcgcgactgcgccagcgcggtcgcgccgccccaccccccggtgaccggcgtccggatccatccgtctggcaacccaaccggccaagggccaaccccgtccccggaccccgactccccgagggccaaccggccaaggcacaaccgctgaaccgcacaatgcatatttagtcgcctactcgcctaggcctattatttccctctcaaactcaaattcttcctggaatccaccaaagccctgcctcccctctactgattctgaaagtggagttccatctgcgcgtcggttgatttattctatttgctgagttggactacattacctccatgtcgagactgcgagctctgtggcaggcttcctttaacgccacaaagagagctcttgtatggagttcagatgatctaattccgccaagtgaaagatgtatcttcaatttcaactcaaaagatgagctgaaaaggtggcatttgtactcagattcagagtttgtcttctgcatccttagaaataactgatggcgcttcagttggagatactccattaactggtaatagttgttctatgttcttagcttttccatcttgtgccaatcatttgaagtatagtttgaattgagtactttctggtacaagagaaaacaatgatgtatctgtagcttcttacatttagcatgatagacctcattaaccatgaaatgtttgtggttttcttggaaaatgtctgaggtgagtccaaattatcagtgggtaccggctgctgtattttctttagtaattgaatcgaaacatgcagttttttacttatgattttcttagactggtttgtaaggtaacttttattaacatgtgtattcttgaaggtgtgttttctggtaacctttctttggatatgtctgaagagtcaacatggaggatcaggcgctatggattctgtgggatgcgatcaaagaagtttgatgggttcattgaccttgatgcatatgatacaatagcaatgaagatcaaaggggatggaagatgctacatatctacaatatacacggagaattgggtgaattcacccgggcaacaagaagacaactcgtggcaggcttttgtgtacatacctcctcaagacagatgggaagtcttgaagatccctcttgatcgctatttacccacatggagaggaaatgtgatccaggcaaagttggaaatgaaccctgctcggatcgtggggatgtctctctctgtaaacgcagaaggcggtgttcctggcgccaagactgggcctggtgattttaggcttgatgttgcttggatcaaagcgttgagagctttgtgaactccacaagtcatagttttatttcacatcggccctttccttctttatcaccctgccccagtggcgccgctgaactcatcacccgaccacaaccacaggagtaaccatagcacagattgccaactcctttatgcacttaataatggattttgttttgcttctgaggtttatgaataagtggtagaaaaatggagcatttagttaaggtgccccctttggacagatgttgctttttctctctctctagtatctgatcggccgataaaacgagtgcattccacccggacgataatgcgagagtaggattcagtttaattctttgactgttaagagtactactgtttgatcgtttgaattatacacgttcatttgagtaatttttttttcattcaaggtgatcatgtgatttaacatgaccacttgtcatatttggtccccgtatgagatgtgtaatgtgtggggatattttctctctttaatacaaagaagggcagctaatcttgttttttg

SEQ ID NO: 74306 - DNA, 1768 bp, Zea Mays
cctcagttcctcaaccagcggccgaccgtcgaccgagaagcccgagcagcggtccgatcaggtgagcagcggcgcggctgctgcctgcccgcgcctgcctccgcggctccgccggccgtcgaccgagcagccgagcagaggcgcggcggctgcctgcccgcgctcgcctccgcggctccgctggccgtcgttcgccgacccgaacgccgagtcgcgcgagcgtgccggcgtgccccgcctctcgtcggctcgcgactgcgccagcgcggtcgcgccgccccaccccccggtgaccggcgtccggatccatccgtctggcaacccaaccggccaagggccaaccccgtccccggaccccgactccccgagggccaaccggccaaggcacaaccgctgaaccgcacaatgcatatttagtcgcctactcgcctaggcctattatttccctctcaaactcaaattcttcctggaatccaccaaagccctgcctcccctctactgattctgaaagtggagttccatctgcgcgtcggttgatttattctatttgctgagttggactacattacctccatgtcgagactgcgagctctgtggcaggcttcctttaacgccacaaagagagctcttgtatggagttcagatgatctaattccgccaagtgaaagatgtatcttcaatttcaactcaaaagatgagctgaaaaggtggcatttgtactcagattcagagtttgtcttctgcatccttagaaataactgatggcgcttcagttggagatactccattaactggtgtgttttctggtaacctttctttggatatgtctgaagagtcaacatggaggatcaggcgctatggattctgtgggatgcgatcaaagaagtttgatgggttcattgaccttgatgcatatgatacaatagcaatgaagatcaaaggggatggaagatgctacatatctacaatatacacggagaattgggtgaattcacccgggcaacaagaagacaactcgtggcaggcttttgtgtacatacctcctcaagacagatgggaagtcttgaagatccctcttgatcgctatttacccacatggagaggaaatgtgatccaggcaaagttggaaatgaaccctgctcggatcgtggggatgtctctctctgtaaacgcagaaggcggtgttcctggcgccaagactgggcctggtgattttaggcttgatgttgcttggatcaaagcgttgagagctttgtgaactccacaagtcatagttttatttcacatcggccctttccttctttatcaccctgccccagtggcgccgctgaactcatcacccgaccacaaccacaggagtaaccatagcacagattgccaactcctttatgcacttaataatggattttgttttgcttctgaggtttatgaataagtggtagaaaaatggagcatttagttaaggtgccccctttggacagatgttgctttttctctctctctagtatctgatcggccgataaaacgagtgcattccacccggacgataatgcgagagtaggattcagtttaattctttgactgttaagagtactactgtttgatcgtttgaattatacacgttcatttgagtaatttttttttcattcaaggtgatcatgtgatttaacatgaccacttgtcatatttggtccccgtatgagatgtgtaatgtgtggggatattttctctctttaatacaaagaagggcagctaatcttgttttttg

SEQ ID NO: 74307 - DNA, 1790 bp, Zea Mays
cctcagttcctcaaccagcggccgaccgtcgaccgagaagcccgagcagcggtccgatcaggtgagcagcggcgcggctgctgcctgcccgcgcctgcctccgcggctccgccggccgtcgaccgagcagccgagcagaggcgcggcggctgcctgcccgcgctcgcctccgcggctccgctggccgtcgttcgccgacccgaacgccgagtcgcgcgagcgtgccggcgtgccccgcctctcgtcggctcgcgactgcgccagcgcggtcgcgccgccccaccccccggtgaccggcgtccggatccatccgtctggcaacccaaccggccaagggccaaccccgtccccggaccccgactccccgagggccaaccggccaaggcacaaccgctgaaccgcacaatgcagtgagagaccgaggtatttagtcgcctactcgcctaggcctattatttccctctcaaactcaaattcttcctggaatccaccaaagccctgcctcccctctactgattctgaaagtggagttccatctgcgcgtcggttgatttattctatttgctgagttggactacattacctccatgtcgagactgcgagctctgtggcaggcttcctttaacgccacaaagagagctcttgtatggagttcagatgatctaattccgccaagtgaaagatgtatcttcaatttcaactcaaaagatgagctgaaaaggtggcatttgtactcagattcagagtatggaggtttgtcttctgcatccttagaaataactgatggcgcttcagttggagatactccattaactggtgtgttttctggtaacctttctttggatatgtctgaagagtcaacatggaggatcaggcgctatggattctgtgggatgcgatcaaagaagtttgatgggttcattgaccttgatgcatatgatacaatagcaatgaagatcaaaggggatggaagatgctacatatctacaatatacacggagaattgggtgaattcacccgggcaacaagaagacaactcgtggcaggcttttgtgtacatacctcctcaagacagatgggaagtcttgaagatccctcttgatcgctatttacccacatggagaggaaatgtgatccaggcaaagttggaaatgaaccctgctcggatcgtggggatgtctctctctgtaaacgcagaaggcggtgttcctggcgccaagactgggcctggtgattttaggcttgatgttgcttggatcaaagcgttgagagctttgtgaactccacaagtcatagttttatttcacatcggccctttccttctttatcaccctgccccagtggcgccgctgaactcatcacccgaccacaaccacaggagtaaccatagcacagattgccaactcctttatgcacttaataatggattttgttttgcttctgaggtttatgaataagtggtagaaaaatggagcatttagttaaggtgccccctttggacagatgttgctttttctctctctctagtatctgatcggccgataaaacgagtgcattccacccggacgataatgcgagagtaggattcagtttaattctttgactgttaagagtactactgtttgatcgtttgaattatacacgttcatttgagtaatttttttttcattcaaggtgatcatgtgatttaacatgaccacttgtcatatttggtccccgtatgagatgtgtaatgtgtggggatattttctctctttaatacaaagaagggcagctaatcttgttttttg

SEQ ID NO: 74308 - DNA, 2081 bp, Zea Mays
cctcagttcctcaaccagcggccgaccgtcgaccgagaagcccgagcagcggtccgatcaggtgagcagcggcgcggctgctgcctgcccgcgcctgcctccgcggctccgccggccgtcgaccgagcagccgagcagaggcgcggcggctgcctgcccgcgctcgcctccgcggctccgctggccgtcgttcgccgacccgaacgccgagtcgcgcgagcgtgccggcgtgccccgcctctcgtcggctcgcgactgcgccagcgcggtcgcgccgccccaccccccggtgaccggcgtccggatccatccgtctggcaacccaaccggccaagggccaaccccgtccccggaccccgactccccgagggccaaccggccaaggcacaaccgctgaaccgcacaatgcatcgcctactcgcctaggcctattatttccctctcaaactcaaattcttcctggaatccaccaaagccctgcctcccctctactgattctgaaagtggagttccatctgcgcgtcggttgatttattctatttgctgagttggactacattacctccatgtcgagactgcgagctctgtggcaggcttcctttaacgccacaaagagagctcttgtatggagttcagatgatctaattccgccaagtgaaagatgtatcttcaatttcaactcaaaagatgagctgaaaaggtggcatttgtactcagattcagagtatggaggtttgtcttctgcatccttagaaataactgatggcgcttcagttggagatactccattaactggtaatagttgttctatgttcttagcttttccatcttgtgccaatcatttgaagtatagtttgaattgagtactttctggtacaagagaaaacaatgatgtatctgtagcttcttacatttagcatgatagacctcattaaccatgaaatgtttgtggttttcttggaaaatgtctgaggtgagtccaaattatcagtgggtaccggctgctgtattttctttagtaattgaatcgaaacatgcagttttttacttatgattttcttagactggtttgtaaggtaacttttattaacatgtgtattcttgaaggtgtgttttctggtaacctttctttggatatgtctgaagagtcaacatggaggatcaggcgctatggattctgtgggatgcgatcaaagaagtttgatgggttcattgaccttgatgcatatgatacaatagcaatgaagatcaaaggggatggaagatgctacatatctacaatatacacggagaattgggtgaattcacccgggcaacaagaagacaactcgtggcaggcttttgtgtacatacctcctcaagacagatgggaagtcttgaagatccctcttgatcgctatttacccacatggagaggaaatgtgatccaggcaaagttggaaatgaaccctgctcggatcgtggggatgtctctctctgtaaacgcagaaggcggtgttcctggcgccaagactgggcctggtgattttaggcttgatgttgcttggatcaaagcgttgagagctttgtgaactccacaagtcatagttttatttcacatcggccctttccttctttatcaccctgccccagtggcgccgctgaactcatcacccgaccacaaccacaggagtaaccatagcacagattgccaactcctttatgcacttaataatggattttgttttgcttctgaggtttatgaataagtggtagaaaaatggagcatttagttaaggtgccccctttggacagatgttgctttttctctctctctagtatctgatcggccgataaaacgagtgcattccacccggacgataatgcgagagtaggattcagtttaattctttgactgttaagagtactactgtttgatcgtttgaattatacacgttcatttgagtaatttttttttcattcaaggtgatcatgtgatttaacatgaccacttgtcatatttggtccccgtatgagatgtgtaatgtgtggggatattttctctctttaatacaaagaagggcagctaatcttgttttttg

SEQ ID NO: 74309 - DNA, 306 bp, Zea Mays
gaatatgttgtgatctcatcgcattcggcaaacacaagccacgaattgctcaaagcccttgcgcaatattcccagcatcacttggcagcaggaaaaacacacacgtagatttggggctacaaggaaatgaacgaatgaagcaggcacgcccaaagactgggaggagagacgaggtacacggggacacggctgtgtctggcaagaagcaacaaatctcccatggttgctgccttgctgattggaggcggcggcggcgttccgggcacagcggtagggttaagggggtggcttaacgacgacgcgtgc

SEQ ID NO: 74310 - DNA, 957 bp, Zea Mays
gtcaggggtggacccatcccaaattctgagtggaggcctaccatttaagtggaggtctaaacatagggcacagcggttactaagttgaggataagacagaaggaagctctgggagtagcagaaaaaagaggaggaagaagagggcctggaagtgttattggttctagcgctgccggttgtgtttgtgccctactatcgatatatcatgctggtggtacagcgtcctctgagctctggagactgggttttgttgctagtttctgtactaaactaagtgatacagtttcaagtgaaatagggaaggcttttggaagaacaacgtacctggtgacaacattaaaggttgttcctagaggtacagaaggtgcaatcagtattgagggtactattgctggaattctagcgtctgtgtttcttgcaggtgctggttatcttcttgggcaggtggatgtatcacaagttgtgttatgcgttcttgcttctcagattgcaaattatgttgagagctatattggggccactttacaagacaaggaaggttttgaatggctgaataacgatattgtcaatgtactgaatatctctattggtgccatattggctgttctaacgcagcagctgctcgtcagttggagatcttaatttttccttttgacttaggtctgcatccactattcgaattttattcttgtagtagctgccatattttgcccatctgaaatgtaatcatagattcacatttgggcccatcctaactttctctaggttccggtctttgttatgcctactgtgaaaatgcaaaactgtctttccttcagttacattgaggagttctctaattatgctgttaacttaggcagatgttgattaggatctgtttgatagagctctcaaagtgttttttgggagctgaaaacaattttttttattaagaagtgggtgattttatgctaatta

SEQ ID NO: 74311 - DNA, 2536 bp, Zea Mays
cgcaaccagacaagggtatgtgcgagagcaactggacggacgggtaggcacgcccttatccactccggcgcggggagccgaagctgcgctgggcccagccggggccgtcaggcgggccatgcggcggaagcggtgcggtgcggtgcggtgcggtgcggtcgtgcgggcgatcttctagtccctgtcgatccacgtcgactcggtgtctcggtcaaggccttctttatcctccccgacctcacccagcgcgaccgtcaccgtccccggccactattattattttaccatcacctacccgctgccttcctccttcttttccctttcccatcgtcgaatcctcgccccttctcccgtcggctgttgcttttgcttcgaattcccgatttgcttgccggaaccctagcgacgccgtggtgacgcgacgccgacgcgtatggagatctccttcgaggcgtgggagggcgtgcagcggcatggtcaggacctcgcggaccgcctcgcgcagggtttcacgggcctgctccaggtgccgccgcagttcccgtggccgccgtcgccgcacaagcggatgcccttcgacatcgacctccccgtcgtccccttcggcgccggcggccccctcggcgtcccggggaaggacttccccttccccgccgcggccgtctcctcggtcatcgacatcggcggcaggctgggccaggccggcgctgagctcggggcgtccgtgggcggggccgtgcagcacgccgtgcggcgtctgcccgtgccgttccggaacggacagatccggcgccgcaagctaccgccgccgcttcctcagccgcccgcggattcggtgggcgagggcgcggtagggctcttcgtcgaaagggctgctgtagataggtgccccctcgaggcggcggccgccgccgccgccgcggcgactgggagcgctgccgcatctagcgtcagcggccctgttagcggagaagatttggacgaggacgacgatggtttcggctgcgatattgggactcttggaaacttcaagaaagctaacggtactgtaaatatgtcggcaacatacaataccaggagtcaagacatcgagagttctgttgttgcacgtggaggcctctggaggctggaggcatcggttggtccatctacttctggaaatgatacttcgcccctgtaccttattcagttggggcctctactatttgttcgagactctacgcttctcttgcctgttcatctatcaaagcaacatttgctttggtatggttatgatcgcaagaatggagttcattccctctgtccagctatatggtcaaaacataggagatggttgatgatgtcaatgatgtgtctcaatccaatagcttgttcgtttatggatctgcaattccctaatgggcaactaacatatgttgctggtgagggaatatcagccagtggctttcttccgttatttggtggtttgcttcaagctcatggaaaatatcctggagaaacaagaaataagcgtggcacaaggttcactcctatggtccaatggcccgataagtctgtttcattaggagttactcaagccttggcatggaaaagatctggccttatggtgagacccagcatacaagtcagtgtgtgccctacgtttggaggaagtgatcctggggtacgtgcagaagttgtccattcattgaaagaggaattgaatctgatgtgtggcctctcttgctcacagcgcccatcagcttatactgctctctctattggacgatcaaagtggaatggtcaagtgggcagttctggagtggtaatcaccttggaaacacctcttaataacattggaaggccgtcgttatctgttcaactgaatggtggttttgagttgtgatccttatgactcctgcactgaagctgtacatactattgtatatattgccatcactaatgttcgtgctccattgtcatggagacggctactcagctgatcaacctagaaaagtttgtggaagtgggctgcaggcttgcaggttgtttttgttactgtagtctataggtctaaagtctcaactcagcaaatcagctgctatggtatactcatgcgggcacagaactcaactgctttgttttccactcgaagaattataacaatccttgaagggattgcgatacttgcagcagttcagctcatattttcagaagttcatgaaagcggagggctcgctgccatggaatatgttcgtccagaatcacattttcttggagcaagactgactacctgtcgcaaactcgcagttggacattgttaacaattgtctgtttagtttgctttgttggatgttgagacaaacaagctggtgtatttttgtatttctctacatgcattgatcaatgaaccaaagactagcgatccctgttctactgttccactgacatgacaaatctgctgtcgatgttgtcccattacgtgctagtttcaaccttaacttatactagtttcaatcttaacttatatggaatttgactatgttgcagaaagaaa

SEQ ID NO: 74312 - DNA, 1502 bp, Zea Mays
aacttcgtcacggcgtcctgcttggcaagctcaggccacactacctctccagcgacgcctacggcctacctcattgatggcctcccctgctccaacctcgccgccggcgccgcgaagtcccccgcgaatctccccggcgtctgcggcaagacgggagctggtgaacaagattacaagacccatcaattgcctcctccaaccaccgtgtgttcccaagagaaggcccaaggctcaacgtcctcgctccatgcctcgccgcagcaggactgcaggagggtggccggcgttggcccctgttccccgggaccagtggtgtctgaggcgcaaaagaagacttctgacacaacgggagaggaggtggagtatgtatcccggtggcttattgtggcaactggtgagaatgctgaggccgtgcagccggatatcggtggtctacaagagttcccgggaacaatcatgcacaccagtgcatataaaagtggcagtgcattcactgggaagcgtgttctcgttgtcgggtgtggaaactccgggatggaggtgtgcctagacctctgcaaccacagtgccgagccccatattgttgtaagagatgctgtacacatcttgcccagggagatgcttggccactccacctttggtctgtcaatgtggctcctcaagtggctcccggtccacgttgtggaccgtgttcttctgtgcatagcgcgggccatgctcggggatactgctcggcttgggctaaagcggccggcctctggtcctcttcagctcaagtcactgtctggaaagaccccagttcttgacgtcggcacatttgcaaagatcaagtctggagatatcaaggtacgacctgccgtaagacaggtatcaggaagagcggtagaatttgcggacggtgagttggaggagttcgacgccattgtgcttgcgactggctacaagagcaatgtccccttctggttgaaggaccgagtgttattttctgaaaaagatggattgccaagaaaagcatttccgaacgggtggaagggtgagaagggcctgtactcggttgggttcacccggcgtggactgatgggcacctcggtcgatgccaggagggttgcccacgacgtcgagcagcaatggcggaaggccaaagggacgcatcgggacggcgttcctctacctctggtcgctgttgtttaccatggtgatgggttgtgattgtgagttgccaaagggtgtatgtacgtacgcatgcattctgctgcttgcttgtgtagtgctttgtatagggtattgtactgtcaatttctttttctttttttcttttggcgtgcgttcgttttgatgactaaccatcctacgtactataggggagggggtgaatactgaggtggccgtgttcttccaaagtcggggctcagttgacttggcctctagctactgataatgaaagaagcttgcctggttttgttctgtgtacggtttcgtggcgcttgcgaagcaaatttaat

SEQ ID NO: 74313 - DNA, 1238 bp, Zea Mays
aacttcgtcacggcgtcctgcttggcaagctcaggccacactacctctccagcgacgcctacggcctacctcattgatggcctcccctgctccaacctcgccgccggcgccgcgaagtcccccgcgaatctccccggcgtctgcggcaagacgggagctggtgaacaagattacaagacccatcaattgcctcctccaaccaccgtgtgttcccaagagaaggcccaaggctcaacgtcctcgctccatgcctcgccgcagcaggactgcaggagggtggccggcgttggcccctgttccccgggaccagtggtgtctgaggcgcaaaagaaggtacacatcttgcccagggagatgcttggccactccacctttggtctgtcaatgtggctcctcaagtggctcccggtccacgttgtggaccgtgttcttctgtgcatagcgcgggccatgctcggggatactgctcggcttgggctaaagcggccggcctctggtcctcttcagctcaagtcactgtctggaaagaccccagttcttgacgtcggcacatttgcaaagatcaagtctggagatatcaaggtacgacctgccgtaagacaggtatcaggaagagcggtagaatttgcggacggtgagttggaggagttcgacgccattgtgcttgcgactggctacaagagcaatgtccccttctggttgaaggaccgagtgttattttctgaaaaagatggattgccaagaaaagcatttccgaacgggtggaagggtgagaagggcctgtactcggttgggttcacccggcgtggactgatgggcacctcggtcgatgccaggagggttgcccacgacgtcgagcagcaatggcggaaggccaaagggacgcatcgggacggcgttcctctacctctggtcgctgttgtttaccatggtgatgggttgtgattgtgagttgccaaagggtgtatgtacgtacgcatgcattctgctgcttgcttgtgtagtgctttgtatagggtattgtactgtcaatttctttttctttttttcttttggcgtgcgttcgttttgatgactaaccatcctacgtactataggggagggggtgaatactgaggtggccgtgttcttccaaagtcggggctcagttgacttggcctctagctactgataatgaaagaagcttgcctggttttgttctgtgtacggtttcgtggcgcttgcgaagcaaatttaat

SEQ ID NO: 74314 - DNA, 2609 bp, Zea Mays
caagaaaccaaagtaatggccgttaatcatttcttccttggttcagtttttgggtctaattttgataagtttgttctgctacctgctgatggcactcgtgggggtattatcattgcttggaagagtgcaacagttcaggtcctagcttcccgggtggacagtcattcagtctcagttcagttcgccgaggttgaaggccgcaattggtggtttactggtgtgtatggtcccaagaggacgacgacaaattggccttccttcaggaactgggagatatcagggcagcatgtcctgggccttgggctattgcaggggatttcaatctgatttatcaagcttctgacaaaaacaataataatctgaatcgtgcaatgatgggttgttttaggcgcctctgggatgatttagaatgtgtttggtttgaggtcaaagtgggatgatgcgggggcgataccgtcctctcaattttttaagatcacgccgccaccaaaaactactcctgtgtttatctcgctcctacgtgactctcatccaaacactataaaaactatggccgccccatttcatcctttcatatacatccaaccaaacacatccttagagctgcaagaaacccctctttcgggacgaaagtttacctggtccaatgagcgtgacaatccatccaacacctgtccggctggaccgtgccttttgttcagttgattgggatgatatttttccggatgctgtgcttcagttcaaagcactacatctggaatttcagatcactgccccttgttattaggccttaaggtctgctcccagggtaaaaggaggtttcattttgaaagtttttggcccaagatggcagtttttttggatgcagtcaagcaaaactgggaggcacctgttactgctacttgcccagtctagagtttatttatgaaactgcaaagactcagcagagctttgcaaaagtggagccaacgtaaggttggcaacgtaaagttgcagctcgcaatggctaaggagattttgcaccggttggaaatcgtcagggactctcgtgctttatctcaaggggaggattggctgcgcagaaagctcaagggtcattgtttggggctggtttctctggatgaacttcatttctaaacggcaagttgaggacaagttatatatttctcaggatgagaaggaggagatagtggcagatttctatgagaagttgcttggttcagaagaggagagggaattttgttttgaccttgcagccttccacatgcagcagcagcatgatctgtcccctttggaagccccttttgcagaagaggaagtttgagcagtaattagggacctaccgatggacatggcccctggtccggatggcttcaccggtagattttaaggttggctggagtattattagcagcgatgtgcttgctgcgctgaatgcaatttatgggggccatgtgttcaaatttaggctcttaaactcagcattcataaccctgctccctaagattgaggatgctaccatggtgaaggattatcgacctataagcctgattcacagctttgtaaagttggtcaccaagatcctttctgctcgcttggcaccattgctgcccaagttggtctctaataaccagagtgcattcgttgaaggacggaatattcacgacaatttcctgccagtacaacagcttgccagagccgtgcataaaagcaaagagcctcacatcgatgaagttggatatttcgaaagcttttgacactgtgtcctagctcttcctattagaggtcctgcagcatctgggttttgggagatggcggtgtaaccttctgtgtttgctcctgtccacctccaccacataagttttggtgaatggtgtccctggctgccccattctccatcgccgtggactcagcaattcttgaactccttacgtggcaccacttacccttgtaagctgactattatcacttagcgtggaggtggaagacttatgggtcatcaacttgtttttcggaccgccactcaagtagaaatattctgcttaggcctttctgaaagtaaaggtacttcccattttcaatagcagttgctatgataaactgacggagcattctagagtcttcaaatttgtaaagaacggaattgcatttaagcaattttttattcatatgatagctgcaaggacattgattcgagataattatatatatcactttgttttaaatctgaaatgcatactatttgccatattccccctttccataaagaagtgtatgcaatgtggaatatggttctttaacttttttattactaagttgtgttatatgacgtccttaagcaaatattccaatattattacgttcctgcattaccttatgcatgtgcataatcttacccgtacaagtacaatttgattaacacacaagggacttttgtagcttctatctatacgtgttccaacaggtgtgtatttatttttcaagagaggcagacttcatcaccttttcttgctttatcaatccatttgcatatccatttttataatcttttgcatatccagttagtttgcactgtctccttagcatgacataaactactcatgagaaac

SEQ ID NO: 74315 - DNA, 805 bp, Zea Mays
ccctggctgccccattctccatcgccgtggactcagttcagacaatctgctgctgcccatagctgggcaaggtccctggcctaggatttctctttatgcagataatgtgattacttttttgaagcctgaacttttggacttatctgtggtgagggatttgttacattgcttcggggcggtctctaggctcaaaaccaacttgttaaaaagctcagctatagtgctctgaggatgacattgtgcgtactttgaatattctttcttgctcagttggcaaccttgttcttatctaggtatacccctcacaattaagaagccttctaaaagtgatttgttgccattgattgataaagtagcaagcaagctgccagggtggaaggcccctctcttgagcaaagtttttttttttctcgaacacgcagagagctgcgtatcattatattaaaagtagaaagaaataaggtccaaaatagaccggagtacaagtgacgccttacgacggtctaaacgtaacaaacataaactgattcatctataatggccttatgctaggtgcttgggtcttatggaatcatagaaacagatgcatttttgatggcatttcttctaatattgctaatttcttaatttaagttggggacgagcgccgtctgtgggagactgttggggccaagggcttgtcctcccttgctgcctccctctcttgagcaaagctggacgactggtagtggttaaatcagtcctcttcaacccctattcacgtaatgttggcgttggatctgtctaagtgggttattaaggccat

SEQ ID NO: 74316 - DNA, 1657 bp, Zea Mays
acaacagaagttgggtctccgatatcatgggtgctctcacggtccaagtgctgtttgaatatctccacatctgggagctgctggaggaggtgataatccagcccgacaccctggatactcttgtttggaggctttcttcttcgggatgctatagcagcaaatctgcttatgaaactatgttcgttggcaccatcaaattctccccttggaagcgagtgtggaaggcttgggctcctggaaagtgcaagttttttatgtggctggccctcaataaccgatgttggacctcggattgcctggcaaaaagggggctgttccatcagtcggcttgcctcttgtgtgaccaggctattgaatcaatcaaccatgtcctctcttcctgtgtgttggccagggaggtctggaccttggtgctgtttgagaatatcaagccaaatgcacagttggttgtccaggctgtagcgactgaagggtgtttggcgggggcaaaagccctccaggacttcgtcctaagggttggctcttagaggtcgtggtcactttttttcctttgtgtttgtgtaagggcggtggtgttgtactgtttggccatgggggattcttttctcccaggaccttgactttgctttcttaatgaaatgacgcgcaactttctcgcgtggttcgagaaaaaaaaaacaacaccgctctgctttggcttcccgatgggggtgtcggaacaccctgaaccgcagagacacgctgcgcgctaggtacacatcttgcccagggagatgcttggccactccacctttggtctgtcaatgtggctcctcaagtggctcccggtccacgttgtggaccgtgttcttctgtgcatagcgcgggccatgctcggggatactgctcggcttgggctaaagcggccggcctctggtcctcttcagctcaagtcactgtctggaaagaccccagttcttgacgtcggcacatttgcaaagatcaagtctggagatatcaaggtacgacctgccgtaagacaggtatcaggaagagcggtagaatttgcggacggtgagttggaggagttcgacgccattgtgcttgcgactggctacaagagcaatgtccccttctggttgaaggaccgagtgttattttctgaaaaagatggattgccaagaaaagcatttccgaacgggtggaagggtgagaagggcctgtactcggttgggttcacccggcgtggactgatgggcacctcggtcgatgccaggagggttgcccacgacgtcgagcagcaatggcggaaggccaaagggacgcatcgggacggcgttcctctacctctggtcgctgttgtttaccatggtgatgggttgtgattgtgagttgccaaagggtgtatgtacgtacgcatgcattctgctgcttgcttgtgtagtgctttgtatagggtattgtactgtcaatttctttttctttttttcttttggcgtgcgttcgttttgatgactaaccatcctacgtactataggggagggggtgaatactgaggtggccgtgttcttccaaagtcggggctcagttgacttggcctctagctactgataatgaaagaagcttgcctggttttgttctgtgtacggtttcgtggcgcttgcgaagcaaatttaat

SEQ ID NO: 74317 - DNA, 8220 bp, Zea Mays
  misc_feature (8220)..(8220): n is a, c, g, or t
agagtatccaaacatagccttaggtgccttggtattcaggagttacgtttcttgaatctggtgttacctttgtgtatatatgtcatgactaacatgatttctggtattactgtgaaactatttttattattccttgcaagttatggctgtatgttgtatgtactggagttctgctccagtaaacagttttagaagtaacccgctgaaaaatttacttcagctatttttatgtcaagttatgcttcaagaaaattttttgtgtaatgtcactggccgcaaaattcccatgggaatcattccattgttcttttgtatcactgccattcattggctgctccggtgtgctacattaatcaatatagctgcatgcttcataaatttattagtgttcttctctactgttttaagaaacaagtttatttgtcatagtcaatctcaatcattgttagatgagcaagacaaaatgagtgagacaatgaagctgaggattctttagtctttaccatagtctagtgcattaggtgtacttattatgagatctcagctctttttctcgatagtcccctattctaccctattatttatctatatttgcagtcaagttctaggctagtttctgatagagtttacctgttctttacttatgtatgtagtaatattctacaacatgaattcacttttggctgaaaaaagttatcagcaataaaagttttttctctcgaacgcgcaagaggactgcacatctttatatatcagagagaagaaaaacacccacaaagggcaaaagtatagaacacaaacacacatacacactcttctaaagcacacaccaggacagggagacctgccacgcagaccccaacgcttacaaagcagaaacacggtcagccaaaccaatgctccctaattgcttggccccggctagaacccagcaagagagctcatcaaggaaggatctcagcaccttcacaatggaagaggactcctcatggaagatcacctagttcctatgaagtaaaggcaccatgccccaaggatgatagcactgtgccactattgaagcccttcttcttgtctttatggatttgattgatcactcctcaccaccactctgcaaaggaggcctccacaagactaggaataagatgtcctagattagaaggggatagaatgccatgccagaactgatgtgcaaaaacacatgtagttagaagatgttgaactgtctcctgctcttgatcacaaagggggcaaactactgggtgaggcatgccatgctttcacaatctgtcagctgtccaacacctgtttcttatggcagccataggaaggttttgcatttggggggggggggcatgatttccataaacgcttccatggctcaaaggtgatggaaccagagaataaaattttgtaacaagatttagaagaaaactgcccagatgactcatgcctccatacatgttggccagtttctggaatcaagacaacctcacgaagagagtcccaaaggagaaggtattgttgcattccaaccagagtaagaggtaacctgatatctctgatccactaaccattattaagggcttgagccaccgttctagaggaggtcaactgcttgtccacctttgagaatactattggagctaaattcttgatgaaattcccactcaaccacctatctgtccaaaagagagtatcattacagtttcccacatgggagatcactgaaatggcaaccaacgtctcgacttgtggctgcacagggatatcaagaccaatccaagacctgttagggtcagatttctgcagccacaaccacctggcttgcaacgcccagcttctgtaaagcagatttgggaaaccaagaccacctagatgcagtggcctattaaccttctcccaagccacaaggcagctaccaccatttatctcctttctacccttcggtcccttccagagtaaagtccgtctaattttgtcgatagctttgatcacccacttgggaacgctcatagcaatgaggagatagattggaatggctgagaggacgaaacgaaccaaggttgttctcccggcgagattaagaagggatgccttccagttaggtagcctcgcagtaatcttctcaacccaatcaatgaggtcacttcttcgtagcttcttgttggagatcggcaagcccaaataagtgcatgggaaggcagcgttcacattggagggtgctgcagctatcctgcacaacaggcgcaacacaacagatagggattgcacaacttttattcatgttggcaaccagcccagatgcttctccaaagcagtcaaggatcaacttggtacaaaccagatcatcatccagaggcttaacaaagagaaccacatcatctgcgtacatggagagcctagacctaacatttgcagcctccaaactatgcagcagccctctagattcagcgtgcctgaataagctgccaagtacgtccatcacaatgataaaaaagcataggagacaaaggatccccttgacgcaaacctcgccgatgccaaatatgatcatctgggatcccattgagaagaacttgtgtagaggaagaggtcaacaggttggagattaagttgcaccatttcagaccaaagccaagatgggacagcacctccaagagaaaagcccaagagattgaatcggaagcttttgtaatgtcaagctttaaaacaagctagagacctttcgctgatgaagggacttgatcgaatgttgaacaagcatatagttaacatggatagacattcccctcacaaaagcactctgatttgcagccactaacctttgcaggagaggagccaaccggttagccataatcttggtcaccaatttggcaaaactatgaatgagacttataggcctaaaatcaaccaaccggttagccataatctcgtcaaaagcagcgagccgccatgcccacagcacggtgcccctcatccaccgtcgccgtcgagcctacaggcctcggccagccacctcacttgtcgccgccggtcccgatctccctcttggcggatgctcccgacatcacttcgagcggttaggctctaatgaagtactcgactccgataccaattgaaagtcgcctatagggaaggtgaataggcaaatctgaaatttataaactttaagcacaatctacaagccgaattagcgtgagaaataaaagcgagtccaaaagagaaggcgaaaacaaatcacaagcaaatgaagagtgtggcacggtgatttgttttaccgaggttcggttcttgcaaacctactccccgttgaggtggtcacaaagaccgggtctctttcaaccctttccctctctcaaacggtcacctagaccgagtgagcttttctcctcaatcaacgggtcacttagacccctcacaaggaccaccacaacttggtgtctcttgctttgattacaaagttgttgagaacaagaaatggggaagaagaaaagcgatccaagcgacaagaactcaaatgaacacaaatatctctctctcactagtcactatttgtttggagtgattccagacttgggagaggattgatctcttgtttgtgtcttggagtgaagtctagagctcttgtattgaatgcaatggctaaaaacttggatgccttgaagtgtggtggttagggggtatttatagccccaaccaccaaaatggccgttggggaggctgtctgtcgatgggcgcaccggacagtccggtgcgccagccacgtcacccaaccgttaggttcgattggagctctgatagttgggaccgccggacagtccggtggtgcaccggacaggtactgttcactgtccggtgcgccttctggcgcctgctctgactctgcgcgcactgtccgcgcactgtagcgcttttacaggtttccgttggagtcgatcgttgcgttgtagccgttgcactgctggcacaccggacagtccggtgaattatagcggagttgctttccaaaaacccgaagctgagcagttcagagttgatctccctggtgcaacagacactgtccagtggcacaccggacaatccggtgcgctagaccagggcagccttcggttggttttgctcctttctttttgaaccctatcttagactttttattggtttgtgttgaacctttggcacctgtagaacttataatttagagcaaactagttagtccaattatttgtgttgggcaattcaaccactaaaattatttaggaaaatgtttgaccctatttccctttcacctctcatccctaccagctcaggactaggcgtggttctaccaatttggtataggacatgccaggttcaacagcagcggatgacaccacatccacatccgccctgaacagcaccgcgccggaagcttgatctggttctgaagatcgtcagcgaccttgccactaagttctcggacctctccactcgtgtctccgacattgacgcccgcccccatcaatccctccactcccaccacaacccaccagaattcccatatggcatggctaggtatggagggattcctctggccaccatgcaaaccaccacgctccccttagtcgcaccccgacttcctgaacaccaaataccattcccacattcaccatcccccattccatcgcttccaccaacgttaccaccatccctaactttcccatccggccaccaggactacgccacaacgacagacgacgttccccacttctacaacatggtggagcgtgacaaccccaacatgtcatgggagcgcttccgggagctctgcaatgagcgtttcagaccaaccctctaacataatccactaggcgaactggcacgtctgcagttccgcaccacggtggaggaataccaagaacggttctgtgcattgttgggacatgtggaaccgttatcggcagcacaagtacatctattcacgataggattaccagatcacatccgcattgatgtcgagcttgtagggaccccggacatctagcaggcccttcggttgacaagggcttatgagaggcgctcacaggctttggacttccttccacaaccaacaagaggacgcaacaccagacaaccagtccgagcggccacaccaactccatcagtatctgccccaccagtgacaacaactcagacaggacagaccacacagccgacgcgtccgttcaaatgtctcacaaatgcaaagatggatgaacgacatcgacaaggactcagctacaactgtgatgagaagtacgtacggggacatcgctgcccacgactattctacctggaagtcatggatgacgacaacgacgaaggtcatctacctctggggcagcgttggggctctgcgagggctcagggaaggcgggggatcttcagagaagctcaccgagtgaccaaacagcgggggcgagctcaccggcgttgagaacaatgggtgcaatctcggcggcattggcaaaagcgacgggcagaggatgaagaagggggtagggttgagacggggctaggcggcttaaataggcggatgggggagcgcggtcttggccgacaacgctactcgtgcacgtcatgccgaccaatctgcagcggggactgccagccaccgcggcgaccggccaacacgcgggcggggacaacacaaagaagcagagaaggttcctgacaggtgggggccacagggcagcgggcgagcgtgcaaaaacacaacggtacatcgctgacaaccgagcccacgcgacaacaacactaggtgcaggcacgcgggtcgtccgcgtcgcacgcgactgcgactgacagtcaggtcctaccggtcaacgatatagagcggtttaaaattgaaatctttgaatccgcagagaatagctccgaaaatctaataaaataggttttggaaatctaaaaatatgaggattcctcccctataacccaacacccaacacttttttttctctcgaacgcgcatgagagctacgcatctttatatattggagagaaagaaagacagaaggtcttacaagatgggagacaaaacctgctatgcaggaatccccagaaaaacacccctccttaggattaatctttaataattagaaaacagttctaactcacatagaaatccccttttcaaactaatttgattcaacccactaataagggaattaagggttgaaactacacttaaaatgttcatgtttgaggggacattaacatggtctcatttctcaagaggttttctcatgacaacaaccactcttctactcatgacaagtaagcacataagttacttaaattaacaaaaatgtttatgatgatgcacaaatgtcatggtgatgctttacgatgcttttgatggcataatcacaaggtaggaaaggtagaggcgtgacaagtaaaataatttttagtatgataattaaaatatatagtactactaataaacttaatttgtagcctatgtttaattcataaaagataacgatagtacaagaaaggaactaactacaacaacaaagccttttagtcctaagcaaactgaagtgggctagattgaaactaaacaacaaccacaagtcaaggttcacgcacatagatagctgtttttgatggattcctataaggttaaatctttaggtatattcatctttttaagtctcattttattgtctcttcccaagtcaatttcgaccttcccctgccacgtacatcatcgtttccgactcgatcccttcttgtatggacacaaattcaaagcaacatacatattttcgcagcacttatctgctgaacatggcatctcctgtagatcaacattctttaccatacaacacaacaggtctaattgccgtcctataaaactttcttttagctcctgtggtactctcttgtcacatagaatgtcaaatacaacaaagaaactaaaagaacagtaaaatatttattatggctactgttggagcgaagctcgtccgcctccctcgatcagtttttttaacttaaattggacaggttctatcatagacataggagacaaagggtacttcgaccgttaccgaagtcgaggtctctgtccaagaaccgtggaaggctttgaagcgaagggatcacccgtttaaagcgggggctcctcatgtcttcgctcagtgacgccgccagcttgggcggttccgagccgcagccttggcgaggatcgaagacccgacgccccagagcgaagagtgccgcgcacaggcgaggacctcgccatccaatagcggggtccatgctgcatcctgctgaccattcgggtccattgttggaactgtagtgggttcgagctgttttctttaacttaaattggataggttcttaaccttgtggtcgtgggtttgagctgtttggacctgcttgaccacgtgtcagatggttccaacatttggcacccaccgtagagctcgaacccacgaccacaaggttaagaacccgtccaatttaagttaaaggaaactgtcgaaacaccaatgtgccggccccgtgatctcgccgaaacgcccagccgttgcggcgtgatttgtgaaaccacttaccgatctctccctctcgtgagctgtgacccgagtggctgagccaggagcaatgctacagcttcacgtattcaccttttggctgttcctaagctcctagccttgtagggtggaagttgcaggattcgtgacccttcgtgacatttcaatttttattactacattagaatttagaaaacaatctatatgcacacatatcacatatgcaggagtacatacatgggttcatgagccctgtctagtatgaccccctggccatcacccctctggccggcctaggctgtcggccctgctactactcgcaccgagtcttctgttgtttcaacctttaattatttctggaagggtatacttctacatgccatgtcctgttgtgctctacctgcaacaatgctgggcctgagatgattcatggcatgtgaaaggtgaaatagcattcactgctaccggagtgttcgaggaagaaaaaaaaatctctcttactgaaagggtatgttggagctgttcactcaccaaaataaaggaaacagcattctgagagtgctctcactgcaagaatccccaaaagcgatggctcaagagatcgcattgtacggtagtggactgggtacagaggaatccagtggaatcn

SEQ ID NO: 74318 - DNA, 3740 bp, Zea Mays
ctgagtttgtgcgagttgtattatgtgcgtattgtatgtatatcttcttaatactagcaacaaagaaaatggtgtctggttatcagtcagtggagaataagttcggtgaatggtgaacccattgtatatatagcgctatgttgctcaacagagcacaccacaccacaccagagttacatcattagttccagtcctgcttcacacctggccctgttttgcttgaccttttagctgtgatcaacctatatggtcagctaaagaaaatgctttacttgtccatggaacttaccagattaccagtagtttacacttcacccatgagattttttttttgcttctgttaataccctcattaaaatcagaagtgcataaaaaaacttgacctaagggataagacagcccctgggtattaaaaagaccttctcatgcatgttgagaaaactccggaaccctaccccacctatacacagcggcaccgtaacacacatgaaaacgaccgtgactaggagtcctctgctttgtcatgggatagaagaggagatttttttaacccagcctgaaatttgtttccatggggagttagactcaggacataaaagtaagagacttagagtaggtaaggtggaaagcaaattagcagtaggttaaggtagtaagatagtgaggaaagttcccttgagtttgaaactttattgaaatattcaaccgcccatcattgcattatattcttttaattatgggcaatttttggttcgtttgagtagattatgggattttggctgagctcaacagcaattctggtcattcttgtttgtttggagttgacgtttagaattgttaggccctaccatggagagatgttgggaacaccactattttgtagggatcttctgaatgcaaaaaaatgaaattaggtacagcacttggccagtcagtttgtagggggttatttgtcgggtgcaatgccacgatagtgtgttataacatagattgctgacgtctgacaacataggtctaataattccttgatgctgtgttggaaacaagatgatccatgaacaacccattgaaaaagttcaagaacgctgaaatttccaatttacctgggcccagccgtttaatgtcccaatccaaggaatcgtcataaaaattgtttttggctagtgattttcatggtaccagacactgatgtagctacaattgtgccagatgctgatcagtgcttattgttcgtgcatgcttctaggatattgtttcaggagaattgtttgtggatgcttctagaatattgtttcaggcgaacaattctgtggatacttctaggttagcttcaggaattgaacacacatttggtaacatagtagcttacataactctttgagaatcattcatatttaactgcacgagatcattggtggagaattagatatggcagaataaatcatggcacacaaggtctttggttgcagtacgttgcttttgctaatatattaacttctatccattttacgcatctttgctatagcaggcctagcttttacagtttaagcatttactatgtacttcaatcttgccatgaaaataaaaagtatattctcatccttgttgagggctattacacctcatgtacagttctgtgattaaactatatcactagggtctcatgtcctatgcatgttctcttttgtgagaccttgccacatgtctgcctgagtcacttagtgatcctccatgactcacctttctatattattttgggatgggcgtacttgatctgaatcaaaatgagactcttagagtatataggggcatagagcacacaactagcttagctaggccatgccttcaaaaactgtgcatgaaactctagaagacagacatcttcaaaacttcctcctctctactcgtatttccctactgtcttctaactcgtcaaacaacaaagagtcacaccagattgcccaggcaccgacctcttgaaaagaaccagggttcttataaatcattcgcatcagtcctcacagtgtcttctggagatgcacacaacatatctcccccatccttctctctcacccatgccttcataaacagcaaagttggctagctggttatttgtatcaagatgaagtttgaagccaacacatccatttctcgctagtaagatcaagaaaaatccattgaagcctacttcctacctaaatcttcatggatccttggagtgaaagtgagggcaagagagcccatgatcctatcttcaaatgtttcagccaaaaccaaggtcaccatcacttcatggaaaggagcacagatgctgctgttgctctctctgagagatgtagatgcatctgggtttcaggtccaattatcgtgggtgcaggaccatcagggctcgctgctgctgcatgtctcaaggagaagggaatcagtagccttattcttgagcgctccagatgcctagcttccctctggcagctcaagacatatgatcgtctcagccttcatcttcctcggcaattcttggtgtgcgcagagtatgatgaacagcttctgttatggcgtgtgaggacgcagacttctgacacaacgggagaggaggtggagtatgtatcccggtggcttattgtggcaactggtgagaatgctgaggccgtgcagccggatatcggtggtctacaagagttcccgggaacaatcatgcacaccagtgcatataaaagtggcagtgcattcactgggaagcgtgttctcgttgtcgggtgtggaaactccgggatggaggtgtgcctagacctctgcaaccacagtgccgagccccatattgttgtaagagatgctgtacacatcttgcccagggagatgcttggccactccacctttggtctgtcaatgtggctcctcaagtggctcccggtccacgttgtggaccgtgttcttctgtgcatagcgcgggccatgctcggggatactgctcggcttgggctaaagcggccggcctctggtcctcttcagctcaagtcactgtctggaaagaccccagttcttgacgtcggcacatttgcaaagatcaagtctggagatatcaaggtacgacctgccgtaagacaggtatcaggaagagcggtagaatttgcggacggtgagttggaggagttcgacgccattgtgcttgcgactggctacaagagcaatgtccccttctggttgaaggaccgagtgttattttctgaaaaagatggattgccaagaaaagcatttccgaacgggtggaagggtgagaagggcctgtactcggttgggttcacccggcgtggactgatgggcacctcggtcgatgccaggagggttgcccacgacgtcgagcagcaatggcggaaggccaaagggacgcatcgggacggcgttcctctacctctggtcgctgttgtttaccatggtgatgggttgtgattgtgagttgccaaagggtgtatgtacgtacgcatgcattctgctgcttgcttgtgtagtgctttgtatagggtattgtactgtcaatttctttttctttttttcttttggcgtgcgttcgttttgatgactaaccatcctacgtactataggggagggggtgaatactgaggtggccgtgttcttccaaagtcggggctcagttgacttggcctctagctactgataatgaaagaagcttgcctggttttgttctgtgtacggtttcgtggcgcttgcgaagcaaatttaat

SEQ ID NO: 74319 - DNA, 3153 bp, Zea Mays
ctcgtctaaaaacttaattccgaatccatcccagcacacgcacgtttctcttctgcccggcgcgtgacgcgtctccaaaaaaaaaattccccagctccttcgccaccggcgaaccctggcttcccgtcctcccacggttcctccgcatcgtgctacatggcggattcgcgaggaatagcttccaagagcgctgacaaggatagcacctccactcgcccggcgcgcctccgcgtcatgcgccaggaagtcaaggattttttgacgagtcctcgccgtagccgccccaagaagcagccgcctccgcctcatcccccgccgccactggaggagaaggtgaaggagaggaagaagggaaaggagaaggcagcgacggaggaagagaaattcgagcgcgcgcaatacagctgtgccttccaggacgagggcgatgggggccgcgacttcgcgccgccggagctggtctggggtaaggtgcggagccacccctggtggcccggacaggtattcgacgccgccgatgcgtcagagatcgcactgcagcaccggaaagccggcgccccgctcatcgcctacttctgggacaggaccttcgcgtggagcgactcttctgcgctgctccccttctgcgccaactttacgcgactatccacccagagtactatgtctagcttcgtctccgccatcgactccgcgctgttggaggttgagcgacgcgtagaggctggcctctcgtgcggttgcttcagttccaacattgccacgaagcaggaggttcaaaactccggtatccggcaaggggcgtatggtgcggcgatagactctgtctacacgagggatgccttccatggcaaaacatttcttgactacatctcagcactaggaaagaagccactagccggtgctgatcttcttgacctagccaccgccaaagcacagttgagggcattcaatcgttcaaggggttcaagggaccttcctgagtttgtgatgtttgagggcattgcggagattacagagatgacacacacaaagggagaaaggatgcacaagagtgaggatgatgttctgagcaaggagaagaaatcgaggcgcgctgggagttcacgtagaaaaggagaggctttaccagaggctgcaaatgatgatgctatagatgaagacagcaatggaggggcaggaaatgatacgttgagtcagggggaaaagtcaaagcgtgtgaagagttcatcgaagaagaaaacagacatttacaaacatttatatggactcaaaactgattctgttgctgacagcagaacactggacaagaagggagtagatgatgttttgagcgagagaaaatctgggcgcacactgcgatccacgagcaagaaggaagatgcattagagggtttgaaaaggctggcaaagcatggaattgaggaattagcaggaaaaagcaaagatgcccccgttcttaaagaaaacaatcagaggcatggtgcaggctctgcacacaagggtagaatcacagaggatgggtatcatagacttggagattgcaatgctgaggatctaacttctccaagcaagagaagattggggcataatgaaaactcaataatcaagccagtgaccatctccgagcatggtaggaagaagaagaaactttctgaactcatggcagctataggcaggcctaattctgtatcgggtggtaagagcaaagctcgagggaagcgttcgttgcatggtttagctgagaaacctgaggatgctgatcgccactctaaggatacattgatgactaggaaaagaaagaagctcaacacattaggggatttatcttcacagtcagagcctctctctcctaagaagtccacaaaggttggagaactgatgagcaaagcagctgggagcaacatgttacaggcagcacctgctgtcaaagctattagtgcagtgtctcagacgaaaccacgtagggctaagcacaggcaagtaaatgctgcagacaaatctccacgtcatatgaaggtaaatcgggggaacagcaaagccgctagtaaggagtctctatcttgtggagaaatgctacggcagatctcattagcagcatgtggtcttaagcagagagaggaaattgctccttcaagtgttaatttctttaccgattttaggaagaactccattttttctagttctgatgtcgatgagaggatgcctgagaaggcaaccaacgccgagtccactccttcagaacagcccattgttgatcatatgcaggatgactattggtccgacattctcattaatgtggaggagccgttatctagcctcaaaaagaagatatataagagtaagaaaagagcaaacaagaaggcacctcaggttaagaaacctcctgttaattcattggcgactgcagaaaatgcggatgagccaaggagtgaaggcaaccaagatacagaaaatggggaacaacttaggaacaaaacgaagctgttttctgcaaatggatctcaacagaatgggacaaaatctggtgaagagatggaaaatagctttctgtctggactggtgctgcacttcagcaggccaagtgatgttccatcatgcagtgaccttatcaagatctttagccaatacggtcctgttaatgaagccaaggcagaggttgcaaacagtaccagctctgctcaggtgatcttcaagaggcgcatggatgctgaggcagcgtttgcaggtgctgggaagatcagtgcccttggaccagcccttacgagctttcgtctcaccgacttcccagcaagtgcttcaggaaataaagcttcacatggtgcatgaaagagcgaatagagtgttgcatggcagtgagggaaaccagatgagggagttagagaaaaaggtatactctactgtatgtggtagctaggttgttgcaggattaattcataggaacagcgatgacacttgtgtcgtccagtgttgtggaggtgtcatatactgcagatcacttgacatgagttgccaagaaccaataggtgttgtaaaagcatgtttgttttaaactgagttttggtacttaaaaagtgtgctttgtttcttaataatccaagtactggatattgttgcgggtgcagttggatgtttcttaacaatagcatgtagaag

SEQ ID NO: 74320 - DNA, 1512 bp, Zea Mays
gcaggctgctgatacgctccgaccacagccgtcctccgccaggcacccaggccgcctccgcctccctcgccatcgccagtcgctcgccgccttgtcctgctccctcgcctctcctgctcggtgctcgccagtcgcccccgctccctgggcacccgcgtcccttggctcacccgacgccgccggcccacggttggcctggccccctcccccctcgcctgctctgctgcggcgctgctcgcccgtcgccccgcttccctggctcactccctcttttcggtctctgtcacccttctcacggaggaacaaaggatcagaaatggctatgcaggccacaaggaggctagcgtctttgagcctccaacgacgcctactccttctctctcagaccgaggccccaagcatcccaaccgcggcggcggcggccttcctccactcccatgccaccagcttcggtacacattccctgtattttccttgttttttctgcttatatagatcctaaaatctcgtagttcaccagggtacaagcagattcgcgaagaggataagagcaaattggttggcaacgtgttcagcagtgtggcttccagctacgacctcatgaacgatctcatgagtgtcggcctgcataggctgtggaaggacaggcttatttccaagctgaacccctttccggcaatgaagcatctcgatgtggctggtggaacagagctatgcagggtacacttactgaaaccgaagaagacacccacatttatgtctgtgacattaatccaaatatgctaaatgttgggaaaaagcgtgctgcagaaagaggttatagcgaagagcattgtcttagctggatacaaggagacgcagaagctctgagttttgaggatggatctatggatggttacactattgcatttgggatcagaaatgtgacgcacattgagaaagctctatcagaagcttacagggttctaaagcgaggggggaggttcctatgcttggagttgagtcatgtggatgtccctgtttttaaagagatgtaagtttcgtcaatcatgtttattcgtcaatctttgactgttctctttcaaaattcctgcccttcttattttttcagttatgatgtttactcgttttctgtgattccgactattggagagctggttgctggtgatcggcagtcgtaccaatacttggttgagagcatccgtcggtttccaaatcaggaaaagtttgctcagatgattcaggaagccggattccagagggtggaatatgagaacctcgtgggtggtgtagttgccattcattctggactgaaactgtagagctgaatacggatggatgttttttatcattcatgcgtgcaccgcaccttctaaaaacaataaattctacaataagcagtactcctgcaatatattttgttaatgttgtttttgaaatgaattctataacatcaaactgattttattacatatctcctgcaatatattttgataaagaattcatttgaac

SEQ ID NO: 74321 - DNA, 1155 bp, Zea Mays
atcgtcgcttgtcgtcatcagcaagctacaacatatcgaagaacaaaggatcagaaatggctatgcaggccacaaggaggctagcgtctttgagcctccaacgacgcctactccttctctctcagaccgaggccccaagcatcccaaccgcggcggcggcggccttcctccactcccatgccaccagcttcgggtacaagcagattcgcgaagaggataagagcaaattggttggcaacgtgttcagcagtgtggcttccagctacgacctcatgaacgatctcatgagtgtcggcctgcataggctgtggaaggacaggcttatttccaagctgaacccctttccggcaatgaagcatctcgatgtggctggtggaacaggtgatgttgcttttcgtgtactggaaagaattaagagtgtgagtcacagagctatgcagggtacacttactgaaaccgaagaagacacccacatttatgtctgtgacattaatccaaatatgctaaatgttgggaaaaagcgtgctgcagaaagaggttatagcgaagagcattgtcttagctggatacaaggagacgcagaagctctgagttttgaggatggatctatggatggttacactattgcatttgggatcagaaatgtgacgcacattgagaaagctctatcagaagcttacagggttctaaagcgaggggggaggttcctatgcttggagttgagtcatgtggatgtccctgtttttaaagagatttatgatgtttactcgttttctgtgattccgactattggagagctggttgctggtgatcggcagtcgtaccaatacttggttgagagcatccgtcggtttccaaatcaggaaaagtttgctcagatgattcaggaagccggattccagagggtggaatatgagaacctcgtgggtggtgtagttgccattcattctggactgaaactgtagagctgaatacggatggatgttttttatcattcatgcgtgcaccgcaccttctaaaaacaataaattctacaataagcagtactcctgcaatatattttgttaatgttgtttttgaaatgaattctataacatcaaactgattttattacatatctcctgcaatatattttgataaagaattcatttgaac

SEQ ID NO: 74322 - DNA, 1202 bp, Zea Mays
ggaatctggaaaatctgaggaacaaaggatcagaaatggctatgcaggccacaaggaggctagcgtctttgagcctccaacgacgcctactccttctctctcagaccgaggccccaagcatcccaaccgcggcggcggcggccttcctccactcccatgccaccagcttcggtacacattccctgtattttccttgttttttctgcttatatagatcctaaaatctcgtagttcaccagggtacaagcagattcgcgaagaggataagagcaaattggttggcaacgtgttcagcagtgtggcttccagctacgacctcatgaacgatctcatgagtgtcggcctgcataggctgtggaaggacaggcttatttccaagctgaacccctttccggcaatgaagcatctcgatgtggctggtggaacaggtgatgttgcttttcgtgtactggaaagaattaagagtgtgagtcacagagctatgcagggtacacttactgaaaccgaagaagacacccacatttatgtctgtgacattaatccaaatatgctaaatgttgggaaaaagcgtgctgcagaaagaggttatagcgaagagcattgtcttagctggatacaaggagacgcagaagctctgagttttgaggatggatctatggatggttacactattgcatttgggatcagaaatgtgacgcacattgagaaagctctatcagaagcttacagggttctaaagcgaggggggaggttcctatgcttggagttgagtcatgtggatgtccctgtttttaaagagatttatgatgtttactcgttttctgtgattccgactattggagagctggttgctggtgatcggcagtcgtaccaatacttggttgagagcatccgtcggtttccaaatcaggaaaagtttgctcagatgattcaggaagccggattccagagggtggaatatgagaacctcgtgggtggtgtagttgccattcattctggactgaaactgtagagctgaatacggatggatgttttttatcattcatgcgtgcaccgcaccttctaaaaacaataaattctacaataagcagtactcctgcaatatattttgttaatgttgtttttgaaatgaattctataacatcaaactgattttattacatatctcctgcaatatattttgataaagaattcatttgaac

SEQ ID NO: 74323 - DNA, 1772 bp, Zea Mays
gttggagttactctaatattagacataggtttatagaacaaaagtctacccattaaaaaatatttctaaatataaatttaaaataattattctttaaatgatagaagataaagtttgaattttaaaatacgtaacggagggagagggagtagcactctgtaattatccgtgaaaaaaaagaaggaagcaaaacgaacatgtggggaaaaaacttggattgagtagggtgggttggtcggaagtccgacggacgggacgggacgcgagacggtgccgcaccgcccgcccgttttcttcctcagcgccggcacggcggcacatccactccaccgcaactgagccatctcttctccttcctcctccgcgcttctgaatgttggagatgataagatcatcataccacggaattcagtggtcgaggttaatcagtcgggtcttctaatggagacactcattgatatcacacccaaggatccactccctgcaccttcagtaggaccacttgacccagactgcaccaaagaaggtttgattctctgtgacaaagagaggatgaaaggacagcaaggtgtaagcttagatgcattggtgggaatatttacccgactaggtagagacatggaggagattggcgttagcaaaagctataagttggctgaaaaggttgcatctataatggaagaggcacaacctcttcttacacggattgaggatttagctgaagaaatgcaacctttgctctctgaagtccgtgatagtgatctgctgaaggatgtggagactatagctaaaggcctggccgacgcgtctgttgacctaagaaggctgaagtcgtccatgctcaccccagagaacacggatcttattaagcagtctattttcacccttatatttaccctgaagaacattgagagtatcagctcggacatctctgggttcacgggtgatgagacgacaaggcagaacatcaagcttctgatcaagtctctcagcaggctattatgattgtttttcaatgtgcagaacagaatgatggattgctttgctttgctttgctttgtttgagacaggaattgatgctggtagagtagggtgactgtgtgtgtcttggtggcacagaggtgtaggaagagtagcagctaattaatgttccacaaggttttggttattctggtaacaagtttttttttcttttttctttttttttaaaaaaaaaactcggatcagtattgagctgttgtaggtcatatagtaggcccatttttcatcagctgatggatcgcccttgttggctgcctgagcaaatgcgcaactgattgtttctgttgtggattggtgcaacttgcaaatgattgaagcttatgacgaggccgtggggatggtgtaggcgatcgatcttaaacgccgaagcatgcacagatgcaggagtggaagcagccgagctggaatgatgatgaagtgcaggggtagacattttaaaaccgaaacctgaattcgaatagaccgaattatcgatctattctgtttttcgggttcgattcatatatatatgctatattttaggatatgggttcagttcctaacctttaaaatccgaataacccgaaatataaaaaaagcttttaatatgtgatggtattattatgtgatttatgaacttattaactaaaaatcatgatatcatatgtatatatgtatgttatttttttagtcacttgttgtaataatagtactttcaattaattaattattgtatatattataataaaaga

SEQ ID NO: 74324 - DNA, 1546 bp, Zea Mays
atcaattcccgtgatactagtactccttgcatgcctgactaaccacaactcgatatatccaacctacattcctttcctgttcctcaaattgttaattgcattgcctcagtgcttactctccgacccaaaccttcttctgattgatagaggttggagatgataagatcatcataccacggaattcagtggtcgaggttaatcagtcgggtcttctaatggagacactcattgatatcacacccaaggatccactccctgcaccttcagtaggaccacttgacccagactgcaccaaagaaggtttgattctctgtgacaaagagaggatgaaaggacagcaaggtgtaagcttagatgcattggtgggaatatttacccgactaggtagagacatggaggagattggcgttagcaaaagctataagttggctgaaaaggttgcatctataatggaagaggcacaacctcttcttacacggattgaggatttagctgaagaaatgcaacctttgctctctgaagtccgtgatagtgatctgctgaaggatgtggagactatagctaaaggcctggccgacgcgtctgttgacctaagaaggctgaagtcgtccatgctcaccccagagaacacggatcttattaagcagtctattttcacccttatatttaccctgaagaacattgagagtatcagctcggacatctctgggttcacgggtgatgagacgacaaggcagaacatcaagcttctgatcaagtctctcagcaggctattatgattgtttttcaatgtgcagaacagaatgatggattgctttgctttgctttgctttgtttgagacaggaattgatgctggtagagtagggtgactgtgtgtgtcttggtggcacagaggtgtaggaagagtagcagctaattaatgttccacaaggttttggttattctggtaacaagtttttttttcttttttctttttttttaaaaaaaaaactcggatcagtattgagctgttgtaggtcatatagtaggcccatttttcatcagctgatggatcgcccttgttggctgcctgagcaaatgcgcaactgattgtttctgttgtggattggtgcaacttgcaaatgattgaagcttatgacgaggccgtggggatggtgtaggcgatcgatcttaaacgccgaagcatgcacagatgcaggagtggaagcagccgagctggaatgatgatgaagtgcaggggtagacattttaaaaccgaaacctgaattcgaatagaccgaattatcgatctattctgtttttcgggttcgattcatatatatatgctatattttaggatatgggttcagttcctaacctttaaaatccgaataacccgaaatataaaaaaagcttttaatatgtgatggtattattatgtgatttatgaacttattaactaaaaatcatgatatcatatgtatatatgtatgttatttttttagtcacttgttgtaataatagtactttcaattaattaattattgtatatattataataaaaga

SEQ ID NO: 74325 - DNA, 416 bp, Zea Mays
caaaggaacgcctggtagtggttacacacactgcacttgtcttgtcatctgccttctctcccgcccgctttattaaaggatggatgtctcatttgttccgaacaaaccgcttcagacgatacaaggtaactgacctactaagaagaggaagacgaagacgaagatgaggaatcctgagcatcgggtccgtctgcttggtcgataccaaacttgtgcttgaaggtgtcctggcgctgcatccacatcatgtggccctgatacaccaacgaaatcattttggattcggaaagggaggcggaggggaatagaagcctccggatccagtcgatgacaagcatgcatgaggaaagcctgcacctacctgcagcgctgctgcccatacgacgaggaaggaggccacccagaagcgcttctcc

SEQ ID NO: 74326 - DNA, 1609 bp, Zea Mays
ccaaccctaacttcagcccctgccgcgcgcccgcgatccaccccgtttcgactgctcgcctgctgcgtgctgcctgctgtctacggcctcatacgactgccctgcgcccctcgtggcttctgcggttctgcacacgcgcacttgtccccaaacagcggcgtcggcgtcggcggcgatgagtatctcaggcgagcttcccggcgaaggatctgacggcgaggaggaggtcttcatcgacgaggaggacatcatccacgagataaccatcgacgaagaagatctccccgaccgcgacgaagaagatgacgacgtcggcgacgggattgttgattcagaagacatcattgatgattctacgtactcatttcttggccacaaagatgaagtcttctctgttgcatgcagtcctacagatgcatcacttgtggcttctggaggcaaagatgataggggatttctgtggaggatcggatcagatgagggtgccttggagctgactggacacaaggatactgtcggcacagtggctttcagttcagatgggaatttgttggcttgtggaagttttgatgggcaaataaatgtgtggaatacagctgcacgagctctcaagggaacccttgagggttctgggtcaggttttgagtggcttaaatggcatcctcggggacatttgataattgcaggatcagaggattgtaatgtatggatgtggaacgctgaccataatgccattataaatacatttgttggacatagtaacacagtgacatgtggtgattttactccagatggtaaacttatatgtactggatcagatgatgcatctttgaggatatgggacccaagaagtgcacaaagcaggcatgttattcgaggccatggttatcatactgatggattgacatgcttatcaatgactttggattcacaaacggttgttagtggctccaaggacagttctgtgcacgctgtgaatgtaaactcgggccagatcgttggctcactagtaggccacaccacttccattgagtgtgttggtatctcatcaagctatggctgggtagctacagggagcatggatcaaaagctgatcatatgggacctcacacaccagtccagccgatgcacttgtgaacatgatgagggagtgacatcactggcatggttaggttcgtcaaggtatgttgcgtcaggatgcatcgacggcaaggtgcgcatctgggacagcctctctggggattgtgccagggagttcagtgggcatgcagatgtagtacagtcgatggccatcacagctgacggcaacgccatggtctcggtctcatcagatggctccgcccgtgtgtttgacatctccatgttcaagtgaaggaaactgggacggagtagatggttgctgtgtatgctaatgcttgttcgcggtgcatgtgcatgaatgatgatggcatgccatggagagaagtaatctgttctgcacttctgcttatagtgatagaggtcaggcgggaattctgtcacgtcatcacgagggacctgctaaaattcagggttcttgatgtagaagatcctagaggctagctgagagagcctcaacggccggaagaag

SEQ ID NO: 74327 - DNA, 3059 bp, Zea Mays
ccaaccctaacttcagcccctgccgcgcgcccgcgatccaccccgtttcgactgctcgcctgctgcgtgctgcctgctgtctacggcctcatacgactgccctgcgcccctcgtggcttctgcggttctgcacacgcgcacttgtccccaaacagcggcgtcggcgtcggcggcgatgagtatctcaggcgagcttcccggcgaaggatctgacggcgaggaggaggtcttcatcgacgaggaggacatcatccacgagataaccatcgacgaagaagatctccccgaccgcgacgaagaagatgacgacgtcggcgacgggattgttgattcagaagacatcattgatgattctacgtactcatttcttggccacaaagatgaagtcttctctgttgcatgcagtcctacagatgcatcacttgtggcttctggaggcaaagatgataggggatttctgtggaggatcggatcagatgagggtgccttggagctgactggacacaaggatactgtcggcacagtggctttcagttcagatgggaatttgttggcttgtggaagttttgatgggcaaataaatgtgtggaatacagctgcacgagctctcaagggaacccttgagggttctgggtcaggttttgagtggcttaaatggcatcctcggggacatttgataattgcaggatcagaggattgtaatgtatggatgtggaacgctgaccataatgccattataaatacatttgttggacatagtaacacagtgacatgtggtgattttactccagatggtaaacttatatgtactggatcagatgatgcatctttgaggatatgggacccaagaagtgcacaaagcaggcatgttattcgaggccatggttatcatactgatggattgacatgcttatcaatgactttggattcacaaacggttgttagtggctccaaggacagttctgtgcacgctgtgaatgtaaactcgggccagatcgttggctcactagtaggccacaccacttccattgagtgtgttggtatctcatcaagctatggctgggtagctacagggagcatggatcaaaagctgatcatatgggacctcacacaccagtccagccgatgcacttgtgaacatgatgagggagtgacatcactggcatggttaggttcgtcaaggtatgttgcgtcaggatgcatcgacggcaaggtgcgcatctgggacagcctctctggggattgtgccagggagttcagtgggcatgcagatgtagtacagtcgatggccatcacagctgacggcaacgccatggtctcggtctcatcagatggctccgcccgtgtgtttgacatctccatgttcaagtgaaggaaactgggacggagtagatggttgctgtgtatgctaatgcttgttcgcggtgcatgtgcatgaatgatgatggcatgccatggagagaagtaatctgttctgcacttctgcttatagtgatagaggtcaggcgggaattctgtcacgtcatcacgagggacctgctaaaattcagagacggacatgatggggtttggcgtcaataaataaaagaggaagggccaggggaaggagaacgccaaaacaaagcttttgttgtctctcacctactattcttcttgcctcctccctccaccagcatccctgagtctgccatgggcaactgctggggaaccaagattagctctgacaccgccgcctccccttccacatcaccgttccctcgcagcgagggtgagattctccggtgtgccaatgtcaggagcttcaccttgacggagctgatgacctccacccggaacttccggcccgacagcgtcctcggcgagggaggcttcggctccgtcttcaaggggtggatcgacgagaccaccttcgccccggccaggcccggcacagggatggtcatcgctgtcaagaagctcaaccagcagggattgcaggggcacagggagtggctggctgaagtcaactacctgggccagttgtctcaccccagtctcgtaaggctcgtagggtactgcctccaagacgagcagcgccttctcgtctacgagttcatgccgcgaggaagcttggagaaccatcttttcaggacctcacgtttccagccgctctcctggaacctacgaatcaaagttgccctgggagcagccaagggccttgcgttcttgcacagcgacaaggccagagttatctaccgagatttcaagacatccaacgtgctcctggattcggtaagtatatatgtatatatatctgaacatataactgaaacaagctcctaacatataactgagacttttgtgtgtgttttcagaactacaacgccaagctgtctgacttcggtttggcaaaggacgggccaaccggcgaccagagccacgtgtccaccagagtcatgggcacctacggatatgctgctccggaatatctcgcaacaggtcatctcacgccgaagagcgacgtctacagcttcggcgtcgtgctgctggagatgctgtcgggccgccgcgccatggacaagaaccgcccggccaccgagcacaacctcgtcgactgggcgcgcccctacctcagcagcaagcgccgcgtctcccgcatcctggacgaccgcctggccggccactacccgctgccggccgtccaaagggcggcagcgctggcgctgcagtgcctctccgaggactccaggaagaggccaaccatggaccaggtcgtcgcgtcgctgcagcaactcacagccgcccaggaccacgacgatgcccaccggtcgtcgcgcaggtacccaaaagatcaccgtcaggctgcggcgctcaacaaccggaatctgaacgctcatcgccgcctgtccgccttgcctctacccgagtgaactaccatattcatattcgatcatcttttgtatcttcacaaaagtagtatgtaaatccgtggtgaagacctgggtaattagtgataaaacacaacttgattgttgattagatgtaaatggtggcttcaacttaaccggtttatggaagag

SEQ ID NO: 74328 - DNA, 4467 bp, Zea Mays
ccaaccctaacttcagcccctgccgcgcgcccgcgatccaccccgtttcgactgctcgcctgctgcgtgctgcctgctgtctacggcctcatacgactgccctgcgcccctcgtggcttctgcggttctgcacacgcgcacttgtccccaaacagcggcgtcggcgtcggcggcgatgagtatctcaggcgagcttcccggcgaaggatctgacggcgaggaggaggtcttcatcgacgaggaggacatcatccacgagataaccatcgacgaagaagatctccccgaccgcgacgaagaagatgacgacgtcggcgacgggattgttgattcagaagacatcattgatgattctacgtactcatttcttggccacaaagatgaagtcttctctgttgcatgcagtcctacagatgcatcacttgtggcttctggaggcaaagatgataggggatttctgtggaggatcggatcagatgagggtgccttggagctgactggacacaaggatactgtcggcacagtggctttcagttcagatgggaatttgttggcttgtggaagttttgatgggcaaataaatgtgtggaatacagctgcacgagctctcaagggaacccttgagggttctgggtcaggttttgagtggcttaaatggcatcctcggggacatttgataattgcaggatcagaggattgtaatgtatggatgtggaacgctgaccataatgccattataaatacatttgttggacatagtaacacagtgacatgtggtgattttactccagatggtaaacttatatgtactggatcagatgatgcatctttgaggatatgggacccaagaagtgcacaaagcaggcatgttattcgaggccatggttatcatactgatggattgacatgcttatcaatgactttggattcacaaacggttgttagtggctccaaggacagttctgtgcacgctgtgaatgtaaactcgggccagatcgttggctcactagtaggccacaccacttccattgagtgtgttggtatctcatcaagctatggctgggtagctacagggagcatggatcaaaagctgatcatatgggacctcacacaccagtccagccgatgcacttgtgaacatgatgagggagtgacatcactggcatggttaggttcgtcaaggtatgttgcgtcaggatgcatcgacggcaaggtgcgcatctgggacagcctctctggggattgtgccagggagttcagtgggcatgcagatgtagtacagtcgatggccatcacagctgacggcaacgccatggtctcggtctcatcagatggctccgcccgtgtgtttgacatctccatgttcaagtgaaggaaactgggacggagtagatggttgctgtgtatgctaatgcttgttcgcggtgcatgtgcatgaatgatgatggcatgccatggagagaagtaatctgttctgcacttctgcttatagtgatagaggtcaggcgggaattctgtcacgtcatcacgagggacctgctaaaattcaggtgccactgtatatgttttatattgcagctttagtccgttgcagtttttagcaggcagtctgtcatttttggttcagaaaataggaaactcgatagaaaaaaacccataaacccgatgaaatctgatttgcattgcgacatcttaatgagcttctccatatctaacttgaaccagttagatttgtctaagcttcttattgaggttgtacttgtaacttgttgcaatataaagtagatgtacttggactcagtaactcataaacaaacccatatactgccactagggttcttgatgtagaagatcctagaggctagctgagagagcctcaacggccggaagaagggtcccagcatcatgtccctcagcttggagggtctcggtctgagagccctggcccctgtgttagatgaccttatgagtacagactacagagctggctcaatttgaagtttctttctgctattgtgatctttgaaaataatgttttgccggtatccgagcatacgacctctttttttcccggacgccttaaaattccggttatgaactagtagacctatggagctgtttgattcagccattttagacctgtaaccattccctgtgacagctgatgccgttccttagagtttggttagcgcactgcgtaatggatagcagcgttatcggatacaagcatgtagaatctcattcccattccctacctatcgtcatccgataccctaaaaacagaaaatgttgcccacaacaaccaaacaaagggcggtaatcattactctgcatcggatgacaccggttgctgatcccactgccgttaccgctcctttcgtccaagcaaacagcacctatattgcatctcagttaagggtagcagcaccggggacgtatgaggggagaataagaaaggatgatagtttgccaagaaatgaacacagcaagctgttgttcctcctcctttggcatcctctgcctgtcagtaatcatgcggtcaaaatttaattagcaagtgatctctagtggacaaggtagcagagctgcctgctgttgctggtggatggacgtgtttgacttgtgcagctggacagcgactcctttccttcctgtacagtacgccacgccactaaacaagtcaaaaggatggtctcacgggcagcagcaaccaggcccaggggagggaacataatttttttcccaggggagggcgcgccactgacgactaatacgcatcactgcatcagttcacacacgcaccagttcacacgacaccctgctctgctgcttgcataatttatttagtagtcaaaggggaaaacaagaagatatggatcattttggattagatatcttgattaagacttgaatatacataaagacgtatgaacgggcgggcgaagatagtaagggaaacacggacagaaaagtaataaagatattggctcttttaatattagatatatagatattggtattgaacattgattgatatacagagacggacatgatggggtttggcgtcaataaataaaagaggaagggccaggggaaggagaacgccaaaacaaagcttttgttgtctctcacctactattcttcttgcctcctccctccaccagcatccctgagtctgccatgggcaactgctggggaaccaagattagctctgacaccgccgcctccccttccacatcaccgttccctcgcagcgagggtgagattctccggtgtgccaatgtcaggagcttcaccttgacggagctgatgacctccacccggaacttccggcccgacagcgtcctcggcgagggaggcttcggctccgtcttcaaggggtggatcgacgagaccaccttcgccccggccaggcccggcacagggatggtcatcgctgtcaagaagctcaaccagcagggattgcaggggcacagggagtggctggctgaagtcaactacctgggccagttgtctcaccccagtctcgtaaggctcgtagggtactgcctccaagacgagcagcgccttctcgtctacgagttcatgccgcgaggaagcttggagaaccatcttttcaggacctcacgtttccagccgctctcctggaacctacgaatcaaagttgccctgggagcagccaagggccttgcgttcttgcacagcgacaaggccagagttatctaccgagatttcaagacatccaacgtgctcctggattcgaactacaacgccaagctgtctgacttcggtttggcaaaggacgggccaaccggcgaccagagccacgtgtccaccagagtcatgggcacctacggatatgctgctccggaatatctcgcaacaggtcatctcacgccgaagagcgacgtctacagcttcggcgtcgtgctgctggagatgctgtcgggccgccgcgccatggacaagaaccgcccggccaccgagcacaacctcgtcgactgggcgcgcccctacctcagcagcaagcgccgcgtctcccgcatcctggacgaccgcctggccggccactacccgctgccggccgtccaaagggcggcagcgctggcgctgcagtgcctctccgaggactccaggaagaggccaaccatggaccaggtcgtcgcgtcgctgcagcaactcacagccgcccaggaccacgacgatgcccaccggtcgtcgcgcaggtacccaaaagatcaccgtcaggctgcggcgctcaacaaccggaatctgaacgctcatcgccgcctgtccgccttgcctctacccgagtgaactaccatattcatattcgatcatcttttgtatcttcacaaaagtagtatgtaaatccgtggtgaagacctgggtaattagtgataaaacacaacttgattgttgattagatgtaaatggtggcttcaacttaaccggtttatggaagag

SEQ ID NO: 74329 - DNA, 2496 bp, Zea Mays
gcagagtagtactatatttacatatgaagtcttctctgttgcatgcagtcctacagatgcatcacttgtggcttctggaggcaaagatgataggggatttctgtggaggatcggatcagatgagggtgccttggagctgactggacacaaggatactgtcggcacagtggctttcagttcagatgggaatttgttggcttgtggaagttttgatgggcaaataaatgtgtggaatacagctgcacgagctctcaagggaacccttgagggttctgggtcaggttttgagtggcttaaatggcatcctcggggacatttgataattgcaggatcagaggattgtaatgtatggatgtggaacgctgaccataatgccattataaatacatttgttggacatagtaacacagtgacatgtggtgattttactccagatggtaaacttatatgtactggatcagatgatgcatctttgaggatatgggacccaagaagtgcacaaagcaggcatgttattcgaggccatggttatcatactgatggattgacatgcttatcaatgactttggattcacaaacggttgttagtggctccaaggacagttctgtgcacgctgtgaatgtaaactcgggccagatcgttggctcactagtaggccacaccacttccattgagtgtgttggtatctcatcaagctatggctgggtagctacagggagcatggatcaaaagctgatcatatgggacctcacacaccagtccagccgatgcacttgtgaacatgatgagggagtgacatcactggcatggttaggttcgtcaaggtatgttgcgtcaggatgcatcgacggcaaggtgcgcatctgggacagcctctctggggattgtgccagggagttcagtgggcatgcagatgtagtacagtcgatggccatcacagctgacggcaacgccatggtctcggtctcatcagatggctccgcccgtgtgtttgacatctccatgttcaagtgaaggaaactgggacggagtagatggttgctgtgtatgctaatgcttgttcgcggtgcatgtgcatgaatgatgatggcatgccatggagagaagtaatctgttctgcacttctgcttatagtgatagaggtcaggcgggaattctgtcacgtcatcacgagggacctgctaaaattcagcatccctgagtctgccatgggcaactgctggggaaccaagattagctctgacaccgccgcctccccttccacatcaccgttccctcgcagcgagggtgagattctccggtgtgccaatgtcaggagcttcaccttgacggagctgatgacctccacccggaacttccggcccgacagcgtcctcggcgagggaggcttcggctccgtcttcaaggggtggatcgacgagaccaccttcgccccggccaggcccggcacagggatggtcatcgctgtcaagaagctcaaccagcagggattgcaggggcacagggagtggctggctgaagtcaactacctgggccagttgtctcaccccagtctcgtaaggctcgtagggtactgcctccaagacgagcagcgccttctcgtctacgagttcatgccgcgaggaagcttggagaaccatcttttcaggacctcacgtttccagccgctctcctggaacctacgaatcaaagttgccctgggagcagccaagggccttgcgttcttgcacagcgacaaggccagagttatctaccgagatttcaagacatccaacgtgctcctggattcgaactacaacgccaagctgtctgacttcggtttggcaaaggacgggccaaccggcgaccagagccacgtgtccaccagagtcatgggcacctacggatatgctgctccggaatatctcgcaacaggtcatctcacgccgaagagcgacgtctacagcttcggcgtcgtgctgctggagatgctgtcgggccgccgcgccatggacaagaaccgcccggccaccgagcacaacctcgtcgactgggcgcgcccctacctcagcagcaagcgccgcgtctcccgcatcctggacgaccgcctggccggccactacccgctgccggccgtccaaagggcggcagcgctggcgctgcagtgcctctccgaggactccaggaagaggccaaccatggaccaggtcgtcgcgtcgctgcagcaactcacagccgcccaggaccacgacgatgcccaccggtcgtcgcgcaggtacccaaaagatcaccgtcaggctgcggcgctcaacaaccggaatctgaacgctcatcgccgcctgtccgccttgcctctacccgagtgaactaccatattcatattcgatcatcttttgtatcttcacaaaagtagtatgtaaatccgtggtgaagacctgggtaattagtgataaaacacaacttgattgttgattagatgtaaatggtggcttcaacttaaccggtttatggaagag

SEQ ID NO: 74330 - DNA, 1253 bp, Zea Mays
agaagcagcagaccacatcaccaaaccatctcaactaatattggacaagtttaattggacacaaggatactgtcggcacagtggctttcagttcagatgggaatttgttggcttgtggaagttttgatgggcaaataaatgtgtggaatacagctgcacgagctctcaagggaacccttgagggttctgggtcaggttttgagtggcttaaatggcatcctcggggacatttgataattgcaggatcagaggattgtaatgtatggatgtggaacgctgaccataatgccattataaatacatttgttggacatagtaacacagtgacatgtggtgattttactccagatggtaaacttatatgtactggatcagatgatgcatctttgaggatatgggacccaagaagtgcacaaagcaggcatgttattcgaggccatggttatcatactgatggattgacatgcttatcaatgactttggattcacaaacggttgttagtggctccaaggacagttctgtgcacgctgtgaatgtaaactcgggccagatcgttggctcactagtaggccacaccacttccattgagtgtgttggtatctcatcaagctatggctgggtagctacagggagcatggatcaaaagctgatcatatgggacctcacacaccagtccagccgatgcacttgtgaacatgatgagggagtgacatcactggcatggttaggttcgtcaaggtatgttgcgtcaggatgcatcgacggcaaggtgcgcatctgggacagcctctctggggattgtgccagggagttcagtgggcatgcagatgtagtacagtcgatggccatcacagctgacggcaacgccatggtctcggtctcatcagatggctccgcccgtgtgtttgacatctccatgttcaagtgaaggaaactgggacggagtagatggttgctgtgtatgctaatgcttgttcgcggtgcatgtgcatgaatgatgatggcatgccatggagagaagtaatctgttctgcacttctgcttatagtgatagaggtcaggcgggaattctgtcacgtcatcacgagggacctgctaaaattcaggtgccactgtatatgttttatattgcagctttagtccgttgcagtttttagcaggcagtctgtcatttttggttcagaaaataggaaactcgatagaaaaaaacccataaacccgatgaaatctgatttgcattgcgacatcttaa

SEQ ID NO: 74331 - DNA, 955 bp, Zea Mays
gccctttaaagaggcccaaatgaaagaaaataacatgtgaagggcaaaaaaaatctaaagagccagactctgcccaatccgtaatccaggatgaaatggctgcgccccagcacgtccgcgccgctcccctcgcacgcgcgctccgcgctaccgccaccgccaccgccaccgccaccgcctccgtccccgtacccgttcccgtccccgccggcatcaagtctcaggggacttcccgccgcgcactgctcggcctatcggagcctcagctccgccagcttgccatcgatctcggccagcaaagctaccggggcaagcagctgcacgacctcctctacaaatcaagagccaagcaaatccaagaattcaaccacgtgcccaaggcgttccgggaggcgttgcttggcgctgggtggagtgttggccggtcgccagtgcaccacgccgtcacagcctcggatggcactaccaagatacttctcaagttggaggataaccggttgatcgagacagtggggattcctgtcgatgatgacaacaaaggctcttctaggctcactgcctgtgtttcatcacaggtcggctgcccccttcgttgctcattttgtgccacggggaagggagggtttgcaaggaaccttcaaccacatgagattgttgaacaggtgttggccatcgaggagacgttcaaacacagggtgacaaatgttgtgttcatggggatgggtgagcccatgatgaacctcaagtcagttctagaagcacaccaatgcttcaataaggaactaaaaattgggcaaaggatgatgacaatatctacagttggtgttccaaatacaataaaaatgctagcatctcacaagcttcagtcaacgctggcagtcagcaacacataataaggaaccaagaagcagatgcagcatttccccccctgtaatttgttgctgacaagtctgtc

SEQ ID NO: 74332 - DNA, 1919 bp, Zea Mays
gccctttaaagaggcccaaatgaaagaaaataacatgtgaagggcaaaaaaaatctaaagagccagactctgcccaatccgtaatccaggatgaaatggctgcgccccagcacgtccgcgccgctcccctcgcacgcgcgctccgcgctaccgccaccgccaccgccaccgccaccgcctccgtccccgtacccgttcccgtccccgccggcatcaagtctcaggggacttcccgccgcgcactgctcggcctatcggagcctcagctccgccagcttgccatcgatctcggccagcaaagctaccggggcaagcagctgcacgacctcctctacaaatcaagagccaagcaaatccaagaattcaaccacgtgcccaaggcgttccgggaggcgttgcttggcgctgggtggagtgttggccggtcgccagtgcaccacgccgtcacagcctcggatggcactaccaagatacttctcaagttggaggataaccggttgatcgagacagtggggattcctgtcgatgatgacaacaaaggctcttctaggctcactgcctgtgtttcatcacaggtcggctgcccccttcgttgctcattttgtgccacggggaagggagggtttgcaaggaaccttcaaccacatgagattgttgaacaggtgttggccatcgaggagacgttcaaacacagggtgacaaatgttgtgttcatggggatgggtgagcccatgatgaacctcaagtcagttctagaagcacaccaatgcttcaataaggaactaaaaattgggcaaaggatgatgacaatatctacagttggtgttccaaatacaataaaaatgctagcatctcacaagcttcagtcaacgctggcagtcagtctgcatgccccaaatcagaagctgcgggagacgattgttcctagcgccaagtcttaccccttgggagcactaatggatgactgcaagagttacttccttgaaactgggcgcagggtatccttcgagtacactctgctagctgggattaacgatgaaaaggagcatgccgaagagctagcagaactacttcgtatgtgtggaggtggttaccatgtgaacctgattccctataacccaattgaaggctccgagtacaagagaccttacagaaaagtggtccaagcctttgttgatgctttagaagcacgcaagataaccgttagcgttcgacggacccgtgggcttgacgctaacgcagcctgtgggcagctgaggaatgagtttcagaagaatccactacttgagattgaaccgtcaccctccacagagcggaccctcgtagctgcttaattgaaacacctatcaggttgatgcagcatgttcaagcatacggaatcgtcatttaatttatggggacattaggtgttgtaaagtgacagcaagttatgcataacgctagagaattttggaacgttctgtccgtgcccatctgatgtcatgagtggcaattacggaattaccacacttgtctcagatattataaacccatctttgttacagaaagtcaccagaaatgaactcctactgtccatgatctgttgcattcacaacattgacactggccttttaaactgaacgcttatgattcatgaagctactctgtttctgtttggagaccctgggcaaacaacatcaaatcttctccccccgccggtggagctgctgcagagacgagggatgagaagcacagcaggagcaggtctgaggtctctcgtcattgatatatgcaaagccatccagggcaatctcttgggcgagaggaggctcagccgttggttgctgcggggtcgcgactcttggggcggacggccatggctttttttttctcgggcacatgagagctttttttttccctgggcacatgggagaggaggc

SEQ ID NO: 74333 - DNA, 2561 bp, Zea Mays
atgacctcgccgcagcccactaagctattgccgtcagtcctcctcgtccggcacctgacactctccttctccttaactgccttcagctggacgcctggaccagagggaaggctcacagccgccgcagggtgccagggcgttagggccttagggcaaagcatagcaacggcggctgcgcagcaagcagttcagctcagcacctcgccggacgccggctcacccatccggccatcccctgccggccgactctccctggtccccagcgcagcaagcagttcaccggagccggcgcagcaagtagtcaggcaagtctccatttccagatctcaacacaggttgattaacaaggtttgggtttgggagcacttcacaaggtatgaggtagaggttcaggaagctgatggttctattgttaagcaaaagtgggctaaatgcctaagatgttcacataaagctaaggcatatagttataatggcacaaaggcttttagtaaccatttaaggatgaagcatcaagttttgaaaggtcaacaaatgcttagtcagagtggggatgccatagcaacatataaatatgatgagaatgctagtgtgagacttttatattatgccattatcatgcatgagtatccgtttagtattgctcaacataggtactttgtgaaattcatcaaatcattaagaccatcatttccttcgaagtctcgtgttactgtttgtaaagagatcatggaactttataaggaggaaaagaatctactgtatgcacaattcaataaactatcatgtcgtgttagttttactatggatacttggacatctattcagaacaagtcatatttgtgtgttactgcacattggattgatgatcattggaaaatgcaaaaaaggattatcaactttatgcatgtagaaggcagccatggaggaataaaattgagcgatacattttttgcaaatgtgttgaattggaacctagataagaaaatgtttgctctttctttggataatgctgctgcaaacaaggtagccgttgagatagtgattgaaaatgctaaagagttgcttgtatgtgatggaaaattctttcatgttagatgtgcaaatcatatattgaatctagttgctagagatggattatcatgccttggaaatgtcattggaaacattagacaatttgtaacaattatcaaaaggtcacctttgcagttggaggcatttgagaaatgtgctaaagaatgtggtctagaccctaaaaagaccctttccttggatgttgctactagatggaactctacatatatcatgattagagatgccatttactataagaatgcttttgatcgtctggctaaaaaagataaggacaaatatggtcacatcaatccttcaagcactgattggttgaatgcaacaaatattagcaagtgtttgaaaaaattctatgatgtcacattgcttttttccggtacttcatatcctactgcaaatcatttctttcggaagttttctgagattaagatggctattgcaagatggtgtgatagtagtgatctggtaatttgcacaatggcattttctatgagacacaagtttgataaatattgggaaatgaacaatttagctttggcagtgggagcatttcttgatcctagatacaaacataggatgattgagctatatatgtctaagatgtatggcagtgataaagccgagttagagaaattagtattcatgaatgttatcaatgaattatttgcatattattcagcagtcatcaatgcaaaatcaaccacaaaaggttctagttcaagagagagtgagtttgttccacataaaaatacttgtttggtggatgaggaggaggatgaggttgatcttgatgagttgtatgcaacaacaagcaatgacaagaaggtgtcagagttagatttgtatatgagcgaggacctagtgaaggtcaatgacaatgaagcaacatttgatatcctatcatggtggaaagggcaagtcacaaattttcctattctttctacccttgctcgtgatgtgttgtctatgcaagtgtctactgttgcttcagagtctgcatttagttcgggtggacgcattgttgatgcattccgttcaagactcaaaccagaatttattgaggcattggtttgttgtaaagattggaagattgcttcggagaaagatttggagattgaaattaaaaccttaagtgaacctatgaatgacgttgacttggaggatgctgctgcaattggaacttgagaagttaaagttcaagttaccatggatgatgttgaacttgttacttattgttgtaatgttgtggagcggaggtttgctggttgtttggttgttgcaactttattttcttatttgcacttcttcacttgaacatgttaattaatgtcaactatctactatttgttatatacttgtggatttgtggattatgcctaaaataggggaaatgctgccgaatttttttaatattagtaactttgaactgcatgatgttaattttataggtttcttttcctacatttgat

SEQ ID NO: 74334 - DNA, 1657 bp, Zea Mays
atgacctcgccgcagcccactaagctattgccgtcagtcctcctcgtccggcacctgacactctccttctccttaactgccttcagctggacgcctggaccagagggaaggctcacagccgccgcagggtgccagggcgttagggccttagggcaaagcatagcaacggcggctgcgcagcaagcagttcagctcagcacctcgccggacgccggctcacccatccggccatcccctgccggccgactctccctggtccccagcgcagcaagcagttcaccggagccggcgcagcaagtagtcagttggaggcatttgagaaatgtgctaaagaatgtggtctagaccctaaaaagaccctttccttggatgttgctactagatggaactctacatatatcatgattagagatgccatttactataagaatgcttttgatcgtctggctaaaaaagataaggacaaatatggtcacatcaatccttcaagcactgattggttgaatgcaacaaatattagcaagtgtttgaaaaaattctatgatgtcacattgcttttttccggtacttcatatcctactgcaaatcatttctttcggaagttttctgagattaagatggctattgcaagatggtgtgatagtagtgatctggtaatttgcacaatggcattttctatgagacacaagtttgataaatattgggaaatgaacaatttagctttggcagtgggagcatttcttgatcctagatacaaacataggatgattgagctatatatgtctaagatgtatggcagtgataaagccgagttagagaaattagtattcatgaatgttatcaatgaattatttgcatattattcagcagtcatcaatgcaaaatcaaccacaaaaggttctagttcaagagagagtgagtttgttccacataaaaatacttgtttggtggatgaggaggaggatgaggttgatcttgatgagttgtatgcaacaacaagcaatgacaagaaggtgtcagagttagatttgtatatgagcgaggacctagtgaaggtcaatgacaatgaagcaacatttgatatcctatcatggtggaaagggcaagtcacaaattttcctattctttctacccttgctcgtgatgtgttgtctatgcaagtgtctactgttgcttcagagtctgcatttagttcgggtggacgcattgttgatgcattccgttcaagactcaaaccagaatttattgaggcattggtttgttgtaaagattggaagattgcttcggagaaagatttggagattgaaattaaaaccttaagtgaacctatgaatgacgttgacttggaggatgctgctgcaattggaacttgagaagttaaagttcaagttaccatggatgatgttgaacttgttacttattgttgtaatgttgtggagcggaggtttgctggttgtttggttgttgcaactttattttcttatttgcacttcttcacttgaacatgttaattaatgtcaactatctactatttgttatatacttgtggatttgtggattatgcctaaaataggggaaatgctgccgaatttttttaatattagtaactttgaactgcatgatgttaattttataggtttcttttcctacatttgat

SEQ ID NO: 74335 - DNA, 2834 bp, Zea Mays
atgacctcgccgcagcccactaagctattgccgtcagtcctcctcgtccggcacctgacactctccttctccttaactgccttcagctggacgcctggaccagagggaaggctcacagccgccgcagggtgccagggcgttagggccttagggcaaagcatagcaacggcggctgcgcagcaagcagttcagctcagcacctcgccggacgccggctcacccatccggccatcccctgccggccgactctccctggtccccagcgcagcaagcagttcaccggagccggcgcagcaagtagtcaggcaagtctccatttccagatctcaacacaggtacaggtatcgtgtatacatgtatcatcgtgtagtattccatgtactgagtattatgtttatcaattataaattagtatgtactgagtatactagtattccatggcatacatgtaccgtgctctctcctatctagaaaaaaaagattaggacatttcaactcgtattatgtttatcaattataaattagttcctgttttctcagtgttcatgtactgtgttcaggaggcttttgtagatttgtttgtgtttagcaattagtccctattgcaggttgattaacaaggtttgggtttgggagcacttcacaaggtatgaggtagaggttcaggaagctgatggttctattgttaagcaaaagtgggctaaatgcctaagatgttcacataaagctaaggcatatagttataatggcacaaaggcttttagtaaccatttaaggatgaagcatcaagttttgaaaggtcaacaaatgcttagtcagagtggggatgccatagcaacatataaatatgatgagaatgctagtgtgagacttttatattatgccattatcatgcatgagtatccgtttagtattgctcaacataggtactttgtgaaattcatcaaatcattaagaccatcatttccttcgaagtctcgtgttactgtttgtaaagagatcatggaactttataaggaggaaaagaatctactgtatgcacaattcaataaactatcatgtcgtgttagttttactatggatacttggacatctattcagaacaagtcatatttgtgtgttactgcacattggattgatgatcattggaaaatgcaaaaaaggattatcaactttatgcatgtagaaggcagccatggaggaataaaattgagcgatacattttttgcaaatgtgttgaattggaacctagataagaaaatgtttgctctttctttggataatgctgctgcaaacaaggtagccgttgagatagtgattgaaaatgctaaagagttgcttgtatgtgatggaaaattctttcatgttagatgtgcaaatcatatattgaatctagttgctagagatggattatcatgccttggaaatgtcattggaaacattagacaatttgtaacaattatcaaaaggtcacctttgcagttggaggcatttgagaaatgtgctaaagaatgtggtctagaccctaaaaagaccctttccttggatgttgctactagatggaactctacatatatcatgattagagatgccatttactataagaatgcttttgatcgtctggctaaaaaagataaggacaaatatggtcacatcaatccttcaagcactgattggttgaatgcaacaaatattagcaagtgtttgaaaaaattctatgatgtcacattgcttttttccggtacttcatatcctactgcaaatcatttctttcggaagttttctgagattaagatggctattgcaagatggtgtgatagtagtgatctggtaatttgcacaatggcattttctatgagacacaagtttgataaatattgggaaatgaacaatttagctttggcagtgggagcatttcttgatcctagatacaaacataggatgattgagctatatatgtctaagatgtatggcagtgataaagccgagttagagaaattagtattcatgaatgttatcaatgaattatttgcatattattcagcagtcatcaatgcaaaatcaaccacaaaaggttctagttcaagagagagtgagtttgttccacataaaaatacttgtttggtggatgaggaggaggatgaggttgatcttgatgagttgtatgcaacaacaagcaatgacaagaaggtgtcagagttagatttgtatatgagcgaggacctagtgaaggtcaatgacaatgaagcaacatttgatatcctatcatggtggaaagggcaagtcacaaattttcctattctttctacccttgctcgtgatgtgttgtctatgcaagtgtctactgttgcttcagagtctgcatttagttcgggtggacgcattgttgatgcattccgttcaagactcaaaccagaatttattgaggcattggtttgttgtaaagattggaagattgcttcggagaaagatttggagattgaaattaaaaccttaagtgaacctatgaatgacgttgacttggaggatgctgctgcaattggaacttgagaagttaaagttcaagttaccatggatgatgttgaacttgttacttattgttgtaatgttgtggagcggaggtttgctggttgtttggttgttgcaactttattttcttatttgcacttcttcacttgaacatgttaattaatgtcaactatctactatttgttatatacttgtggatttgtggattatgcctaaaataggggaaatgctgccgaatttttttaatattagtaactttgaactgcatgatgttaattttataggtttcttttcctacatttgat

SEQ ID NO: 74336 - DNA, 1239 bp, Zea Mays
acccaccaacacgccacacaacacaaatatctccgtccttgtcccccatctctctcgcccgccgccgccggttgaatcgacggagggaggcgttgatggattgctcgattcctggcaggtgggttgggtaggtgcgggatccagcgagcggaggatgggcgcgtgatggagtgggagtcggggctccctggcgccgacgagctgaccccgctctcgcagccgctggtgccgccggggctggccgcggcgttccgcatcccgccggagcccgggcgcaccctgctggacctgcaccgagcgtccgaagccacggtggcgcggctgcggcgcgcgccgccgtcgtcgccgggcacctcctcctccccccacggccaccaggaggcgagggggggcgaaggggcggactcggcggcggcgactaccacgaacagcaacagacggccccggctggtttggacgccgcagctgcacaagcggttcgtggacgtggtggcgcacctggggatcaagaaggcggtgcccaagaccatcatggagctgatgaacgtggaaggtctgacgcgggagaacgtggccagccacctgcagaagtaccggttgtacgtgaagcggatgcgggggcagggtccgtccccgtccgaccacatcttcgcacccacaccggtgcacggcgtcgccgtcggcatggtgcccatggtcagcggccaggcgtaccactacctgtacaacggaggagggggaggagacagatgacacccgcttcggcgacgactccagaatctagtttcctcttggggaagaccggaagacaaatccaaaacggaacaagcgattgcctgcctcactctatactctactccctccaaattatccaaagcttctactgtactccgtccgtcccgttccaaggtattcggtatttttaaagccaaagcttttgttcaagtttattagagaataaatttcgaagcttttggtgaaggggaaagtaatgagtttttagtcccatacagaaaattgaagagaaataaaattaacttaaatagcttgtcttttgccattgcttaacagttaaaagcgcgttttacagaacgtgtgattgctcgtgtgacttggggtgtggagacagacactaattccgtttctatctactacattttgtcttacatgacacgttcgaaactaaacccatcgaagcatggatttagtttcctacatcttttgtgtgtgcttgtcgtg

SEQ ID NO: 74337 - DNA, 2163 bp, Zea Mays
ctaatgttgggggttgcatgaataaaaaaaactcgtttattccccaaccatcctctcttcctcgccgcaaagcccctaaacctccacctccaacggcggcgcttccccctctccgccgtctcctggccctccgcggccaccgacgcctcctctccacacccgccgcctcatccaacaaccgcctttccccagaggccgtgctctacaacatccacagcctctccaaggacccctcccaagcgctcgccgtcttccgccgctccgtcgccgccggccagccagttggctccgcggcatacaacctcatgctccgcaccctcgcctcccacccctctgcgcagcgccatttctggcccttcctccgcgagatgcaggaggctggccactccgtcgaccagggcacctacctcgctgctctcgcctccttcaagaaggccagtctcaccgccgactatgcctccctcaccgcgcattacgacaagttccggaaaggtgccaagtccgccaccgcggcggcggaggcggtccgggaccacgacgccgcgggcctcgatagcaggctctccgccatcggtctccttccgcttacggagacctccgtcaccacggtgctccgagagctgagggagcatccgattaaggctctcgccttcttcagatgggctgggcggcagcaggggtacacgcacagctccgtggcctacaatgccatggcaagggtgctcggcagggaggagtcagtgccggagttttgggacttgatccgggaaacaaaggctgctgggatgcacgtcgatatcgacacttacctcaagctgtccaggaacttccagaggcgccacatggtccgggaggctgtggagctatatgagctcatgatggatggccctttcaagccagcacagcaggatggacccatcatcatcaggcgcatctcgatggggccgtcgccagatcttgagcttgtcaatcgggttgtcaacaagtttgaggctgtctggggcgtcaagaccaaggagttgcttgatggggtccatagggcgcttacacgtaatgggatgttcgatgaggctgcagagattgtgcaaacaatgaaggcccaaggccaccagccggacaatgttacatatagccagttggtgtatggtctttgcaaggctgacaagctggaggatgctcgcaaggtgctcgatgaaatggaggctgaagggtgtgtcccagatttgaagacttggaccctgttgatccatggttgctgtttagctggggatgtggatagagctgtgcaatacttaaccgagatgatcgaaaagggcttggacgcagatgccaatttgctggatgtgatattgaaaggtctatgtagccatgaaaaggtcgaagaggcttactctttctttattgagatggtggataagactgagttgaggccttggcaaggcacttgccagcatctaattaatgacttgctgagggtaaacaaacttgaggaggcactgtctcttctgaagacaatgaaaacctgcaagttcccacctttcgccgatccattccctccttacattgccaagtatggaacggttgaagatgcaaggaactttttcaaggccatgacagtgaatacttctccagaacctgttgcctacctgcatgttctcaagttgttctttgcggagggaagatattctgaagctcaagatctactgtatggatgccctaatcacatccgcaagcaccccgatgtcattaaactgtttggatcaataaaagttgagagtgcctctgcttctagattgggttcaagcaagcaatagttgaagcgaaaatgatgggacttggtagatacatacgtatacgtatcatattaaattgtatgagtggccctcaaggtttgaaggagtttggccaggcatgatgtagattggtaacagaaagcacttgtatggagtataccattgtgtctcttctttggaagatgctgcttcccttgtgcagtgtgcactgaccaatatctgcagttgagcatctcaaattgtagctttatttctgactaaaactgcaaaaggctagatttcatcgaacaagatcattttctgatcatttgggaactgatgccaaacaaaattgccggtatgttagcctggccataatatctgagcccga

SEQ ID NO: 74338 - DNA, 1868 bp, Zea Mays
cagattcacactgcaagtggtgcagggctgaggagattggctatgtcgtgcccaccgagatgcaggagcaatccctgccgcttctgctgtccggccaggattgcattctccacgcgcaggctccgggaagacgctggcctacctcttgtccatcttctccaccatcgacttcagcaggtcctcggtgcaagcgctggttgtcgtccccacgagggagctcggcatgcaggttaccaaggtcgctagactactcgcagccaaggcgtgcaccgtcatggctttgcttgatggcggtacgctcaagaggcaaaagagctgggtcaaggcagagccccccgcgataattgtagctactgtggcaagcttgtgtcaaatggtcgagaggcgcgcattcagtcttcaatccatgagagtgttagttattgatgaggtcgattttattttcgggtcatcaaagcaagtcagctctcttcgcaaaatattaacctcctattcagcagcttccagtcgtcaaaccatatttgcaagcgcatcgatccctcagcacaatcgctttctgcatgattgcgtacagcataaatggaccaagggtgatgtggttcatgttcatgtccaccctgtacagcccatgccttcgcacctgtgtcacaaatatgtggccgcacgtcacatttcttctcaaccaatccaatgcatatagaggaaaccctctaatccaatgcatacagaggaaaccctctctgccccagtttttctcttctttcccaaaataagctcgcggcctaccttctttctcctgagaattcatttcgatctctgtctgaatattggtaactatgacaacacaatcaatgtgcagatctgcaccaagaaggaaaggatgcatgttttactatcgttgcttgagagggacgcaccgaagtctgcaatcatatttgttgctgggcagtctgagagatcaaagaaggctggaaatcctccttcaaccatggtggtctctgatttcttgagaaatgaatacaagggaagccttgatgtgatgctgctggaagaagatatgaacttcaatgctcgagctgcctcgttctccgtaagactgagctcctccgaggattctagttccttgtctgaatcacccccacaacatacacaacatcttcatttctctgtattattgtctatgaggattcctgcaggaagtgaagggaagaggattcctgctggtctcaaccgacatagcgagcagagggtttgaccttcctcaaaccagccacgtatacaacctggatcttcctaagacggcaaccgactatttgcaccgtgctggaagaacagggaggcaaccattctccaggttagaattggaatgctgcgtgacaacccttataacagaggaagagcacttcgttctacggagatttcagaatgagctcaagttccacacccaagaggaagagctgcccctcatgaattgctttccaggatagagatacttgcttgtttcatcgtctcgtcatcctatgaatgaattattccatctctctaggtgggccgtcgacattcccacgtgaatcgcatgcttgtgtcagtgtcacgtcttttctcgtgttgtacagcagccgatgacaaataaatgaaaatgttttgcaactttgcgttgctttgctttgctttgatgtaagtgtgaactgagctgattcctctattttcaggatgtatttaaatatctactagttagtgcccgtgcgttgcgacggtacacgaacaccgctgataaaagcattagtagtaattaattttagatcacttctaaggtgtgctctcttgacaggaggaaaaggaggaaagattcattcatttttattcat

SEQ ID NO: 74339 - DNA, 1766 bp, Zea Mays
cagattcacactgcaagtggtgcagggctgaggagattggctatgtcgtgcccaccgagatgcaggagcaatccctgccgcttctgctgtccggccaggattgcattctccacgcgcagacaggctccgggaagacgctggcctacctcttgtccatcttctccaccatcgacttcagcaggtcctcggtgcaagcgctggttgtcgtccccacgagggagctcggcatgcaggttaccaaggtcgctagactactcgcagccaaggcgtgcaccgtcatggctttgcttgatggcggtacgctcaagaggcaaaagagctgggtcaaggcagagccccccgcgataattgtagctactgtggcaagcttgtgtcaaatggtcgagaggcgcgcattcagtcttcaatccatgagagtgttagttattgatgaggtcgattttattttcgggtcatcaaagcaagtcagctctcttcgcaaaatattaacctcctattcagcagcttccagtcgtcaaaccatatttgcaagcgcatcgatccctcagcacaatcgctttctgcatgattgcgtacagcataaatggaccaagggtgatgtggttcatgttcatgtccaccctgtacagcccatgccttcgcacctgtgtcacaaatatgtggccgcacgtcacatttcttctcaaccaatccaatgcatatagaggaaaccctctaatccaatgcatacagaggaaaccctctctgccccagtttttctcttctttcccaaaataagctcgcggcctaccttctttctcctgagaattcatttcgatctctgtctgaatattggtaactatgacaacacaatcaatgtgcagatctgcaccaagaaggaaaggatgcatgttttactatcgttgcttgagagggacgcaccgaagtctgcaatcatatttgttgctgggcagtctgagagatcaaagaaggctggaaatcctccttcaaccatggtggtctctgatttcttgagaaatgaatacaagggaagccttgatgtgatgctgctggaagaagatatgaacttcaatgctcgagctgcctcgttctccgaagtgaagggaagaggattcctgctggtctcaaccgacatagcgagcagagggtttgaccttcctcaaaccagccacgtatacaacctggatcttcctaagacggcaaccgactatttgcaccgtgctggaagaacagggaggcaaccattctccaggttagaattggaatgctgcgtgacaacccttataacagaggaagagcacttcgttctacggagatttcagaatgagctcaagttccacacccaagaggaagagctgcccctcatgaattgctttccaggatagagatacttgcttgtttcatcgtctcgtcatcctatgaatgaattattccatctctctaggtgggccgtcgacattcccacgtgaatcgcatgcttgtgtcagtgtcacgtcttttctcgtgttgtacagcagccgatgacaaataaatgaaaatgttttgcaactttgcgttgctttgctttgctttgatgtaagtgtgaactgagctgattcctctattttcaggatgtatttaaatatctactagttagtgcccgtgcgttgcgacggtacacgaacaccgctgataaaagcattagtagtaattaattttagatcacttctaaggtgtgctctcttgacaggaggaaaaggaggaaagattcattcatttttattcat

SEQ ID NO: 74340 - DNA, 1565 bp, Zea Mays
cagattcacactgcaagtggtgcagggctgaggagattggctatgtcgtgcccaccgagatgcaggagcaatccctgccgcttctgctgtccggccaggattgcattctccacgcgcagacaggctccgggaagacgctggcctacctcttgtccatcttctccaccatcgacttcagcaggtcctcggtgcaagcgctggttgtcgtccccacgagggagctcggcatgcaggttaccaaggtcgctagactactcgcagccaaggcgtgcaccgtcatggctttgcttgatggcggtacgctcaagaggcaaaagagctgggtcaaggcagagccccccgcgataattgtagctactgtggcaagcttgtgtcaaatggtcgagaggcgcgcattcagtcttcaatccatgagagtgttagttattgatgaggtcgattttattttcgggtcatcaaagcaagtcagctctcttcgcaaaatattaacctcctattcagcagcttccagtcgtcaaaccatatttgcaagcgcatcgatccctcagcacaatcgctttctgcatgattgcgtacagcataaatggaccaagggtgatgtggttcatgttcatgtccaccctgtacagcccatgccttcgcacctgtgtcacaaatatgtgatctgcaccaagaaggaaaggatgcatgttttactatcgttgcttgagagggacgcaccgaagtctgcaatcatatttgttgctgggcagtctgagagatcaaagaaggctggaaatcctccttcaaccatggtggtctctgatttcttgagaaatgaatacaagggaagccttgatgtgatgctgctggaagaagatatgaacttcaatgctcgagctgcctcgttctccgaagtgaagggaagaggattcctgctggtctcaaccgacatagcgagcagagggtttgaccttcctcaaaccagccacgtatacaacctggatcttcctaagacggcaaccgactatttgcaccgtgctggaagaacagggaggcaaccattctccaggttagaattggaatgctgcgtgacaacccttataacagaggaagagcacttcgttctacggagatttcagaatgagctcaagttccacacccaagaggaagagctgcccctcatgaattgctttccaggatagagatacttgcttgtttcatcgtctcgtcatcctatgaatgaattattccatctctctaggtgggccgtcgacattcccacgtgaatcgcatgcttgtgtcagtgtcacgtcttttctcgtgttgtacagcagccgatgacaaataaatgaaaatgttttgcaactttgcgttgctttgctttgctttgatgtaagtgtgaactgagctgattcctctattttcaggatgtatttaaatatctactagttagtgcccgtgcgttgcgacggtacacgaacaccgctgataaaagcattagtagtaattaattttagatcacttctaaggtgtgctctcttgacaggaggaaaaggaggaaagattcattcatttttattcat

SEQ ID NO: 74341 - DNA, 1689 bp, Zea Mays
ctgtttttccccaactgtcccttgaaccacagagatcaccgcaatactagaccgctccattatcattctagtatcaatgctttcctcaatataaaagaaactttgatcttcaacttgagccgcacacaattcaggacccagattccaggggctgaggagattggctatgtcgtgcccaccgagatgcaggagcaatccctgccgcttctgctgtccggccaggattgcattctccacgcgcagacaggctccgggaagacgctggcctacctcttgtccatcttctccaccatcgacttcagcaggtcctcggtgcaagcgctggttgtcgtccccacgagggagctcggcatgcaggttaccaaggtcgctagactactcgcagccaaggcgtgcaccgtcatggctttgcttgatggcggtacgctcaagaggcaaaagagctgggtcaaggcagagccccccgcgataattgtagctactgtggcaagcttgtgtcaaatggtcgagaggcgcgcattcagtcttcaatccatgagagtgttagttattgatgaggtcgattttattttcgggtcatcaaagcaagtcagctctcttcgcaaaatattaacctcctattcagcagcttccagtcgtcaaaccatatttgcaagcgcatcgatccctcagcacaatcgctttctgcatgattgcgtacagcataaatggaccaagggtgatgtggttcatgttcatgtccaccctgtacagcccatgccttcgcacctgtgtcacaaatatgtgatctgcaccaagaaggaaaggatgcatgttttactatcgttgcttgagagggacgcaccgaagtctgcaatcatatttgttgctgggcagtctgagagatcaaagaaggctggaaatcctccttcaaccatggtggtctctgatttcttgagaaatgaatacaagggaagccttgatgtgatgctgctggaagaagatatgaacttcaatgctcgagctgcctcgttctccgaagtgaagggaagaggattcctgctggtctcaaccgacatagcgagcagagggtttgaccttcctcaaaccagccacgtatacaacctggatcttcctaagacggcaaccgactatttgcaccgtgctggaagaacagggaggcaaccattctccaggttagaattggaatgctgcgtgacaacccttataacagaggaagagcacttcgttctacggagatttcagaatgagctcaagttccacacccaagaggaagagctgcccctcatgaattgctttccaggatagagatacttgcttgtttcatcgtctcgtcatcctatgaatgaattattccatctctctaggtgggccgtcgacattcccacgtgaatcgcatgcttgtgtcagtgtcacgtcttttctcgtgttgtacagcagccgatgacaaataaatgaaaatgttttgcaactttgcgttgctttgctttgctttgatgtaagtgtgaactgagctgattcctctattttcaggatgtatttaaatatctactagttagtgcccgtgcgttgcgacggtacacgaacaccgctgataaaagcattagtagtaattaattttagatcacttctaaggtgtgctctcttgacaggaggaaaaggaggaaagattcattcatttttattcat

SEQ ID NO: 74342 - DNA, 1609 bp, Zea Mays
atgctttcctcaatataaaagaaactttgatcttcaacttgagccgcacacaattcaggacccagattccaggggctgaggagattggctatgtcgtgcccaccgagatgcaggagcaatccctgccgcttctgctgtccggccaggattgcattctccacgcgcaggctccgggaagacgctggcctacctcttgtccatcttctccaccatcgacttcagcaggtcctcggtgcaagcgctggttgtcgtccccacgagggagctcggcatgcaggttaccaaggtcgctagactactcgcagccaaggcgtgcaccgtcatggctttgcttgatggcggtacgctcaagaggcaaaagagctgggtcaaggcagagccccccgcgataattgtagctactgtggcaagcttgtgtcaaatggtcgagaggcgcgcattcagtcttcaatccatgagagtgttagttattgatgaggtcgattttattttcgggtcatcaaagcaagtcagctctcttcgcaaaatattaacctcctattcagcagcttccagtcgtcaaaccatatttgcaagcgcatcgatccctcagcacaatcgctttctgcatgattgcgtacagcataaatggaccaagggtgatgtggttcatgttcatgtccaccctgtacagcccatgccttcgcacctgtgtcacaaatatgtgatctgcaccaagaaggaaaggatgcatgttttactatcgttgcttgagagggacgcaccgaagtctgcaatcatatttgttgctgggcagtctgagagatcaaagaaggctggaaatcctccttcaaccatggtggtctctgatttcttgagaaatgaatacaagggaagccttgatgtgatgctgctggaagaagatatgaacttcaatgctcgagctgcctcgttctccgaagtgaagggaagaggattcctgctggtctcaaccgacatagcgagcagagggtttgaccttcctcaaaccagccacgtatacaacctggatcttcctaagacggcaaccgactatttgcaccgtgctggaagaacagggaggcaaccattctccaggttagaattggaatgctgcgtgacaacccttataacagaggaagagcacttcgttctacggagatttcagaatgagctcaagttccacacccaagaggaagagctgcccctcatgaattgctttccaggatagagatacttgcttgtttcatcgtctcgtcatcctatgaatgaattattccatctctctaggtgggccgtcgacattcccacgtgaatcgcatgcttgtgtcagtgtcacgtcttttctcgtgttgtacagcagccgatgacaaataaatgaaaatgttttgcaactttgcgttgctttgctttgctttgatgtaagtgtgaactgagctgattcctctattttcaggatgtatttaaatatctactagttagtgcccgtgcgttgcgacggtacacgaacaccgctgataaaagcattagtagtaattaattttagatcacttctaaggtgtgctctcttgacaggaggaaaaggaggaaagattcattcatttttattcat

SEQ ID NO: 74343 - DNA, 1807 bp, Zea Mays
ctttcctcaatataaaagaaactttgatcttcaacttgagccgcacacaattcaggacccagattccaggggctgaggagattggctatgtcgtgcccaccgagatgcaggagcaatccctgccgcttctgctgtccggccaggattgcattctccacgcgcaggctccgggaagacgctggcctacctcttgtccatcttctccaccatcgacttcagcaggtcctcggtgcaagcgctggttgtcgtccccacgagggagctcggcatgcaggttaccaaggtcgctagactactcgcagccaaggcgtgcaccgtcatggctttgcttgatggcggtacgctcaagaggcaaaagagctgggtcaaggcagagccccccgcgataattgtagctactgtggcaagcttgtgtcaaatggtcgagaggcgcgcattcagtcttcaatccatgagagtgttagttattgatgaggtcgattttattttcgggtcatcaaagcaagtcagctctcttcgcaaaatattaacctcctattcagcagcttccagtcgtcaaaccatatttgcaagcgcatcgatccctcagcacaatcgctttctgcatgattgcgtacagcataaatggaccaagggtgatgtggttcatgttcatgtccaccctgtacagcccatgccttcgcacctgtgtcacaaatatgtggccgcacgtcacatttcttctcaaccaatccaatgcatatagaggaaaccctctaatccaatgcatacagaggaaaccctctctgccccagtttttctcttctttcccaaaataagctcgcggcctaccttctttctcctgagaattcatttcgatctctgtctgaatattggtaactatgacaacacaatcaatgtgcagatctgcaccaagaaggaaaggatgcatgttttactatcgttgcttgagagggacgcaccgaagtctgcaatcatatttgttgctgggcagtctgagagatcaaagaaggctggaaatcctccttcaaccatggtggtctctgatttcttgagaaatgaatacaagggaagccttgatgtgatgctgctggaagaagatatgaacttcaatgctcgagctgcctcgttctccgaagtgaagggaagaggattcctgctggtctcaaccgacatagcgagcagagggtttgaccttcctcaaaccagccacgtatacaacctggatcttcctaagacggcaaccgactatttgcaccgtgctggaagaacagggaggcaaccattctccaggttagaattggaatgctgcgtgacaacccttataacagaggaagagcacttcgttctacggagatttcagaatgagctcaagttccacacccaagaggaagagctgcccctcatgaattgctttccaggatagagatacttgcttgtttcatcgtctcgtcatcctatgaatgaattattccatctctctaggtgggccgtcgacattcccacgtgaatcgcatgcttgtgtcagtgtcacgtcttttctcgtgttgtacagcagccgatgacaaataaatgaaaatgttttgcaactttgcgttgctttgctttgctttgatgtaagtgtgaactgagctgattcctctattttcaggatgtatttaaatatctactagttagtgcccgtgcgttgcgacggtacacgaacaccgctgataaaagcattagtagtaattaattttagatcacttctaaggtgtgctctcttgacaggaggaaaaggaggaaagattcattcatttttattcat

SEQ ID NO: 74344 - DNA, 1843 bp, Zea Mays
ttcagggctgaggagattggctatgtcgtgcccaccgagatgcaggagcaatccctgccgcttctgctgtccggccaggattgcattctccacgcgcagacaggctccgggaagacgctggcctacctcttgtccatcttctccaccatcgacttcagcaggtcctcggtgcaagcgctggttgtcgtccccacgagggagctcggcatgcaggtcgctagactactcgcagccaaggcgtgcaccgtcatggctttgcttgatggcggtacgctcaagaggcaaaagagctgggtcaaggcagagccccccgcgataattgtagctactgtggcaagcttgtgtcaaatggtcgagaggcgcgcattcagtcttcaatccatgagagtgttagttattgatgaggtcgattttattttcgggtcatcaaagcaagtcagctctcttcgcaaaatattaacctcctattcagcagcttccagtcgtcaaaccatatttgcaagcgcatcgatccctcagcacaatcgctttctgcatgattgcgtacagcataaatggaccaagggtgatgtggttcatgttcatgtccaccctgtacagcccatgccttcgcacctgtgtcacaaatatgtggccgcacgtcacatttcttctcaaccaatccaatgcatatagaggaaaccctctaatccaatgcatacagaggaaaccctctctgccccagtttttctcttctttcccaaaataagctcgcggcctaccttctttctcctgagaattcatttcgatctctgtctgaatattggtaactatgacaacacaatcaatgtgcagatctgcaccaagaaggaaaggatgcatgttttactatcgttgcttgagagggacgcaccgaagtctgcaatcatatttgttgctgggcagtctgagagatcaaagaaggctggaaatcctccttcaaccatggtggtctctgatttcttgagaaatgaatacaagggaagccttgatgtgatgctgctggaagaagatatgaacttcaatgctcgagctgcctcgttctccgtaagactgagctcctccgaggattctagttccttgtctgaatcacccccacaacatacacaacatcttcatttctctgtattattgtctatgaggattcctgcaggaagtgaagggaagaggattcctgctggtctcaaccgacatagcgagcagagggtttgaccttcctcaaaccagccacgtatacaacctggatcttcctaagacggcaaccgactatttgcaccgtgctggaagaacagggaggcaaccattctccaggttagaattggaatgctgcgtgacaacccttataacagaggaagagcacttcgttctacggagatttcagaatgagctcaagttccacacccaagaggaagagctgcccctcatgaattgctttccaggatagagatacttgcttgtttcatcgtctcgtcatcctatgaatgaattattccatctctctaggtgggccgtcgacattcccacgtgaatcgcatgcttgtgtcagtgtcacgtcttttctcgtgttgtacagcagccgatgacaaataaatgaaaatgttttgcaactttgcgttgctttgctttgctttgatgtaagtgtgaactgagctgattcctctattttcaggatgtatttaaatatctactagttagtgcccgtgcgttgcgacggtacacgaacaccgctgataaaagcattagtagtaattaattttagatcacttctaaggtgtgctctcttgacaggaggaaaaggaggaaagattcattcatttttattcat

SEQ ID NO: 74345 - DNA, 2767 bp, Zea Mays
cgaacacaaggccgagcagaggcagaggcagttcctctcatggaggcgtccttgctcgtggctcccaagccttccatgcccaggaccatcttctccgccaggcgagccggtcggagttggaggtgcctcgtcgtcgctgccaccatcaagcaacaactcggcacacggtcagaaagtgtggacgtcgatgcgccggtcgagcacctagcgccgccttcgaaggcgacgacgggagctcgcggcggcctgctcgccgccgtggcgacgacgacgagcagctgcacggcagtgttaccgtgtcacgccttatcaggcgccggagcggtggaatcgggaccgtggtggtggacgtcgccgctggacaccctgtaccgcgcggcggcggtgctgggcgacctggacccggcgacggcgcgggcggtggcgggcgtggcggggccggtgctgtcggcgttcggcttcctgttcatcctgcggatcgtcatgtcgtggtacccgaggctccccgtgacggagttcccgtacgtggtggcgtacgcgcccacggagccgttcctcgccgtcacgcgcagggtcatcccgccgctcggcggcgtcgatgtcacgcccgtcgtctggttcggcctcgtcagcttcgccagcgagatcctcgtcgggccacagggcctgctcgttctcctctcgcagcagcgctagcgaccactgcgtttctgcttccattccttcgatgaacaaattagtagtcatttttacaagggcacacttcgtgccatatccatttgattttaagatgattttaggttgtcttcagctatcgtgcccttaattatatattggtacgctattcctatatatttcgcatgcctaaattttagaagaagaaaaattattgtaccaccaattagtataaataatttatcatttttatggcttattatttatgttaacatcacgtagtgctagaaatatgggtcggatttttttactaacataaacatgatcgaaaattaggatcttaaagcacaacccgaagacccgccagccttagggtttatgattaattaataagctaattttatgtgtggttgtagtatttgaattctatgttgtctaaatatgtaagtcacgtttgggtcggtacaacctaataaaggtatggcgtgttttagggctaaattgagtcactatttttactctttcggctgacacggctcgatgaaaagccatgtatgctttaagattgaactgagccaccgtttttactctttcggtgacacaatatatctcgatgaaagccctaggtgctttagtactaaaccgagccactggttttactttttaggctggcacgaaatgatatgatgaaagtgcgacgtgctttagaatcagagtggaccactatttctactctttagactggcatagcatgcttcgaaagttttttaggtattcttgacctaggtctatttgaactgaattacaatgggcctggatcgtgtcaactcgacacttctcaattctcagcactagtgttacagtattttagacggcgtgagtagggccgaaattggacagaaaaaacacatcatatttgcttggctttaatcaatatcgacttctactgctcttacaatattttgtttctttagattatagtggcagcaatcaaatagctgtttaatccgaagctaacagtaacacatgtgttacttgctactctagtctagagaaggagagaggtcaatggatcgatgggatcatgggacttggtgctggcgtcagtagagtcgtggacgccattcccgccaccagatttgtggacgacgtagcgccttcctctgccgcgcacggacccatggcgagtcagacaactcttcgtctttctttcttcttcttctcttctccactgcacatcctcctttcttcttctcctcgtcgatcggcaagctaaggaggcaccattgcttgtcgtctgatccccgccgggcgcgtgtcgctgcacaagatgacgacggcaacagccgttggcagcgtcgccgaccgcatcatgccgcacctcctcaacatatatggatcgtctgcgacggcacgggacttcgagatttacgcgccaaatgcgacgtttgaggacccgctcatgcgagctcacggggttaagcagatcaaatcagcgttctacacgctgccaaaggtgtttggggaatccaagatcaccgaatacaccgtacaagagaatcccatggggccgggcaagaccgaggtggtgatccagaacaagcagcactacaaggtgctgggcaagccggtggatctgacgtcgctcatcaggctgcagctccaggacggcaaggtggtcaagcacgaggactggtggcacgggaagcctctcaagaacagggacacggtgggcgtgccgctggtgggccgactcgcagaggccagccgccggggcgccatgctgctcacccacgcactcatgggcttcggcaaagacccaacccagcctcctcctcctcctccgacacattgaattcgtcagactcgtagtctgatcaatccaacgaatcatatacgtttgtatatctatctgtctgtctatcttcgcattgttactctcacgcataacacctggacattattttcttttgttgtgtgcacaaagcttagaacctagtttggaaacccatgtcactccagatttgagtaaaagtctttctaaagctcacgttataagtccttatttagagagccgtctgcgtaaagaaca

SEQ ID NO: 74346 - DNA, 1807 bp, Zea Mays
cgctactcccccccgcacgccacgccaccgccgtcgccccgtggacccaattcgcctcccttcctcctccgccgccgccccgacccaaccctcgcggcccggattctgcgatgaagatcacggcgctgctggtactcaagtccccgggcgattcctccacctccgcctctggcgtcggggagcagcaggaggaggccgtggtgctggccaactcgtcggacgtcagccacttcggctacttccagcgcgccgccgcccgcgagttcatcctcttcgtcgcccgcaccgccgccctccgcacccccgccggcacccgccagaacgtccagcacgaagagtacacggtgcattgctacaaccagaatggactctgcgccatcgccttcaccgacgcccactatcccgtcaggagcgccttctccctcctcaacatcgtgctggaagagtaccagagaacttttggggagtcatggaggacaaccaaaactgatgtgacccaaccttggcaatacttggatgatgccttaaccaaataccaggctggttccagtgcgggcggagcacgggcgggcgtgagggagccgctgccgcccggacgtgggcgagaatgccccccggccacggcgctcgcgctcggcgagagcgggcggtatcgccccactctcgtccgcgctggagcgcgcgcccgggtgagaggtggcgagagtgaggcattggccaggcgcgtggacgtgcgagagcaagctgacgcgagctgattggttggtccccatttgaacaccttcacagatctcttgtagtccgatgggtcacctacaacccttccgtttgatgagtcttctccactacatcgtcgctccgatgtttcagcctcagtatcccgtgcaatatttccggctgcgcgtccaccaccatacccttatccctatcatttgtatcaatatccaccgtcttcatatggtcaacctccaacttccgaagctggaattcaagcttcattcccgatacgtctgtatgcccctcccccacctgctaccgatggaagtcaagcttctttccagttgcacctttatttgttggatctgaaaaccaagctgaggaaaatcttgtgccgaaggaaaatcgtccaaaaaggctagagtggacgactgccgacgagaaaaagcgggttaatgcttggattctgcattctaacgatcccatctccggcaacaataagagcagatcaagtttcttgggccaaatagcggcaacatataactccacctccgagcagtctatgcacttaattaaaaaatattatgctgaggctgtagcctgctgcagtctgtgcactgtagcagcagaggtgagagtggagtcgggagatgacgtggcaggggcgatatggaggctgtgaactggaaccagcctcaggctgttatatattgaaaatgtagcttatccaggaatcagatctttgtatgcaacgaaatcgggaactctatgcgtgatcctgcagaggctgacaagttgttgaaaattcagagggacttggatgaaaccaagattattcttcacaaaaccatcgatagcatgcttgccagaggtgaaaggttggacagcctagtggcgaagagttcggatctaagtatttcttcacagatgttctacaagcaagcgaagaaaaccaactcttgctgtaccatcctgtagaggaagctgtgcatccttgtaggcagtgatgccagacagacgtggaatagttttgctgtcaagaaatgacgacatcaattccatttctacttctttcagcctcagagataag

SEQ ID NO: 74347 - DNA, 3131 bp, Zea Mays
cgcacgccacgccaccgccgtcgccccgtggacccaattcgcctcccttcctcctccgccgccgccccgacccaaccctcgcggcccggattctgcgatgaagatcacggcgctgctggtactcaagtccccgggcgattcctccacctccgcctctggcgtcggggagcagcaggaggaggccgtggtgctggccaactcgtcggacgtcagccacttcggctacttccagcgcgccgccgcccgcgagttcatcctcttcgtcgcccgcaccgccgccctccgcacccccgccggcacccgccagaacgtccagcacgaagagtacacggtgcattgctacaaccagaatggactctgcgccatcgccttcaccgacgcccactatcccgtcaggagcgccttctccctcctcaacatcgtgctggaagagtaccagagaacttttggggagtcatggaggacaaccaaaactgatgtgacccaaccttggcaatacttggatgatgccttaaccaaataccaggctggttccagtgcgggcggagcacgggcgggcgtgagggagccgctgccgcccggacgtgggcgagaatgccccccggccacggcgctcgcgctcggcgagagcgggcggtatcgccccactctcgtccgcgctggagcgcgcgcccgggtgagaggtggcgagagtgaggcattggccaggcgcgtggacgtgcgagagcaagctgacgcgagctgattggttggtccccatttgaacaccttcacagatctcttgtagtccgatgggtcacctacaacccttccgtttgatgagtcttctccactacatcgtcgctccgatgtttcagcctcagtatcccgtgcaatatttccggctgcgcgtccaccaccatacccttatccctatcatttgtatcaatatccaccgtcttcatatggtcaacctccaacttccgaagctggaattcaagcttcattcccgatacgtctgtatgcccctcccccacctgctaccgatggaagtcaagcttctttccaggtacctccgtacgcccctcctccatatgctccacctccgcatgaagcacctcatctatatgctccacctccatatggagcacctcctccagttgcacctttatttgttggatctgaaaaccaagctgaggaaaatcttgtgccgaaggaaaatcgtccaaaaaggctagagtggacgactgccgacgagaaaaagcgggttttattgtaggttaatgcttggattctgcattctaacgatcccatctccggcaacaataagagcagatcaagtttcttgggccaaatagcggcaacatataactccacctccgagcagtctatgcacttaattaaaaaatattatgttgtgcacttaattcaataaaaaatattatgttgtgtgatttctgagcattgaaataaatccacgtcaattacttaattttgaaatagaaaatctgatgtggctataggctgaggctgtagcctgctgcagtctgtgcactgtagcagcagaggtgagagtggagtcgggagatgacgtggcaggggcgatatggaggctgtgaactggaaccagcctcaggctgttatatattgaaaatgtagcttatccaggaatcagatctttgtatgcaacgaaatcgggaactctatgcgtaggctgacaagttgttgaaaattcagagggacttggatgaaaccaagattattcttcacaaaaccatcgatagcatgcttgccagaggtgaaaggttggacagcctagtggcgaagagttcggatctaagtatttcttcacagatgttctacaagcaagcgaagaaaaccaactcttgctgtaccatcctgtagaggaagctgtgcatccttgtaggcagtgatgccagacagacgtgtatgtatttcatgccatgcccttcactttgctctcgtaactgaagaatggatgggatgagccggcctgatcgatcgttcgttcttcttttcttttaatatttgtaacgttgtgtgtggctgtggcctgtgggagtcgaaagggataatgcggcctgctggttttgttcgccaaggcagaacaatgaattcactggaagatgaaagttgaaaggaactggtagcagatctctagattagttcatgccaagagctcaaggctagtacaagtgtattatatgattagatgttgcacacaggaacagggtggcgaggaaaaccccaagcccaatcatggaggagacgggagcacgaacggacgctgccaaccccaccgccttggtggtggcgtccccggtccccgtgtccggcagcggcagcacggtggaggtgtcggtcatgccggtgggcagcggcaccgtcgggttgctgccgataaacgggtacccctcgcttccggacggggccgccgcggacgcgtcgcccggctgcagagggaagccgaagtgcggggcggccttctgcacgggcgcgcggctcggcggcggcagcaagtcgtcgtcggctcccgcggtgggcggcggtgccgagagcggcgagaggccggccgcgtgttcgtggggcgcgggggcaccgtggccgacggcgccggcgaccggatgggcatgggcgtgccactgccaaattcaaattgtttgcagcgtaggacacgagcagaacagttggccaagagacaagaggcagccgagaagcggagaggagagggtgccggagattaccttggcgtcgttggcagctccggcggaccgcggcagcaggaacgccatggcggcggcggtgccgaggaggtggagcagggtgcaacctccgccgccgtgtcgcttctccatttcctcctcttgttgctcgctctcactccgagtccgagactgccgagcacacaatgtcgccagatgcggggagtgtggactgtgtgagtctggatagtgggagcgaatgaccaatgtggcctgcgactgccctgggtttatttattaaaaatcgggcctgtctggtgaagtgaatggtgaatgaggggtgatgacgacgctacagtggctggaggagggagaaggaacaggaggacacgcactgctactggctactggctactgctacggcaacac

SEQ ID NO: 74348 - DNA, 3115 bp, Zea Mays
cgcacgccacgccaccgccgtcgccccgtggacccaattcgcctcccttcctcctccgccgccgccccgacccaaccctcgcggcccggattctgcgatgaagatcacggcgctgctggtactcaagtccccgggcgattcctccacctccgcctctggcgtcggggagcagcaggaggaggccgtggtgctggccaactcgtcggacgtcagccacttcggctacttccagcgcgccgccgcccgcgagttcatcctcttcgtcgcccgcaccgccgccctccgcacccccgccggcacccgccagaacgtccagcacgaagagtacacggtgcattgctacaaccagaatggactctgcgccatcgccttcaccgacgcccactatcccgtcaggagcgccttctccctcctcaacatcgtgctggaagagtaccagagaacttttggggagtcatggaggacaaccaaaactgatgtgacccaaccttggcaatacttggatgatgccttaaccaaataccagggagtaaagattttttaagagaaaaacacgaagctctgctgtctacctgagcacgctgagtcgctgactttcacacgtccaggacctattcgagggctggttccagtgcgggcggagcacgggcgggcgtgagggagccgctgccgcccggacgtgggcgagaatgccccccggccacggcgctcgcgctcggcgagagcgggcggtatcgccccactctcgtccgcgctggagcgcgcgcccgggtgagaggtggcgagagtgaggcattggccaggcgcgtggacgtgcgagagcaagctgacgcgagctgattggttggtccccatttgaacaccttcacagatctcttgtagtccgatgggtcacctacaacccttccgtttgatgagtcttctccactacatcgtcgctccgatgtttcagcctcagtatcccgtgcaatatttccggctgcgcgtccaccaccatacccttatccctatcatttgtatcaatatccaccgtcttcatatggtcaacctccaacttccgaagctggaattcaagcttcattcccgatacgtctgtatgcccctcccccacctgctaccgatggaagtcaagcttctttccaggtacctccgtacgcccctcctccatatgctccacctccgcatgaagcacctcatctatatgctccacctccatatggagcacctcctccagttgcacctttatttgttggatctgaaaaccaagctgaggaaaatcttgtgccgaaggaaaatcgtccaaaaaggctagagtggacgactgccgacgagaaaaagcgggttaatgcttggattctgcattctaacgatcccatctccggcaacaataagagcagatcaagtttcttgggccaaatagcggcaacatataactccacctccgagcagtctatgcacttaattaaaaaatattatgctgaggctgtagcctgctgcagtctgtgcactgtagcagcagaggtgagagtggagtcgggagatgacgtggcaggggcgatatggaggctgtgaactggaaccagcctcaggctgttatatattgaaaatgtagcttatccaggaatcagatctttgtatgcaacgaaatcgggaactctatgcgtgatcctgcagaggctgacaagttgttgaaaattcagagggacttggatgaaaccaagattattcttcacaaaaccatcgatagcatgcttgccagaggtgaaaggttggacagcctagtggcgaagagttcggatctaagtatttcttcacagatgttctacaagcaagcgaagaaaaccaactcttgctgtaccatcctgtagaggaagctgtgcatccttgtaggcagtgatgccagacagacgtgtatgtatttcatgccatgcccttcactttgctctcgtaactgaagaatggatgggatgagccggcctgatcgatcgttcgttcttcttttcttttaatatttgtaacgttgtgtgtggctgtggcctgtgggagtcgaaagggataatgcggcctgctggttttgttcgccaaggcagaacaatgaattcactggaagatgaaagttgaaaggaactggtagcagatctctagattagttcatgccaagagctcaaggctagtacaagtgtattatatgattagatgttgcacacaggaacagggtggcgaggaaaaccccaagcccaatcatggaggagacgggagcacgaacggacgctgccaaccccaccgccttggtggtggcgtccccggtccccgtgtccggcagcggcagcacggtggaggtgtcggtcatgccggtgggcagcggcaccgtcgggttgctgccgataaacgggtacccctcgcttccggacggggccgccgcggacgcgtcgcccggctgcagagggaagccgaagtgcggggcggccttctgcacgggcgcgcggctcggcggcggcagcaagtcgtcgtcggctcccgcggtgggcggcggtgccgagagcggcgagaggccggccgcgtgttcgtggggcgcgggggcaccgtggccgacggcgccggcgaccggatgggcatgggcgtgccactgccaaattcaaattgtttgcagcgtaggacacgagcagaacagttggccaagagacaagaggcagccgagaagcggagaggagagggtgccggagattaccttggcgtcgttggcagctccggcggaccgcggcagcaggaacgccatggcggcggcggtgccgaggaggtggagcagggtgcaacctccgccgccgtgtcgcttctccatttcctcctcttgttgctcgctctcactccgagtccgagactgccgagcacacaatgtcgccagatgcggggagtgtggactgtgtgagtctggatagtgggagcgaatgaccaatgtggcctgcgactgccctgggtttatttattaaaaatcgggcctgtctggtgaagtgaatggtgaatgaggggtgatgacgacgctacagtggctggaggagggagaaggaacaggaggacacgcactgctactggctactggctactgctacggcaacac

SEQ ID NO: 74349 - DNA, 3573 bp, Zea Mays
tccattttccggaaaagaaactagacgcaaccagtttctctttccctcccgattttctgtttttcttctcttggattgggctcaccctgctcaaaacttcggcggcagcggcagcggtagcggtggcggcgccggctttctccatgaacacggtggctttgttgtccttggcgccgcagctgctcattaagccctccctcacctgtttctccagaaagggcgttggccgctatggcggaatcaaggtgtacgccgtgctcagagacgacggagctgagtttgccaagaacaacaacctggaggccctgttccatgtggatgaccccgggccgagggtccccatcaagaagggcaagttcctggacgtgaacgaggctctcgaggtggtccgttttgacatccagtactgcgactggagggcgcggcatgatcttctcaccatcatggttctccacaacaaggtggtagaggtcctcaaccccctagcgagggagttcaagtcgatcgggaccttgaggaaagagcttgccgagctacagcaggagctggcaaaagctcacaatcaggttcatctctcggaaaccagagtctcatctgcgctcgacaagctagcgcatatggagaccctggtgaacgacaggctgttgccaccggacggagcctctagtacgtccacggcgcagcccacttccttggttccaagcacttcgtccaccgcccgtgtccgagccaagaaaccgccacgtcggggccttaacgtgtctggcccggtgaagccgtacaatcccagcctgaagaacttctggtacccagtcgccttctccagtgatctgaaagatgacaccatggtgccgatagcttgcttcgaggagcagtgggtgatattccgtggaaaagacggaaggcctgggtgtgttcagaacacatgtgctcacagggcttgcccgctgcatcttggttcagtgaacgagggtaggatccagtgcccttaccatggtaagtctcctactgtctgaattaggtcagagattctcggggttactgtatcttgttttcagaagtgcgcctacttgttttgtttaccctgtctgaattaatagtgacaattaaatagtcatgcttataaaacacagctttttttctctcttaaagttcgatgtattggttccagcacatttagttctacaacctcaaaattagctgaaagatgttctgatgaaggaaggcatttgttgttgttgttttgacattcttattgctctcttgtgatgtcgtttatcacagaaaggcaaggacgatgcataatgaacgtctatgatttataatggtatgttcttcaggttgggagtactctactgatgggaaatgtgaaaaaatgccatcaacaaagatgctcaacgtgcgcatccagtcattgccatgctttgagcaggaaggaatggtctggatttggcctggggatgacccaccaaaggctacaatcccttctcttctgcctccttcaggatttacagtacacgcagagatagtgatggaactgccagttgaacatggactactcctggataacctcttggaccttgctcatgctccttttacacacacatccacctttgccaagggctggagtgttccaagtttggtgaagttcttaacacctgcgtctgggctccaagggtactgggatccttacccgatcgacatggagttccgaccgccatgtatggtcttgtcgaccattggcatctcaaagcctgggaagctagaagggaagagcacccagcaatgctccacgcacctccaccagctccacgtctgcttgccctcctctaggaacaaaactaggctgctgtaccggatgtcgctagacttcgctccgtggctcaagcatgtaccgctcatgcacctgctgtggtcacatttcgcagagaaggcatgtcagtcaatgtgataaagtaatttacaggaattagtgtagaatgcggctggaattggttcagaaaatgttcttgacaaatctaatatcttttcatggtggtcttgtgcaggtcttgaacgaggacctacggcttgttcttggtcagcaagaacggatgatcaatggcgccaacgtctggaactggccggtatcatatgacaagctcggggtccggtaccggttgtggagagacaccgttgagaggggctctgaacggttgccattcagtaaccaagctgagagtggatcatagccggccggtgggtctcttaatttcctcctcgtcacatttattcgcgagacgacggccagaattagttacctaggcgtgcgtctctgtgctctgctccctgatgctgctgcgtctatctggaaggcgaaggttgatgggtaacatcatcgtgtctctctctcccctctggtgttggaatgtacactagcgtcgttatcatgagatgcaattgtaatctgaggttgatattttctttctttctttctttttccttttcgctttcttcttttcttcaccctttttgtgtaaagattcagcgaatgttactttgtcaaagcatgtataatcaatcatactactaactatggagacatgttcatatgagaaatggcagcagcacatctttgcttatatattcaccatctgttcctagagtgtatgccacagcagacacaaagtcgtctaagctatgcggaaaacaaaacaaaaaccaggaaagagcagttcgtttgcggctgcgtttgcggctgcttgtgggccaggtctgtcagtgaccatacgaggaataatatgcaccagagctccataccaaatggaaatgaacatcacaaggttttcctgtttgccaaattgccagtaccaacatcagatcaaggagtggttccgatcaacgttaaagatctatacaaaactatacctgtaaaacacatacaatcagcgaccccttgaaaggctgcttgctggttgttggcaaagaacaatcaattaacacgatttctttatcagctggaggcgcatgtacaaggtgttacatttatacatataacttacaaaactctacaatttgatacagtgccgagattctactgataaatgtattccgttgccgtcgcacaaagactgtttacagagcctgcaactggctaacatcttttccccctttagttttctcatagggcgattccctatgatctccatggtgttcggttcttcgaattcatttcgagcttctttcaccctccacctcggcaaactgcacactgagctcggaatacctgccctgcatctcttttagctcattctctactgccatctgcctcctcttcaactcgatagtatcttgtatcagttcattgatgtcccagaagctttgcaagactgctgcttcaagaatgaactaacaaggagcaaagaggaatcaaaatatgtactggtgtttagttaaatttgactgatgtgttttactaaagctactaatttctgtatggcaatgaaaattgtagtttaaatttgtaagttttccaggtgtggagtgttgttgttgttttcccttctcaatttaataaaacggcatgcagttttc

SEQ ID NO: 74350 - DNA, 1363 bp, Zea Mays
ttagcgaagcgtgcgaactgcgaagccaagcaaagaactccaaattccacgccgatccgcccccaccactactccaccgcgcgcctcccctcccgaatcccgatccatctccatccagccgccgccggcatccgcgagaggccatggacgtgagcaggaagaagaagtgggtggcctgggcggtggcggccgccatcttcgtcgtcctcatgctcgtcacgcccgccatcccgcaggacgaagcctaccacgacttcgcggaccagcgcacccttttcttagggattcccaacaccttgaatgtgatctcaaacatccctttcttctttgttggcgtcacggggctcatcctgtgccacttcaacaactatttcaggctaagggggagctctggagttggacgctgttctttgctggtgtcacggctgttggatttggttcttcctattatcatctcaacccgaatgacgccaccctagtttgggacagactgccaatgacgattgctttcacttctgtcatggctatattcattattgaaagggttgatgatagagcaggggcaaaatcccttgcaccacttgtgattgcgggtgccttgagcatcatgtattggagacactttgatgatcttcgcccgtacgcagtagttcagtttgttccatgcattgctttacctgtgatggctatagtaattccaccgatgtatacacattcaagctactggttgtgggcagcaggattttacctccttgctaaagtggaagaggctgctgacaaaactatctacaattggactcatcagattgttagtggtcatactcttaagcatctatgtgctgcgatggtaccggttttcctggctctcatgctagctaaaaggactaccgaaccagaaaggataagcttgctccagaagtggaagaccagttgggttgcggtgagagagaggcgtttcaaagatagcagtacagttgatgtggattgcggctacgctgttgtttcaagtatatctgaacagtaaattgtcatgcatctaattaacatgcacgttgtttcaagtattagcatgcatgctgcgcatgtgtatgagagaagatccctgtgaagtattaagaaaccaacctacctagttgagtttgctggtcggagttagctgtgcctgtgggtgacatatcttgtacatagcagaaagcaatacaagtaacggaagcatgtattacaagatttgcgtatatcatttcaatttttttccttgaagagactgatgcgtgccttaaaagtagatgggatattttgatttctagttgatccaacaaattcagcataacattggctgttgcaaattcatgcaataaatgca

SEQ ID NO: 74351 - DNA, 981 bp, Zea Mays
ccagttcttactcaaaagcaagcacaaaggattggctctcctaggattcttcctcctccaaataaagttcttgaaaatgataatgccgccgccgctgcttcgcaccctcctcaaactgcaagctcgaaatcaactggtattggcaaaagtgctgctgacgagcaggtatgccccatatgtctaaccaatccaaaggacatggcttttcagtgtggtcatctgacatgtaaggaatgtggcccaacactatcaacgtgcccattgtgccgcgctctaatcaccatgcgtgtgaggctctactcctaagtcggttggtgtctggagggatgggaccaaacagaaaggagcaagaactttggggcgcaaggactgcgctacgatcttgagatatggtccatatggatgtcatgataacgatgcatgtacagaaaccttgtccgtgcctattcagtaatgtcgttgatgagtatcttccatcaatcacatgtaaaatttctaatgttatcttgtattagtagcaggggattgcttgttgagtggaataccaccagttgttcagcaacagatagtaaactccatgtgcatttggaagtcacttttgtgatttgtgtccaaccattggttcctgatagacagtttaccaaaaacagggttctttctgtctttcaccgaactgttggtctggaatttggagccacaaattcaatcgcggcaatatatatttaggcccagttcggttgcctgggaaggcttccaggccaggaaacagtggaccactcaatccagcccaagatttgatctagatggtaagggatcgggattcctaccgggctatggaggaaggggaactttaaaccgggccgtttttgtttttatttcgggttgaaacgaaaatctcagggctggattccaaactggataatttttccagccggtaagaggcatagagcggccggatgaggccgaaatggacgagacctt

SEQ ID NO: 74352 - DNA, 2206 bp, Zea Mays
ctctgaacacagcatgcgcggatggaagtagttttcattaccagggcgtattctcctgtttcgaagttcctgatatccaagacctcgccgcggtcttggtatatgtagtccagccccttgtagaagggcgggtgtcccactgacagataattgatgctgttcaggcggatatgcagttcaaggacaagttcttcgcgtgcctctctctcggcgaccgcacgtaccgcaccgagacgtccgacaacacgcacaggcctgtgtgggactcggagaagaaggttatagtggagacgaatggacctcatattgcacgtatctctgtttttgagacgaaccgattttcgaagaacactttggttggttactgcgaggttaatctctttgaaatgcttactaaggacttggaggaacactctgaggaccttcgtctgttggacccatcgtcacccaatactaccgtgggcagcatatccatctcctgtcacattgaagaccctgttgaaacagaacaaagctttgcccgccgtgtcttagctatagtggactatgatgaagatggaactctttccttatcagaattctcagacttgatgaaagcttttggtaataaattagcagttgcaaagattgaagagcttttccgtcaagcagatacaaatagtgatggcatagttgacatagatgaactggcagccctactggctgctcaacaagaagaagaaccacttataagtaactgccctgtctgtggtgaagatcttggaaaatatgataacataaatgatatgatacatatgacactttgcttcgatgagggaactggtaatcagattatgactggtggatttctaactgacaaacaggcatccttatggggtggatgttcaagctcagtgaatgggcacatttctccacgtatgatgttggtttgcactctggctctacagcttcacatattctggttttcgaccggcgaacaaagaggatagtcgaagaagttattgacggaaaaattgtattgtccatgagggctttataccaatcaaaagtaggactcactcttatcaatacaggtgttaaagacctcttgaagaacctatctgagaagcaaggaaaaaagatgaactcgctggaatctgcaaaagatattcccaagttccttgagttatttaaggatcaaattaatatggatgagatcaaggaccctgttgaaagttttaagacttttaacgagtttttcataagaggactgaagcctggtgctagaccaattgcacatggtgatcaaaacagtattgctacctgtgctgctgatagccgattaatggctttcagttccgttgatgagagcacaaggctttggatcaagggccgtaaattttcaattgagggtctcctaggtaccagtgcacactcgaatgctttaagcaacggatcgttggtcattttccggctcgcacctcaggattaccacaggtttcacgtaccagtctcaggaactgtggagaaatttgtggaaattcccgggtgcctgtacacggtgaatcccatcgctgtgaatagcaagtattgcaatgtattcactgagaataaaagagttgtatcaatgatatcaacttcagagtttggaaaggtagcatttgttgcgattggagcaaccatggtaggaagcatcacgttcttgaaaaaagagggtgactacgtccgcaaaggagatgagtttgggtatttctcctttggagggagtacagtgatatgcgtcttcgagaaggacgccatccaatttgacgctgatctcgtggcaaacagcgaaaggtcactggagacccttgtttctgttggtatgaccctgggcatctcgacaaggaacaaggagatgcaagtcccggatctgcagaaagtttcgctcggatgacagacagagctgtaaactgtgtgcaggttaacagtagcgtatatttgatactagcaactgccactggtaggcaatactattatcacataatccaagactacatgtatagtcaggctagaggagtctggtttacggcggtgggcgtgggcatgggcattggcccagctgtcatcggctgagagctcactgcatggctcggtggtttttgcaatgacgatactaaccgtgcagttgctcccatacgccattatccgaacacgacacaactaacaccaagacaccagaacatcg

SEQ ID NO: 74353 - DNA, 2156 bp, Zea Mays
aagaagacgacgatgggaaatgggtggatccaagagccaggcaggcgcccccccagtgcgcagcgcacgcaggtggatcttccttgtccggtcccaccagcgccatcaacacaggcggatatgcagttcaaggacaagttcttcgcgtgcctctctctcggcgaccgcacgtaccgcaccgagacgtccgacaacacgcacaggcctgtgtgggactcggagaagaaggttatagtggagacgaatggacctcatattgcacgtatctctgtttttgagacgaaccgattttcgaagaacactttggttggttactgcgaggttaatctctttgaaatgcttactaaggacttggaggaacactctgaggaccttcgtctgttggacccatcgtcacccaatactaccgtgggcagcatatccatctcctgtcacattgaagaccctgttgaaacagaacaaagctttgcccgccgtgtcttagctatagtggactatgatgaagatggaactctttccttatcagaattctcagacttgatgaaagcttttggtaataaattagcagttgcaaagattgaagagcttttccgtcaagcagatacaaatagtgatggcatagttgacatagatgaactggcagccctactggctgctcaacaagaagaagaaccacttataagtaactgccctgtctgtggtgaagatcttggaaaatatgataacataaatgatatgatacatatgacactttgcttcgatgagggaactggtaatcagattatgactggtggatttctaactgacaaacaggcatccttatggggtggatgttcaagctcagtgaatgggcacatttctccacgtatgatgttggtttgcactctggctctacagcttcacatattctggttttcgaccggcgaacaaagaggatagtcgaagaagttattgacggaaaaattgtattgtccatgagggctttataccaatcaaaagtaggactcactcttatcaatacaggtgttaaagacctcttgaagaacctatctgagaagcaaggaaaaaagatgaactcgctggaatctgcaaaagatattcccaagttccttgagttatttaaggatcaaattaatatggatgagatcaaggaccctgttgaaagttttaagacttttaacgagtttttcataagaggactgaagcctggtgctagaccaattgcacatggtgatcaaaacagtattgctacctgtgctgctgatagccgattaatggctttcagttccgttgatgagagcacaaggctttggatcaagggccgtaaattttcaattgagggtctcctaggtaccagtgcacactcgaatgctttaagcaacggatcgttggtcattttccggctcgcacctcaggattaccacaggtttcacgtaccagtctcaggaactgtggagaaatttgtggaaattcccgggtgcctgtacacggtgaatcccatcgctgtgaatagcaagtattgcaatgtattcactgagaataaaagagttgtatcaatgatatcaacttcagagtttggaaaggtagcatttgttgcgattggagcaaccatggtaggaagcatcacgttcttgaaaaaagagggtgactacgtccgcaaaggagatgagtttgggtatttctcctttggagggagtacagtgatatgcgtcttcgagaaggacgccatccaatttgacgctgatctcgtggcaaacagcgaaaggtcactggagacccttgtttctgttggtatgaccctgggcatctcgacaaggaacaaggagatgcaagtcccggatctgcagaaagtttcgctcggatgacagacagagctgtaaactgtgtgcaggttaacagtagcgtatatttgatactagcaactgccactggtaggcaatactattatcacataatccaagactacatgtatagtcaggctagaggagtctggtttacggcggtgggcgtgggcatgggcattggcccagctgtcatcggctgagagctcactgcatggctcggtggtttttgcaatgacgatactaaccgtgcagttgctcccatacgccattatccgaacacgacacaactaacaccaagacaccagaacatcg

SEQ ID NO: 74354 - DNA, 2117 bp, Zea Mays
ctccgctgctacgcgcatgttccttagcaccgagtctcgctccccgcttcgacgcggccagccgaggcggaatccgcggatatgcagttcaaggacaagttcttcgcgtgcctctctctcggcgaccgcacgtaccgcaccgagacgtccgacaacacgcacaggcctgtgtgggactcggagaagaaggttatagtggagacgaatggacctcatattgcacgtatctctgtttttgagacgaaccgattttcgaagaacactttggttggttactgcgaggttaatctctttgaaatgcttactaaggacttggaggaacactctgaggaccttcgtctgttggacccatcgtcacccaatactaccgtgggcagcatatccatctcctgtcacattgaagaccctgttgaaacagaacaaagctttgcccgccgtgtcttagctatagtggactatgatgaagatggaactctttccttatcagaattctcagacttgatgaaagcttttggtaataaattagcagttgcaaagattgaagagcttttccgtcaagcagatacaaatagtgatggcatagttgacatagatgaactggcagccctactggctgctcaacaagaagaagaaccacttataagtaactgccctgtctgtggtgaagatcttggaaaatatgataacataaatgatatgatacatatgacactttgcttcgatgagggaactggtaatcagattatgactggtggatttctaactgacaaacaggcatccttatggggtggatgttcaagctcagtgaatgggcacatttctccacgtatgatgttggtttgcactctggctctacagcttcacatattctggttttcgaccggcgaacaaagaggatagtcgaagaagttattgacggaaaaattgtattgtccatgagggctttataccaatcaaaagtaggactcactcttatcaatacaggtgttaaagacctcttgaagaacctatctgagaagcaaggaaaaaagatgaactcgctggaatctgcaaaagatattcccaagttccttgagttatttaaggatcaaattaatatggatgagatcaaggaccctgttgaaagttttaagacttttaacgagtttttcataagaggactgaagcctggtgctagaccaattgcacatggtgatcaaaacagtattgctacctgtgctgctgatagccgattaatggctttcagttccgttgatgagagcacaaggctttggatcaagggccgtaaattttcaattgagggtctcctaggtaccagtgcacactcgaatgctttaagcaacggatcgttggtcattttccggctcgcacctcaggattaccacaggtttcacgtaccagtctcaggaactgtggagaaatttgtggaaattcccgggtgcctgtacacggtgaatcccatcgctgtgaatagcaagtattgcaatgtattcactgagaataaaagagttgtatcaatgatatcaacttcagagtttggaaaggtagcatttgttgcgattggagcaaccatggtaggaagcatcacgttcttgaaaaaagagggtgactacgtccgcaaaggagatgagtttgggtatttctcctttggagggagtacagtgatatgcgtcttcgagaaggacgccatccaatttgacgctgatctcgtggcaaacagcgaaaggtcactggagacccttgtttctgttggtatgaccctgggcatctcgacaaggaacaaggagatgcaagtcccggatctgcagaaagtttcgctcggatgacagacagagctgtaaactgtgtgcaggttaacagtagcgtatatttgatactagcaactgccactggtaggcaatactattatcacataatccaagactacatgtatagtcaggctagaggagtctggtttacggcggtgggcgtgggcatgggcattggcccagctgtcatcggctgagagctcactgcatggctcggtggtttttgcaatgacgatactaaccgtgcagttgctcccatacgccattatccgaacacgacacaactaacaccaagacaccagaacatcg

SEQ ID NO: 74355 - DNA, 1160 bp, Zea Mays
ttttgcttctgtagctgtagtctgtaggtgttaaagacctcttgaagaacctatctgagaagcaaggaaaaaagatgaactcgctggaatctgcaaaagatattcccaagttccttgagttatttaaggatcaaattaatatggatgagatcaaggaccctgttgaaagttttaagacttttaacgagtttttcataagaggactgaagcctggtgctagaccaattgcacatggtgatcaaaacagtattgctacctgtgctgctgatagccgattaatggctttcagttccgttgatgagagcacaaggctttggatcaagggccgtaaattttcaattgagggtctcctaggtaccagtgcacactcgaatgctttaagcaacggatcgttggtcattttccggctcgcacctcaggattaccacaggtttcacgtaccagtctcaggaactgtggagaaatttgtggaaattcccgggtgcctgtacacggtgaatcccatcgctgtgaatagcaagtattgcaatgtattcactgagaataaaagagttgtatcaatgatatcaacttcagagtttggaaaggtagcatttgttgcgattggagcaaccatggtaggaagcatcacgttcttgaaaaaagagggtgactacgtccgcaaaggagatgagtttgggtatttctcctttggagggagtacagtgatatgcgtcttcgagaaggacgccatccaatttgacgctgatctcgtggcaaacagcgaaaggtcactggagacccttgtttctgttggtatgaccctgggcatctcgacaaggaacaaggagatgcaagtcccggatctgcagaaagtttcgctcggatgacagacagagctgtaaactgtgtgcaggttaacagtagcgtatatttgatactagcaactgccactggtaggcaatactattatcacataatccaagactacatgtatagtcaggctagaggagtctggtttacggcggtgggcgtgggcatgggcattggcccagctgtcatcggctgagagctcactgcatggctcggtggtttttgcaatgacgatactaaccgtgcagttgctcccatacgccattatccgaacacgacacaactaacaccaagacaccagaacatcg

SEQ ID NO: 74356 - DNA, 688 bp, Zea Mays
ggcacgctttgatgtcactgtggtgaatcccatcgctgtgaatagcaagtattgcaatgtattcactgagaataaaagagttgtatcaatgatatcaacttcagagtttggaaaggtagcatttgttgcgattggagcaaccatggtaggaagcatcacgttcttgaaaaaagagggtgactacgtccgcaaaggagatgagtttgggtatttctcctttggagggagtacagtgatatgcgtcttcgagaaggacgccatccaatttgacgctgatctcgtggcaaacagcgaaaggtcactggagacccttgtttctgttggtatgaccctgggcatctcgacaaggaacaaggagatgcaagtcccggatctgcagaaagtttcgctcggatgacagacagagctgtaaactgtgtgcaggttaacagtagcgtatatttgatactagcaactgccactggtaggcaatactattatcacataatccaagactacatgtatagtcaggctagaggagtctggtttacggcggtgggcgtgggcatgggcattggcccagctgtcatcggctgagagctcactgcatggctcggtggtttttgcaatgacgatactaaccgtgcagttgctcccatacgccattatccgaacacgacacaactaacaccaagacaccagaacatcg

SEQ ID NO: 74357 - DNA, 1460 bp, Zea Mays
gatttaataaatttctctcaacgtctgcgtcctctctcgtctccacactccggcgcacgcggcacgccgcacccacgaatccttcctcctcctcctcttcgtcccgatccacctgcaatcggatggtctcgctccgctgcgccgttggtctgtgcagcagcgctcaggttggttcgagctggccgctcttccaatccccccaccgcatcgcagttccgtccgtggccgcgcgtgacgtgacgtctcctcgagcgcctagcgcgtggtctagatcggcaagcgcggcatccatggagacagccaggctcacgccgagggagcaggccacgaccaggatatgtcaggtgtcgaggtgctcgcggcgattccctgcagctttgcgacggaactgctcgagataaggtccaaagagccgtccctccacgtgctgcttattgctgggaacccaggcatcgctgcgttttataaggactgtgtcgaggcgctctatgaaaacctcggtggccaagcatctattacagcaatagggcacatttcacacagccagaaggattgcgagcatgggcgattgttttcgttgtatgaacaaattgaccacaaggttgatttcattgagcaagagcttcagcattctgaacaaccaatagttttggttggtcattcaattggtgcatacataggcttggaagtcttcaagagacttcagaataagataaaatttattgtaggactgtatccatttttaaagatgaacaagagttctgtaacacaatcagcaatcggatatatagcaaggtcatccctcctaagtaaatgggctagtttatttgcatctttcattgggtcactccgaccttcaataacaaggggcattgtgagaaggttccttggaccttcatggtctgtaacagctgttgatgctgcatgcagccatctcttaaggtacaacacaatgcgcaatgtccttttcatggcaatgacagagttccaaaagcttactgaagaaccagactggactttcatcagagcacaagaggacaaaatggcctttttgttcggtgtggatgatcactggggcccactatctcacttagaagagatatcaaagcacgcaccaagggtcaccctgtcggttgaaacagaaggtcacacacatggttactgctgtacagaggctggatctgtctgggttgcagactacatcgcaaatttgattaaaaaccaaatgctcctttggaacaactgaggttcatttggcagatgtatcataagactcttttctccgaaagaagtgaatagctggagtgtggtggaacttattgaggttccggttttgataatctagtccacatttttttggcttactgtttctctgaaagaagtgaatagctggagtgtggtggactcttttcggcgccatatagggaccaggtgaccagagctacgacgagagagcggag

SEQ ID NO: 74358 - DNA, 1518 bp, Zea Mays
gatttaataaatttctctcaacgtctgcgtcctctctcgtctccacactccggcgcacgcggcacgccgcacccacgaatccttcctcctcctcctcttcgtcccgatccacctgcaatcggatggtctcgctccgctgcgccgttggtctgtgcagcagcgctcaggttggttcgagctggccgctcttccaatccccccaccgcatcgcagttccgtccgtggccgcgcgtgacgtgacgtctcctcgagcgcctagcgcgtggtctagatcggcaagcgcggcatccatggagacagccaggctcacgccgagggagcaggccacgaccaggatatgtcaggtgtcgagctttgcgacggaactgctcgagataaggtccaaagagccgtccctccacgtgctgcttattgctgggaacccaggcatcgctgcgttttataaggactgtgtcgaggcgctctatgaaaacctcggtggccaagcatctattacagcaatagggcacatttcacacagccagaaggattgcgagcatgggcgattgttttcgttgtatgaacaaattgaccacaaggttgatttcattgagcaagagcttcagcattctgaacaaccaatagttttggttggtcattcaattggtgcatacataggcttggaagtcttcaagagacttcagaataagataaaatttattgtaggactgtatccatttttaaagatgaacaagagttctgtaacacaatcagcaatcggatatatagcaaggtactgaaatgctctgatcaagtttttgtaattgtcatcatagcatgatggcatggttacatcaacagtgaatatattacggtcatccctcctaagtaaatgggctagtttatttgcatctttcattgggtcactccgaccttcaataacaaggggcattgtgagaaggttccttggaccttcatggtctgtaacagctgttgatgctgcatgcagccatctcttaaggtacaacacaatgcgcaatgtccttttcatggcaatgacagagttccaaaagcttactgaagaaccagactggactttcatcagagcacaagaggacaaaatggcctttttgttcggtgtggatgatcactggggcccactatctcacttagaagagatatcaaagcacgcaccaagggtcaccctgtcggttgaaacagaaggtcacacacatggttactgctgtacagaggctggatctgtctgggttgcagactacatcgcaaatttgattaaaaaccaaatgctcctttggaacaactgaggttcatttggcagatgtatcataagactcttttctccgaaagaagtgaatagctggagtgtggtggaacttattgaggttccggttttgataatctagtccacatttttttggcttactgtttctctgaaagaagtgaatagctggagtgtggtggactcttttcggcgccatatagggaccaggtgaccagagctacgacgagagagcggag

SEQ ID NO: 74359 - DNA, 1541 bp, Zea Mays
gatttaataaatttctctcaacgtctgcgtcctctctcgtctccacactccggcgcacgcggcacgccgcacccacgaatccttcctcctcctcctcttcgtcccgatccacctgcaatcggatggtctcgctccgctgcgccgttggtctgtgcagcagcgctcaggttggttcgagctggccgctcttccaatccccccaccgcatcgcagttccgtccgtggccgcgcgtgacgtgacgtctcctcgagcgcctagcgcgtggtctagatcggcaagcgcggcatccatggagacagccaggctcacgccgagggagcaggccacgaccaggatatgtcaggtgtcgaggtgctcgcggcgattccctgcagctttgcgacggaactgctcgagataaggtccaaagagccgtccctccacgtgctgcttattgctgggaacccaggcatcgctgcgttttataaggactgtgtcgaggcgctctatgaaaacctcggtggccaagcatctattacagcaatagggcacatttcacacagccagaaggattgcgagcatgggcgattgttttcgttgtatgaacaaattgaccacaaggttgatttcattgagcaagagcttcagcattctgaacaaccaatagttttggttggtcattcaattggtgcatacataggcttggaagtcttcaagagacttcagaataagataaaatttattgtaggactgtatccatttttaaagatgaacaagagttctgtaacacaatcagcaatcggatatatagcaaggtactgaaatgctctgatcaagtttttgtaattgtcatcatagcatgatggcatggttacatcaacagtgaatatattacggtcatccctcctaagtaaatgggctagtttatttgcatctttcattgggtcactccgaccttcaataacaaggggcattgtgagaaggttccttggaccttcatggtctgtaacagctgttgatgctgcatgcagccatctcttaaggtacaacacaatgcgcaatgtccttttcatggcaatgacagagttccaaaagcttactgaagaaccagactggactttcatcagagcacaagaggacaaaatggcctttttgttcggtgtggatgatcactggggcccactatctcacttagaagagatatcaaagcacgcaccaagggtcaccctgtcggttgaaacagaaggtcacacacatggttactgctgtacagaggctggatctgtctgggttgcagactacatcgcaaatttgattaaaaaccaaatgctcctttggaacaactgaggttcatttggcagatgtatcataagactcttttctccgaaagaagtgaatagctggagtgtggtggaacttattgaggttccggttttgataatctagtccacatttttttggcttactgtttctctgaaagaagtgaatagctggagtgtggtggactcttttcggcgccatatagggaccaggtgaccagagctacgacgagagagcggag

SEQ ID NO: 74360 - DNA, 1345 bp, Zea Mays
gatttaataaatttctctcaacgtctgcgtcctctctcgtctccacactccggcgcacgcggcacgccgcacccacgaatccttcctcctcctcctcttcgtcccgatccacctgcaatcggatggtctcgctccgctgcgccgttggtctgtgcagcagcgctcagcgcgtggtctagatcggcaagcgcggcatccatggagacagccaggctcacgccgagggagcaggccacgaccaggatatgtcaggtgtcgagctttgcgacggaactgctcgagataaggtccaaagagccgtccctccacgtgctgcttattgctgggaacccaggcatcgctgcgttttataaggactgtgtcgaggcgctctatgaaaacctcggtggccaagcatctattacagcaatagggcacatttcacacagccagaaggattgcgagcatgggcgattgttttcgttgtatgaacaaattgaccacaaggttgatttcattgagcaagagcttcagcattctgaacaaccaatagttttggttggtcattcaattggtgcatacataggcttggaagtcttcaagagacttcagaataagataaaatttattgtaggactgtatccatttttaaagatgaacaagagttctgtaacacaatcagcaatcggatatatagcaaggtcatccctcctaagtaaatgggctagtttatttgcatctttcattgggtcactccgaccttcaataacaaggggcattgtgagaaggttccttggaccttcatggtctgtaacagctgttgatgctgcatgcagccatctcttaaggtacaacacaatgcgcaatgtccttttcatggcaatgacagagttccaaaagcttactgaagaaccagactggactttcatcagagcacaagaggacaaaatggcctttttgttcggtgtggatgatcactggggcccactatctcacttagaagagatatcaaagcacgcaccaagggtcaccctgtcggttgaaacagaaggtcacacacatggttactgctgtacagaggctggatctgtctgggttgcagactacatcgcaaatttgattaaaaaccaaatgctcctttggaacaactgaggttcatttggcagatgtatcataagactcttttctccgaaagaagtgaatagctggagtgtggtggaacttattgaggttccggttttgataatctagtccacatttttttggcttactgtttctctgaaagaagtgaatagctggagtgtggtggactcttttcggcgccatatagggaccaggtgaccagagctacgacgagagagcggag

SEQ ID NO: 74361 - DNA, 1815 bp, Zea Mays
atccaattttgggtccgcagaacctcctcctctcgctccgccgccgccttcccctcgcccaccacgctttggtcccaaacccacggtcgctcatcctggacctccacgccatcgaggcagtgaagctgggctcattcgtgcaatcgtgctcaagtctggcatcaactcccccatctaccgggacctccacgcgctcgtctcccacccacgcctgctctccgttgttgcctcgctcctccatatgcccggcctcgtctgcaacgtcccctacacagcgctcccgtcgtcgtcctctgcgtcgaccgctccatccccatgctcatgcgccgcaaggaggccaagccttacgacatgattggtgagaccagaggagcacgagcgcaacctccgtcacccctaagatctcctcaccattgtggccatcctgcaagatcagtactcattatctattaagaaggttacggttagcttggtgtgtaagtgtgttggacaaatgaggtcccgtttttttactggatttatttgccttttcttttctgttttggatatttgaagtcttatttactagctattaatacattgtttttaagtcatcggccttgcaagcattgcctctttctttaaaattatctgatgactggtgaattctgttttgatcttttagattattggcattgaccttttatctcaaacgctgcgacccgtcattgttgaacttgcagaggataggcactggagagtttgacttgcgatatttgagtacatcccattgctggcgctccgagtatctgggcatctggcttggtgtttcttgtttggtgatacctgtacaagcaaatttggtgacctgctacttaaaaagtccgtgtttggtttacttgcttgttggcaccattgcaaaattgcatgttccttgtttggttgtatgaaaactgactatattatgacttgttgtatgcattattggtgtattatgcagctgtttctgcaaagaggtcgtcttgactgatcgcaatgatgaagttctggaggcaagtgttgttgttatgatgaaggcagacccaagtattgaaagggatgatctgattttgctctaggagattgccatgtacatgcttcttgcatgtggagctgtctatgtgatcttgataagaaagatttgtggatgttgacccaacaggaaattgctactgaggtgcaaagtgaatccaagtgaaagtaattaggggagttagctatgtcaaatggaaagagagtggttgctaaaggataggaagctgaagctggatgaaggaagcaactacatgcaaccgatggcaataatgcattgcagggttgaggctcgttagaaatgtcaagttggtcccggacgtgggtatggtgcccgcaaggccgacagagctgagatcaagcactgagatcgtgccctcgtgcctacggctgcatgtcacacctggccagaggcataggctaccactactgttctaagaggacaacctgctcgatagctagcctaggatggccttcagttccagcaaggcttgtcggctcgtctcactgcagaacgctattgttggcgcctaattgaacgaagttgataccggtaggatcccatgaagcaacataagcagcagaagtctgacgaggaatgacatagatgcagtgctttcgtttgttgctactgaaaaaagatctgaaccaagtatttctgtaagtataccaacaagttagttgctactactttgtatattgatcttcgttggccgaatgtttgagtttttttcaaggcacaaacactttattttgagatctatc

SEQ ID NO: 74362 - DNA, 1333 bp, Zea Mays
atccaattttgggtccgcagaacctcctcctctcgctccgccgccgccttcccctcgcccaccacgctttggtcccaaacccacggtcgctcatcctggacctccacgccatcgaggcagtgaagctgggctcattcgtgcaatcgtgctcaagtctggcatcaactcccccatctaccgggacctccacgcgctcgtctcccacccacgcctgctctccgttgttgcctcgctcctccatatgcccggcctcgtctgcaacgtcccctacacagcgctcccgtcgtcgtcctctgcgtcgaccgctccatccccatgctcatgcgccgcaaggaggccaagccttacgacatgattgaggataggcactggagagtttgacttgcgatatttgagtacatcccattgctggcgctccgagtatctgggcatctggcttggtgtttcttgtttggtgatacctgtacaagcaaatttggtgacctgctacttaaaaactgtttctgcaaagaggtcgtcttgactgatcgcaatgatgaagttctggaggcaagtgttgttgttatgatgaaggcagacccaagtattgaaagggatgatctgattttgctctaggagattgccatgtacatgcttcttgcatgtggagctgtctatgtgatcttgataagaaagatttgtggatgttgacccaacaggaaattgctactgaggtgcaaagtgaatccaagtgaaagtaattaggggagttagctatgtcaaatggaaagagagtggttgctaaaggataggaagctgaagctggatgaaggaagcaactacatgcaaccgatggcaataatgcattgcagggttgaggctcgttagaaatgtcaagttggtcccggacgtgggtatggtgcccgcaaggccgacagagctgagatcaagcactgagatcgtgccctcgtgcctacggctgcatgtcacacctggccagaggcataggctaccactactgttctaagaggacaacctgctcgatagctagcctaggatggccttcagttccagcaaggcttgtcggctcgtctcactgcagaacgctattgttggcgcctaattgaacgaagttgataccggtaggatcccatgaagcaacataagcagcagaagtctgacgaggaatgacatagatgcagtgctttcgtttgttgctactgaaaaaagatctgaaccaagtatttctgtaagtataccaacaagttagttgctactactttgtatattgatcttcgttggccgaatgtttgagtttttttcaaggcacaaacactttattttgagatctatc

SEQ ID NO: 74363 - DNA, 3119 bp, Zea Mays
atccaattttgggtccgcagaacctcctcctctcgctccgccgccgccttcccctcgcccaccacgctttggtcccaaacccacggtcgctcatcctggacctccacgccatcgaggcagtgaagctgggctcattcgtgcaatcgtgctcaagtctggcatcaactcccccatctaccgggacctccacgcgctcgtctcccacccacgcctgctctccgttgttgcctcgctcctccatatgcccggcctcgtctgcaacgtcccctacacagcgctcccgtcgtcgtcctctgcgtcgaccgctccatccccatgctcatgcgccgcaaggaggccaagccttacgacatgattggtgagaccagaggagcacgagcgcaacctccgtcacccctaagatctcctcaccattgtggccatcctgcaagatcagtactcattatctattaagaaggttacggttagcttggtgtaggataggcactggagagtttgacttgcgatatttgagtacatcccattgctggcgctccgagtatctggccatactattgattcacataccagctaaatttaggaccatcccgattgaaggctcttcccacttaagtgattcttccttctgaatccattttttagcttattcattcggattatgacccataattatgtttttttgtttgcttgaattcggtcaaacaaactgagaaaagcgtggatcctctgaagaatgtctgaaaaaaatgatagacaagtccctagatttaccccaatttcacttgctctatagatttatagttctataatatgtgcttccttatcaatctttgttactcaattatgctagataatcacttgtccttaatctaattaacagtgttgtcatcatagatgaagctgacaacttagttgattccttgaataagatatacaagtcaaagcttacatcttcttaggttactctcacctttcattaacctttccatcacagtctggcaaatagtattttgccttgtgccataggtcattatacttagttgcaattgtattgctttgtgtttcattcaatgaacataaacatctacattccatgttgtccattagttatgatttttgctggaacataaatggcatatagctctgtattttgtgtgcctgatgctcattcagtactattgtcaaagcacaaaagggagatttaggaatttatttggcttataaaggggcataaacaaagagggtcttttagtggtggagttagcttagcttgcctatggggttgtatggcacattataagagattctatatatggtttcatctggtttaggtttagaattttcattttgaaagcaacattcagtccatacatgacttgagcatgctttctaaattgacatttttggtgtttacttgggctaaaaactaggattcttgcatttttctgccatgtgctgtttacaggtgaaattgtgttgttcagaaacaaactttggcatccgtttctcattctcctaactgcatttacatgtattcattttccttttggattgtagctgaaagcagtcctttcccacctagatgaataccttaatagattttacaatgttttgggagctaggaattgatgatacatccagaccttggtagttttaacaaggtcttccacacatgttctgatcaacaatcaagatggtagcactgtgtcttctatgaccacaaaccaattcttgttttcccttgacatcgataacataaacatagttgaattttgtcactttgtgaaagacatcaatataatccacaaggtaaatttcttaatctataaccactgtttgaaattggtagtctacaatctatttgatgctttaagtgaactttagaagtttatatcatttccaagaaaagtttacattaccttttccaattaatgttgactcaacatatataagtaactaccaaaatttatttggaatagaaattgaatattaacaaacaaaaaatatcttgtacttaaaatttgtatactaatataacagaactgcgacaaactcaatgatgggcacaaaagagctttgcacaatctcattccaggatcaacgactcatagatgtttttatcaacactgcacacattgtttgctgaaattagctcatgttattgatggtgtttgaaagaaacattaaagttttgcttcgacaaatgtcttttgctcagggcatctggcttggtgtttcttgtttggtgatacctgtacaagcaaatttggtgacctgctacttaaaaactgtttctgcaaagaggtcgtcttgactgatcgcaatgatgaagttctggagtgttgttgttatgatgaaggcagacccaagtattgaaagggatgatctgattttgctctaggagattgccatgtacatgcttcttgcatgtggagctgtctatgtgatcttgataagaaagatttgtggatgttgacccaacaggaaattgctactgaggtgcaaagtgaatccaagtgaaagtaattaggggagttagctatgtcaaatggaaagagagtggttgctaaaggataggaagctgaagctggatgaaggaagcaactacatgcaaccgatggcaataatgcattgcagggttgaggctcgttagaaatgtcaagttggtcccggacgtgggtatggtgcccgcaaggccgacagagctgagatcaagcactgagatcgtgccctcgtgcctacggctgcatgtcacacctggccagaggcataggctaccactactgttctaagaggacaacctgctcgatagctagcctaggatggccttcagttccagcaaggcttgtcggctcgtctcactgcagaacgctattgttggcgcctaattgaacgaagttgataccggtaggatcccatgaagcaacataagcagcagaagtctgacgaggaatgacatagatgcagtgctttcgtttgttgctactgaaaaaagatctgaaccaagtatttctgtaagtataccaacaagttagttgctactactttgtatattgatcttcgttggccgaatgtttgagtttttttcaaggcacaaacactttattttgagatctatc

SEQ ID NO: 74364 - DNA, 3173 bp, Zea Mays
atccaattttgggtccgcagaacctcctcctctcgctccgccgccgccttcccctcgcccaccacgctttggtcccaaacccacggtcgctcatcctggacctccacgccatcgaggcagtgaagctgggctcattcgtgcaatcgtgctcaagtctggcatcaactcccccatctaccgggacctccacgcgctcgtctcccacccacgcctgctctccgttgttgcctcgctcctccatatgcccggcctcgtctgcaacgtcccctacacagcgctcccgtcgtcgtcctctgcgtcgaccgctccatccccatgctcatgcgccgcaaggaggccaagccttacgacatgattggtgagaccagaggagcacgagcgcaacctccgtcacccctaagatctcctcaccattgtggccatcctgcaagatcagtactcattatctattaagaaggttacggttagcttgattattggcattgaccttttatctcaaacgctgcgacccgtcattgttgaacttgcagaggataggcactggagagtttgacttgcgatatttgagtacatcccattgctggcgctccgagtatctggccatactattgattcacataccagctaaatttaggaccatcccgattgaaggctcttcccacttaagtgattcttccttctgaatccattttttagcttattcattcggattatgacccataattatgtttttttgtttgcttgaattcggtcaaacaaactgagaaaagcgtggatcctctgaagaatgtctgaaaaaaatgatagacaagtccctagatttaccccaatttcacttgctctatagatttatagttctataatatgtgcttccttatcaatctttgttactcaattatgctagataatcacttgtccttaatctaattaacagtgttgtcatcatagatgaagctgacaacttagttgattccttgaataagatatacaagtcaaagcttacatcttcttaggttactctcacctttcattaacctttccatcacagtctggcaaatagtattttgccttgtgccataggtcattatacttagttgcaattgtattgctttgtgtttcattcaatgaacataaacatctacattccatgttgtccattagttatgatttttgctggaacataaatggcatatagctctgtattttgtgtgcctgatgctcattcagtactattgtcaaagcacaaaagggagatttaggaatttatttggcttataaaggggcataaacaaagagggtcttttagtggtggagttagcttagcttgcctatggggttgtatggcacattataagagattctatatatggtttcatctggtttaggtttagaattttcattttgaaagcaacattcagtccatacatgacttgagcatgctttctaaattgacatttttggtgtttacttgggctaaaaactaggattcttgcatttttctgccatgtgctgtttacaggtgaaattgtgttgttcagaaacaaactttggcatccgtttctcattctcctaactgcatttacatgtattcattttccttttggattgtagctgaaagcagtcctttcccacctagatgaataccttaatagattttacaatgttttgggagctaggaattgatgatacatccagaccttggtagttttaacaaggtcttccacacatgttctgatcaacaatcaagatggtagcactgtgtcttctatgaccacaaaccaattcttgttttcccttgacatcgataacataaacatagttgaattttgtcactttgtgaaagacatcaatataatccacaaggtaaatttcttaatctataaccactgtttgaaattggtagtctacaatctatttgatgctttaagtgaactttagaagtttatatcatttccaagaaaagtttacattaccttttccaattaatgttgactcaacatatataagtaactaccaaaatttatttggaatagaaattgaatattaacaaacaaaaaatatcttgtacttaaaatttgtatactaatataacagaactgcgacaaactcaatgatgggcacaaaagagctttgcacaatctcattccaggatcaacgactcatagatgtttttatcaacactgcacacattgtttgctgaaattagctcatgttattgatggtgtttgaaagaaacattaaagttttgcttcgacaaatgtcttttgctcagggcatctggcttggtgtttcttgtttggtgatacctgtacaagcaaatttggtgacctgctacttaaaaactgtttctgcaaagaggtcgtcttgactgatcgcaatgatgaagttctggagtgttgttgttatgatgaaggcagacccaagtattgaaagggatgatctgattttgctctaggagattgccatgtacatgcttcttgcatgtggagctgtctatgtgatcttgataagaaagatttgtggatgttgacccaacaggaaattgctactgaggtgcaaagtgaatccaagtgaaagtaattaggggagttagctatgtcaaatggaaagagagtggttgctaaaggataggaagctgaagctggatgaaggaagcaactacatgcaaccgatggcaataatgcattgcagggttgaggctcgttagaaatgtcaagttggtcccggacgtgggtatggtgcccgcaaggccgacagagctgagatcaagcactgagatcgtgccctcgtgcctacggctgcatgtcacacctggccagaggcataggctaccactactgttctaagaggacaacctgctcgatagctagcctaggatggccttcagttccagcaaggcttgtcggctcgtctcactgcagaacgctattgttggcgcctaattgaacgaagttgataccggtaggatcccatgaagcaacataagcagcagaagtctgacgaggaatgacatagatgcagtgctttcgtttgttgctactgaaaaaagatctgaaccaagtatttctgtaagtataccaacaagttagttgctactactttgtatattgatcttcgttggccgaatgtttgagtttttttcaaggcacaaacactttattttgagatctatc

SEQ ID NO: 74365 - DNA, 1499 bp, Zea Mays
atccaattttgggtccgcagaacctcctcctctcgctccgccgccgccttcccctcgcccaccacgctttggtcccaaacccacggtcgctcatcctggacctccacgccatcgaggcagtgaagctgggctcattcgtgcaatcgtgctcaagtctggcatcaactcccccatctaccgggacctccacgcgctcgtctcccacccacgcctgctctccgttgttgcctcgctcctccatatgcccggcctcgtctgcaacgtcccctacacagcgctcccgtcgtcgtcctctgcgtcgaccgctccatccccatgctcatgcgccgcaaggaggccaagccttacgacatgattggtgagaccagaggagcacgagcgcaacctccgtcacccctaagatctcctcaccattgtggccatcctgcaagatcagtactcattatctattaagaagaggataggcactggagagtttgacttgcgatatttgagtacatcccattgctggcgctccgagtatctggccatactattgattcacataccagctaaatttaggaccatcccgattgaaggctcttcccacttaaggcatctggcttggtgtttcttgtttggtgatacctgtacaagcaaatttggtgacctgctacttaaaaactgtttctgcaaagaggtcgtcttgactgatcgcaatgatgaagttctggaggcaagtgttgttgttatgatgaaggcagacccaagtattgaaagggatgatctgattttgctctaggagattgccatgtacatgcttcttgcatgtggagctgtctatgtgatcttgataagaaagatttgtggatgttgacccaacaggaaattgctactgaggtgcaaagtgaatccaagtgaaagtaattaggggagttagctatgtcaaatggaaagagagtggttgctaaaggataggaagctgaagctggatgaaggaagcaactacatgcaaccgatggcaataatgcattgcagggttgaggctcgttagaaatgtcaagttggtcccggacgtgggtatggtgcccgcaaggccgacagagctgagatcaagcactgagatcgtgccctcgtgcctacggctgcatgtcacacctggccagaggcataggctaccactactgttctaagaggacaacctgctcgatagctagcctaggatggccttcagttccagcaaggcttgtcggctcgtctcactgcagaacgctattgttggcgcctaattgaacgaagttgataccggtaggatcccatgaagcaacataagcagcagaagtctgacgaggaatgacatagatgcagtgctttcgtttgttgctactgaaaaaagatctgaaccaagtatttctgtaagtataccaacaagttagttgctactactttgtatattgatcttcgttggccgaatgtttgagtttttttcaaggcacaaacactttattttgagatctatc

SEQ ID NO: 74366 - DNA, 2956 bp, Zea Mays
atccaattttgggtccgcagaacctcctcctctcgctccgccgccgccttcccctcgcccaccacgctttggtcccaaacccacggtcgctcatcctggacctccacgccatcgaggcagtgaagctgggctcattcgtgcaatcgtgctcaagtctggcatcaactcccccatctaccgggacctccacgcgctcgtctcccacccacgcctgctctccgttgttgcctcgctcctccatatgcccggcctcgtctgcaacgtcccctacacagcgctcccgtcgtcgtcctctgcgtcgaccgctccatccccatgctcatgcgccgcaaggaggccaagccttacgacatgattggtgagaccagaggagcacgagcgcaacctccgtcacccctaagatctcctcaccattgtggccatcctgcaagatcagtactcattatctattaagaaggttacggttagcttggtgtgtaagtgtgttggacaaatgaggtcccgtttttttactggatttatttgccttttcttttctgttttggatatttgaagtcttatttactagctattaatacattgtttttaagtcatcggccttgcaagcattgcctctttctttaaaattatctgatgactggtgaattctgttttgatcttttagattattggcattgaccttttatctcaaacgctgcgacccgtcattgttgaacttgcagaggataggcactggagagtttgacttgcgatatttgagtacatcccattgctggcgctccgagtatctggccatactattgattcacataccagctaaatttaggaccatcccgattgaaggctcttcccacttaagtgattcttccttctgaatccattttttagcttattcattcggattatgacccataattatgtttttttgtttgcttgaattcggtcaaacaaactgagaaaagcgtggatcctctgaagaatgtctgaaaaaaatgatagacaagtccctagatttaccccaatttcacttgctctatagatttatagttctataatatgtgcttccttatcaatctttgttactcaattatgctagataatcacttgtccttaatctaattaacagtgttgtcatcatagatgaagctgacaacttagttgattccttgaataagatatacaagtcaaagcttacatcttcttaggttactctcacctttcattaacctttccatcacagtctggcaaatagtattttgccttgtgccataggtcattatacttagttgcaattgtattgctttgtgtttcattcaatgaacataaacatctacattccatgttgtccattagttatgatttttgctggaacataaatggcatatagctctgtattttgtgtgcctgatgctcattcagtactattgtcaaagcacaaaagggagatttaggaatttatttggcttataaaggggcataaacaaagagggtcttttagtggtggagttagcttagcttgcctatggggttgtatggcacattataagagattctatatatggtttcatctggtttaggtttagaattttcattttgaaagcaacattcagtccatacatgacttgagcatgctttctaaattgacatttttggtgtttacttgggctaaaaactaggattcttgcatttttctgccatgtgctgtttacaggtgaaattgtgttgttcagaaacaaactttggcatccgtttctcattctcctaactgcatttacatgtattcattttccttttggattgtagctgaaagcagtcctttcccacctagatgaataccttaatagattttacaatgttttgggagctaggaattgatgatacatccagaccttggtagttttaacaaggtcttccacacatgttctgatcaacaatcaagatggtagcactgtgtcttctatgaccacaaaccaattcttgttttcccttgacatcgataacataaacatagttgaattttgtcactttgtgaaagacatcaatataatccacaagggcatctggcttggtgtttcttgtttggtgatacctgtacaagcaaatttggtgacctgctacttaaaaactgtttctgcaaagaggtcgtcttgactgatcgcaatgatgaagttctggagtgttgttgttatgatgaaggcagacccaagtattgaaagggatgatctgattttgctctaggagattgccatgtacatgcttcttgcatgtggagctgtctatgtgatcttgataagaaagatttgtggatgttgacccaacaggaaattgctactgaggtgcaaagtgaatccaagtgaaagtaattaggggagttagctatgtcaaatggaaagagagtggttgctaaaggataggaagctgaagctggatgaaggaagcaactacatgcaaccgatggcaataatgcattgcagggttgaggctcgttagaaatgtcaagttggtcccggacgtgggtatggtgcccgcaaggccgacagagctgagatcaagcactgagatcgtgccctcgtgcctacggctgcatgtcacacctggccagaggcataggctaccactactgttctaagaggacaacctgctcgatagctagcctaggatggccttcagttccagcaaggcttgtcggctcgtctcactgcagaacgctattgttggcgcctaattgaacgaagttgataccggtaggatcccatgaagcaacataagcagcagaagtctgacgaggaatgacatagatgcagtgctttcgtttgttgctactgaaaaaagatctgaaccaagtatttctgtaagtataccaacaagttagttgctactactttgtatattgatcttcgttggccgaatgtttgagtttttttcaaggcacaaacactttattttgagatctatc

SEQ ID NO: 74367 - DNA, 3105 bp, Zea Mays
atccaattttgggtccgcagaacctcctcctctcgctccgccgccgccttcccctcgcccaccacgctttggtcccaaacccacggtcgctcatcctggacctccacgccatcgaggcagtgaagctgggctcattcgtgcaatcgtgctcaagtctggcatcaactcccccatctaccgggacctccacgcgctcgtctcccacccacgcctgctctccgttgttgcctcgctcctccatatgcccggcctcgtctgcaacgtcccctacacagcgctcccgtcgtcgtcctctgcgtcgaccgctccatccccatgctcatgcgccgcaaggaggccaagccttacgacatgattggtgagaccagaggagcacgagcgcaacctccgtcacccctaagatctcctcaccattgtggccatcctgcaagatcagtactcattatctattaagaagaggataggcactggagagtttgacttgcgatatttgagtacatcccattgctggcgctccgagtatctggccatactattgattcacataccagctaaatttaggaccatcccgattgaaggctcttcccacttaagtgattcttccttctgaatccattttttagcttattcattcggattatgacccataattatgtttttttgtttgcttgaattcggtcaaacaaactgagaaaagcgtggatcctctgaagaatgtctgaaaaaaatgatagacaagtccctagatttaccccaatttcacttgctctatagatttatagttctataatatgtgcttccttatcaatctttgttactcaattatgctagataatcacttgtccttaatctaattaacagtgttgtcatcatagatgaagctgacaacttagttgattccttgaataagatatacaagtcaaagcttacatcttcttaggttactctcacctttcattaacctttccatcacagtctggcaaatagtattttgccttgtgccataggtcattatacttagttgcaattgtattgctttgtgtttcattcaatgaacataaacatctacattccatgttgtccattagttatgatttttgctggaacataaatggcatatagctctgtattttgtgtgcctgatgctcattcagtactattgtcaaagcacaaaagggagatttaggaatttatttggcttataaaggggcataaacaaagagggtcttttagtggtggagttagcttagcttgcctatggggttgtatggcacattataagagattctatatatggtttcatctggtttaggtttagaattttcattttgaaagcaacattcagtccatacatgacttgagcatgctttctaaattgacatttttggtgtttacttgggctaaaaactaggattcttgcatttttctgccatgtgctgtttacaggtgaaattgtgttgttcagaaacaaactttggcatccgtttctcattctcctaactgcatttacatgtattcattttccttttggattgtagctgaaagcagtcctttcccacctagatgaataccttaatagattttacaatgttttgggagctaggaattgatgatacatccagaccttggtagttttaacaaggtcttccacacatgttctgatcaacaatcaagatggtagcactgtgtcttctatgaccacaaaccaattcttgttttcccttgacatcgataacataaacatagttgaattttgtcactttgtgaaagacatcaatataatccacaaggtaaatttcttaatctataaccactgtttgaaattggtagtctacaatctatttgatgctttaagtgaactttagaagtttatatcatttccaagaaaagtttacattaccttttccaattaatgttgactcaacatatataagtaactaccaaaatttatttggaatagaaattgaatattaacaaacaaaaaatatcttgtacttaaaatttgtatactaatataacagaactgcgacaaactcaatgatgggcacaaaagagctttgcacaatctcattccaggatcaacgactcatagatgtttttatcaacactgcacacattgtttgctgaaattagctcatgttattgatggtgtttgaaagaaacattaaagttttgcttcgacaaatgtcttttgctcagggcatctggcttggtgtttcttgtttggtgatacctgtacaagcaaatttggtgacctgctacttaaaaactgtttctgcaaagaggtcgtcttgactgatcgcaatgatgaagttctggaggcaagtgttgttgttatgatgaaggcagacccaagtattgaaagggatgatctgattttgctctaggagattgccatgtacatgcttcttgcatgtggagctgtctatgtgatcttgataagaaagatttgtggatgttgacccaacaggaaattgctactgaggtgcaaagtgaatccaagtgaaagtaattaggggagttagctatgtcaaatggaaagagagtggttgctaaaggataggaagctgaagctggatgaaggaagcaactacatgcaaccgatggcaataatgcattgcagggttgaggctcgttagaaatgtcaagttggtcccggacgtgggtatggtgcccgcaaggccgacagagctgagatcaagcactgagatcgtgccctcgtgcctacggctgcatgtcacacctggccagaggcataggctaccactactgttctaagaggacaacctgctcgatagctagcctaggatggccttcagttccagcaaggcttgtcggctcgtctcactgcagaacgctattgttggcgcctaattgaacgaagttgataccggtaggatcccatgaagcaacataagcagcagaagtctgacgaggaatgacatagatgcagtgctttcgtttgttgctactgaaaaaagatctgaaccaagtatttctgtaagtataccaacaagttagttgctactactttgtatattgatcttcgttggccgaatgtttgagtttttttcaaggcacaaacactttattttgagatctatc

SEQ ID NO: 74368 - DNA, 3059 bp, Zea Mays
atccaattttgggtccgcagaacctcctcctctcgctccgccgccgccttcccctcgcccaccacgctttggtcccaaacccacggtcgctcatcctggacctccacgccatcgaggcagtgaagctgggctcattcgtgcaatcgtgctcaagtctggcatcaactcccccatctaccgggacctccacgcgctcgtctcccacccacgcctgctctccgttgttgcctcgctcctccatatgcccggcctcgtctgcaacgtcccctacacagcgctcccgtcgtcgtcctctgcgtcgaccgctccatccccatgctcatgcgccgcaaggaggccaagccttacgacatgattgattattggcattgaccttttatctcaaacgctgcgacccgtcattgttgaacttgcagaggataggcactggagagtttgacttgcgatatttgagtacatcccattgctggcgctccgagtatctggccatactattgattcacataccagctaaatttaggaccatcccgattgaaggctcttcccacttaagtgattcttccttctgaatccattttttagcttattcattcggattatgacccataattatgtttttttgtttgcttgaattcggtcaaacaaactgagaaaagcgtggatcctctgaagaatgtctgaaaaaaatgatagacaagtccctagatttaccccaatttcacttgctctatagatttatagttctataatatgtgcttccttatcaatctttgttactcaattatgctagataatcacttgtccttaatctaattaacagtgttgtcatcatagatgaagctgacaacttagttgattccttgaataagatatacaagtcaaagcttacatcttcttaggttactctcacctttcattaacctttccatcacagtctggcaaatagtattttgccttgtgccataggtcattatacttagttgcaattgtattgctttgtgtttcattcaatgaacataaacatctacattccatgttgtccattagttatgatttttgctggaacataaatggcatatagctctgtattttgtgtgcctgatgctcattcagtactattgtcaaagcacaaaagggagatttaggaatttatttggcttataaaggggcataaacaaagagggtcttttagtggtggagttagcttagcttgcctatggggttgtatggcacattataagagattctatatatggtttcatctggtttaggtttagaattttcattttgaaagcaacattcagtccatacatgacttgagcatgctttctaaattgacatttttggtgtttacttgggctaaaaactaggattcttgcatttttctgccatgtgctgtttacaggtgaaattgtgttgttcagaaacaaactttggcatccgtttctcattctcctaactgcatttacatgtattcattttccttttggattgtagctgaaagcagtcctttcccacctagatgaataccttaatagattttacaatgttttgggagctaggaattgatgatacatccagaccttggtagttttaacaaggtcttccacacatgttctgatcaacaatcaagatggtagcactgtgtcttctatgaccacaaaccaattcttgttttcccttgacatcgataacataaacatagttgaattttgtcactttgtgaaagacatcaatataatccacaaggtaaatttcttaatctataaccactgtttgaaattggtagtctacaatctatttgatgctttaagtgaactttagaagtttatatcatttccaagaaaagtttacattaccttttccaattaatgttgactcaacatatataagtaactaccaaaatttatttggaatagaaattgaatattaacaaacaaaaaatatcttgtacttaaaatttgtatactaatataacagaactgcgacaaactcaatgatgggcacaaaagagctttgcacaatctcattccaggatcaacgactcatagatgtttttatcaacactgcacacattgtttgctgaaattagctcatgttattgatggtgtttgaaagaaacattaaagttttgcttcgacaaatgtcttttgctcagggcatctggcttggtgtttcttgtttggtgatacctgtacaagcaaatttggtgacctgctacttaaaaactgtttctgcaaagaggtcgtcttgactgatcgcaatgatgaagttctggagtgttgttgttatgatgaaggcagacccaagtattgaaagggatgatctgattttgctctaggagattgccatgtacatgcttcttgcatgtggagctgtctatgtgatcttgataagaaagatttgtggatgttgacccaacaggaaattgctactgaggtgcaaagtgaatccaagtgaaagtaattaggggagttagctatgtcaaatggaaagagagtggttgctaaaggataggaagctgaagctggatgaaggaagcaactacatgcaaccgatggcaataatgcattgcagggttgaggctcgttagaaatgtcaagttggtcccggacgtgggtatggtgcccgcaaggccgacagagctgagatcaagcactgagatcgtgccctcgtgcctacggctgcatgtcacacctggccagaggcataggctaccactactgttctaagaggacaacctgctcgatagctagcctaggatggccttcagttccagcaaggcttgtcggctcgtctcactgcagaacgctattgttggcgcctaattgaacgaagttgataccggtaggatcccatgaagcaacataagcagcagaagtctgacgaggaatgacatagatgcagtgctttcgtttgttgctactgaaaaaagatctgaaccaagtatttctgtaagtataccaacaagttagttgctactactttgtatattgatcttcgttggccgaatgtttgagtttttttcaaggcacaaacactttattttgagatctatc

SEQ ID NO: 74369 - DNA, 1357 bp, Zea Mays
atccaattttgggtccgcagaacctcctcctctcgctccgccgccgccttcccctcgcccaccacgctttggtcccaaacccacggtcgctcatcctggacctccacgccatcgaggcagtgaagctgggctcattcgtgcaatcgtgctcaagtctggcatcaactcccccatctaccgggacctccacgcgctcgtctcccacccacgcctgctctccgttgttgcctcgctcctccatatgcccggcctcgtctgcaacgtcccctacacagcgctcccgtcgtcgtcctctgcgtcgaccgctccatccccatgctcatgcgccgcaaggaggccaagccttacgacatgattggtgagaccagaggagcacgagcgcaacctccgtcacccctaagatctcctcaccattgtggccatcctgcaagatcagtactcattatctattaagaagaggataggcactggagagtttgacttgcgatatttgagtacatcccattgctggcgctccgagtatctgctgtttctgcaaagaggtcgtcttgactgatcgcaatgatgaagttctggagtgttgttgttatgatgaaggcagacccaagtattgaaagggatgatctgattttgctctaggagattgccatgtacatgcttcttgcatgtggagctgtctatgtgatcttgataagaaagatttgtggatgttgacccaacaggaaattgctactgaggtgcaaagtgaatccaagtgaaagtaattaggggagttagctatgtcaaatggaaagagagtggttgctaaaggataggaagctgaagctggatgaaggaagcaactacatgcaaccgatggcaataatgcattgcagggttgaggctcgttagaaatgtcaagttggtcccggacgtgggtatggtgcccgcaaggccgacagagctgagatcaagcactgagatcgtgccctcgtgcctacggctgcatgtcacacctggccagaggcataggctaccactactgttctaagaggacaacctgctcgatagctagcctaggatggccttcagttccagcaaggcttgtcggctcgtctcactgcagaacgctattgttggcgcctaattgaacgaagttgataccggtaggatcccatgaagcaacataagcagcagaagtctgacgaggaatgacatagatgcagtgctttcgtttgttgctactgaaaaaagatctgaaccaagtatttctgtaagtataccaacaagttagttgctactactttgtatattgatcttcgttggccgaatgtttgagtttttttcaaggcacaaacactttattttgagatctatc

SEQ ID NO: 74370 - DNA, 1258 bp, Zea Mays
atccaattttgggtccgcagaacctcctcctctcgctccgccgccgccttcccctcgcccaccacgctttggtcccaaacccacggtcgctcatcctggacctccacgccatcgaggcagtgaagctgggctcattcgtgcaatcgtgctcaagtctggcatcaactcccccatctaccgggacctccacgcgctcgtctcccacccacgcctgctctccgttgttgcctcgctcctccatatgcccggcctcgtctgcaacgtcccctacacagcgctcccgtcgtcgtcctctgcgtcgaccgctccatccccatgctcatgcgccgcaaggaggccaagccttacgacatgattgaggataggcactggagagtttgacttgcgatatttgagtacatcccattgctggcgctccgagtatctgctgtttctgcaaagaggtcgtcttgactgatcgcaatgatgaagttctggagtgttgttgttatgatgaaggcagacccaagtattgaaagggatgatctgattttgctctaggagattgccatgtacatgcttcttgcatgtggagctgtctatgtgatcttgataagaaagatttgtggatgttgacccaacaggaaattgctactgaggtgcaaagtgaatccaagtgaaagtaattaggggagttagctatgtcaaatggaaagagagtggttgctaaaggataggaagctgaagctggatgaaggaagcaactacatgcaaccgatggcaataatgcattgcagggttgaggctcgttagaaatgtcaagttggtcccggacgtgggtatggtgcccgcaaggccgacagagctgagatcaagcactgagatcgtgccctcgtgcctacggctgcatgtcacacctggccagaggcataggctaccactactgttctaagaggacaacctgctcgatagctagcctaggatggccttcagttccagcaaggcttgtcggctcgtctcactgcagaacgctattgttggcgcctaattgaacgaagttgataccggtaggatcccatgaagcaacataagcagcagaagtctgacgaggaatgacatagatgcagtgctttcgtttgttgctactgaaaaaagatctgaaccaagtatttctgtaagtataccaacaagttagttgctactactttgtatattgatcttcgttggccgaatgtttgagtttttttcaaggcacaaacactttattttgagatctatc

SEQ ID NO: 74371 - DNA, 3115 bp, Zea Mays
atccaattttgggtccgcagaacctcctcctctcgctccgccgccgccttcccctcgcccaccacgctttggtcccaaacccacggtcgctcatcctggacctccacgccatcgaggcagtgaagctgggctcattcgtgcaatcgtgctcaagtctggcatcaactcccccatctaccgggacctccacgcgctcgtctcccacccacgcctgctctccgttgttgcctcgctcctccatatgcccggcctcgtctgcaacgtcccctacacagcgctcccgtcgtcgtcctctgcgtcgaccgctccatccccatgctcatgcgccgcaaggaggccaagccttacgacatgattggtgagaccagaggagcacgagcgcaacctccgtcacccctaagatctcctcaccattgtggccatcctgcaagatcagtactcattatctattaagaaggttacggttagcttgaggataggcactggagagtttgacttgcgatatttgagtacatcccattgctggcgctccgagtatctggccatactattgattcacataccagctaaatttaggaccatcccgattgaaggctcttcccacttaagtgattcttccttctgaatccattttttagcttattcattcggattatgacccataattatgtttttttgtttgcttgaattcggtcaaacaaactgagaaaagcgtggatcctctgaagaatgtctgaaaaaaatgatagacaagtccctagatttaccccaatttcacttgctctatagatttatagttctataatatgtgcttccttatcaatctttgttactcaattatgctagataatcacttgtccttaatctaattaacagtgttgtcatcatagatgaagctgacaacttagttgattccttgaataagatatacaagtcaaagcttacatcttcttaggttactctcacctttcattaacctttccatcacagtctggcaaatagtattttgccttgtgccataggtcattatacttagttgcaattgtattgctttgtgtttcattcaatgaacataaacatctacattccatgttgtccattagttatgatttttgctggaacataaatggcatatagctctgtattttgtgtgcctgatgctcattcagtactattgtcaaagcacaaaagggagatttaggaatttatttggcttataaaggggcataaacaaagagggtcttttagtggtggagttagcttagcttgcctatggggttgtatggcacattataagagattctatatatggtttcatctggtttaggtttagaattttcattttgaaagcaacattcagtccatacatgacttgagcatgctttctaaattgacatttttggtgtttacttgggctaaaaactaggattcttgcatttttctgccatgtgctgtttacaggtgaaattgtgttgttcagaaacaaactttggcatccgtttctcattctcctaactgcatttacatgtattcattttccttttggattgtagctgaaagcagtcctttcccacctagatgaataccttaatagattttacaatgttttgggagctaggaattgatgatacatccagaccttggtagttttaacaaggtcttccacacatgttctgatcaacaatcaagatggtagcactgtgtcttctatgaccacaaaccaattcttgttttcccttgacatcgataacataaacatagttgaattttgtcactttgtgaaagacatcaatataatccacaaggtaaatttcttaatctataaccactgtttgaaattggtagtctacaatctatttgatgctttaagtgaactttagaagtttatatcatttccaagaaaagtttacattaccttttccaattaatgttgactcaacatatataagtaactaccaaaatttatttggaatagaaattgaatattaacaaacaaaaaatatcttgtacttaaaatttgtatactaatataacagaactgcgacaaactcaatgatgggcacaaaagagctttgcacaatctcattccaggatcaacgactcatagatgtttttatcaacactgcacacattgtttgctgaaattagctcatgttattgatggtgtttgaaagaaacattaaagttttgcttcgacaaatgtcttttgctcagggcatctggcttggtgtttcttgtttggtgatacctgtacaagcaaatttggtgacctgctacttaaaaactgtttctgcaaagaggtcgtcttgactgatcgcaatgatgaagttctggagtgttgttgttatgatgaaggcagacccaagtattgaaagggatgatctgattttgctctaggagattgccatgtacatgcttcttgcatgtggagctgtctatgtgatcttgataagaaagatttgtggatgttgacccaacaggaaattgctactgaggtgcaaagtgaatccaagtgaaagtaattaggggagttagctatgtcaaatggaaagagagtggttgctaaaggataggaagctgaagctggatgaaggaagcaactacatgcaaccgatggcaataatgcattgcagggttgaggctcgttagaaatgtcaagttggtcccggacgtgggtatggtgcccgcaaggccgacagagctgagatcaagcactgagatcgtgccctcgtgcctacggctgcatgtcacacctggccagaggcataggctaccactactgttctaagaggacaacctgctcgatagctagcctaggatggccttcagttccagcaaggcttgtcggctcgtctcactgcagaacgctattgttggcgcctaattgaacgaagttgataccggtaggatcccatgaagcaacataagcagcagaagtctgacgaggaatgacatagatgcagtgctttcgtttgttgctactgaaaaaagatctgaaccaagtatttctgtaagtataccaacaagttagttgctactactttgtatattgatcttcgttggccgaatgtttgagtttttttcaaggcacaaacactttattttgagatctatc

SEQ ID NO: 74372 - DNA, 3124 bp, Zea Mays
atccaattttgggtccgcagaacctcctcctctcgctccgccgccgccttcccctcgcccaccacgctttggtcccaaacccacggtcgctcatcctggacctccacgccatcgaggcagtgaagctgggctcattcgtgcaatcgtgctcaagtctggcatcaactcccccatctaccgggacctccacgcgctcgtctcccacccacgcctgctctccgttgttgcctcgctcctccatatgcccggcctcgtctgcaacgtcccctacacagcgctcccgtcgtcgtcctctgcgtcgaccgctccatccccatgctcatgcgccgcaaggaggccaagccttacgacatgattggtgagaccagaggagcacgagcgcaacctccgtcacccctaagatctcctcaccattgtggccatcctgcaagatcagtactcattatctattaagaaggttacggttagcttggtgtaggataggcactggagagtttgacttgcgatatttgagtacatcccattgctggcgctccgagtatctggccatactattgattcacataccagctaaatttaggaccatcccgattgaaggctcttcccacttaagtgattcttccttctgaatccattttttagcttattcattcggattatgacccataattatgtttttttgtttgcttgaattcggtcaaacaaactgagaaaagcgtggatcctctgaagaatgtctgaaaaaaatgatagacaagtccctagatttaccccaatttcacttgctctatagatttatagttctataatatgtgcttccttatcaatctttgttactcaattatgctagataatcacttgtccttaatctaattaacagtgttgtcatcatagatgaagctgacaacttagttgattccttgaataagatatacaagtcaaagcttacatcttcttaggttactctcacctttcattaacctttccatcacagtctggcaaatagtattttgccttgtgccataggtcattatacttagttgcaattgtattgctttgtgtttcattcaatgaacataaacatctacattccatgttgtccattagttatgatttttgctggaacataaatggcatatagctctgtattttgtgtgcctgatgctcattcagtactattgtcaaagcacaaaagggagatttaggaatttatttggcttataaaggggcataaacaaagagggtcttttagtggtggagttagcttagcttgcctatggggttgtatggcacattataagagattctatatatggtttcatctggtttaggtttagaattttcattttgaaagcaacattcagtccatacatgacttgagcatgctttctaaattgacatttttggtgtttacttgggctaaaaactaggattcttgcatttttctgccatgtgctgtttacaggtgaaattgtgttgttcagaaacaaactttggcatccgtttctcattctcctaactgcatttacatgtattcattttccttttggattgtagctgaaagcagtcctttcccacctagatgaataccttaatagattttacaatgttttgggagctaggaattgatgatacatccagaccttggtagttttaacaaggtcttccacacatgttctgatcaacaatcaagatggtagcactgtgtcttctatgaccacaaaccaattcttgttttcccttgacatcgataacataaacatagttgaattttgtcactttgtgaaagacatcaatataatccacaaggtaaatttcttaatctataaccactgtttgaaattggtagtctacaatctatttgatgctttaagtgaactttagaagtttatatcatttccaagaaaagtttacattaccttttccaattaatgttgactcaacatatataagtaactaccaaaatttatttggaatagaaattgaatattaacaaacaaaaaatatcttgtacttaaaatttgtatactaatataacagaactgcgacaaactcaatgatgggcacaaaagagctttgcacaatctcattccaggatcaacgactcatagatgtttttatcaacactgcacacattgtttgctgaaattagctcatgttattgatggtgtttgaaagaaacattaaagttttgcttcgacaaatgtcttttgctcagggcatctggcttggtgtttcttgtttggtgatacctgtacaagcaaatttggtgacctgctacttaaaaactgtttctgcaaagaggtcgtcttgactgatcgcaatgatgaagttctggaggcaagtgttgttgttatgatgaaggcagacccaagtattgaaagggatgatctgattttgctctaggagattgccatgtacatgcttcttgcatgtggagctgtctatgtgatcttgataagaaagatttgtggatgttgacccaacaggaaattgctactgaggtgcaaagtgaatccaagtgaaagtaattaggggagttagctatgtcaaatggaaagagagtggttgctaaaggataggaagctgaagctggatgaaggaagcaactacatgcaaccgatggcaataatgcattgcagggttgaggctcgttagaaatgtcaagttggtcccggacgtgggtatggtgcccgcaaggccgacagagctgagatcaagcactgagatcgtgccctcgtgcctacggctgcatgtcacacctggccagaggcataggctaccactactgttctaagaggacaacctgctcgatagctagcctaggatggccttcagttccagcaaggcttgtcggctcgtctcactgcagaacgctattgttggcgcctaattgaacgaagttgataccggtaggatcccatgaagcaacataagcagcagaagtctgacgaggaatgacatagatgcagtgctttcgtttgttgctactgaaaaaagatctgaaccaagtatttctgtaagtataccaacaagttagttgctactactttgtatattgatcttcgttggccgaatgtttgagtttttttcaaggcacaaacactttattttgagatctatc

SEQ ID NO: 74373 - DNA, 1513 bp, Zea Mays
atccaattttgggtccgcagaacctcctcctctcgctccgccgccgccttcccctcgcccaccacgctttggtcccaaacccacggtcgctcatcctggacctccacgccatcgaggcagtgaagctgggctcattcgtgcaatcgtgctcaagtctggcatcaactcccccatctaccgggacctccacgcgctcgtctcccacccacgcctgctctccgttgttgcctcgctcctccatatgcccggcctcgtctgcaacgtcccctacacagcgctcccgtcgtcgtcctctgcgtcgaccgctccatccccatgctcatgcgccgcaaggaggccaagccttacgacatgattggtgagaccagaggagcacgagcgcaacctccgtcacccctaagatctcctcaccattgtggccatcctgcaagatcagtactcattatctattaagaaggttacggttagcttggtgtaggataggcactggagagtttgacttgcgatatttgagtacatcccattgctggcgctccgagtatctggccatactattgattcacataccagctaaatttaggaccatcccgattgaaggctcttcccacttaaggcatctggcttggtgtttcttgtttggtgatacctgtacaagcaaatttggtgacctgctacttaaaaactgtttctgcaaagaggtcgtcttgactgatcgcaatgatgaagttctggagtgttgttgttatgatgaaggcagacccaagtattgaaagggatgatctgattttgctctaggagattgccatgtacatgcttcttgcatgtggagctgtctatgtgatcttgataagaaagatttgtggatgttgacccaacaggaaattgctactgaggtgcaaagtgaatccaagtgaaagtaattaggggagttagctatgtcaaatggaaagagagtggttgctaaaggataggaagctgaagctggatgaaggaagcaactacatgcaaccgatggcaataatgcattgcagggttgaggctcgttagaaatgtcaagttggtcccggacgtgggtatggtgcccgcaaggccgacagagctgagatcaagcactgagatcgtgccctcgtgcctacggctgcatgtcacacctggccagaggcataggctaccactactgttctaagaggacaacctgctcgatagctagcctaggatggccttcagttccagcaaggcttgtcggctcgtctcactgcagaacgctattgttggcgcctaattgaacgaagttgataccggtaggatcccatgaagcaacataagcagcagaagtctgacgaggaatgacatagatgcagtgctttcgtttgttgctactgaaaaaagatctgaaccaagtatttctgtaagtataccaacaagttagttgctactactttgtatattgatcttcgttggccgaatgtttgagtttttttcaaggcacaaacactttattttgagatctatc

SEQ ID NO: 74374 - DNA, 1764 bp, Zea Mays
atccaattttgggtccgcagaacctcctcctctcgctccgccgccgccttcccctcgcccaccacgctttggtcccaaacccacggtcgctcatcctggacctccacgccatcgaggcagtgaagctgggctcattcgtgcaatcgtgctcaagtctggcatcaactcccccatctaccgggacctccacgcgctcgtctcccacccacgcctgctctccgttgttgcctcgctcctccatatgcccggcctcgtctgcaacgtcccctacacagcgctcccgtcgtcgtcctctgcgtcgaccgctccatccccatgctcatgcgccgcaaggaggccaagccttacgacatgattggtgagaccagaggagcacgagcgcaacctccgtcacccctaagatctcctcaccattgtggccatcctgcaagatcagtactcattatctattaagaaggttacggttagcttggtgtgtaagtgtgttggacaaatgaggtcccgtttttttactggatttatttgccttttcttttctgttttggatatttgaagtcttatttactagctattaatacattgtttttaagtcatcggccttgcaagcattgcctctttctttaaaattatctgatgactggtgaattctgttttgatcttttagattattggcattgaccttttatctcaaacgctgcgacccgtcattgttgaacttgcagaggataggcactggagagtttgacttgcgatatttgagtacatcccattgctggcgctccgagtatctggccatactattgattcacataccagctaaatttaggaccatcccgattgaaggctcttcccacttaaggcatctggcttggtgtttcttgtttggtgatacctgtacaagcaaatttggtgacctgctacttaaaaactgtttctgcaaagaggtcgtcttgactgatcgcaatgatgaagttctggaggcaagtgttgttgttatgatgaaggcagacccaagtattgaaagggatgatctgattttgctctaggagattgccatgtacatgcttcttgcatgtggagctgtctatgtgatcttgataagaaagatttgtggatgttgacccaacaggaaattgctactgaggtgcaaagtgaatccaagtgaaagtaattaggggagttagctatgtcaaatggaaagagagtggttgctaaaggataggaagctgaagctggatgaaggaagcaactacatgcaaccgatggcaataatgcattgcagggttgaggctcgttagaaatgtcaagttggtcccggacgtgggtatggtgcccgcaaggccgacagagctgagatcaagcactgagatcgtgccctcgtgcctacggctgcatgtcacacctggccagaggcataggctaccactactgttctaagaggacaacctgctcgatagctagcctaggatggccttcagttccagcaaggcttgtcggctcgtctcactgcagaacgctattgttggcgcctaattgaacgaagttgataccggtaggatcccatgaagcaacataagcagcagaagtctgacgaggaatgacatagatgcagtgctttcgtttgttgctactgaaaaaagatctgaaccaagtatttctgtaagtataccaacaagttagttgctactactttgtatattgatcttcgttggccgaatgtttgagtttttttcaaggcacaaacactttattttgagatctatc

SEQ ID NO: 74375 - DNA, 3100 bp, Zea Mays
atccaattttgggtccgcagaacctcctcctctcgctccgccgccgccttcccctcgcccaccacgctttggtcccaaacccacggtcgctcatcctggacctccacgccatcgaggcagtgaagctgggctcattcgtgcaatcgtgctcaagtctggcatcaactcccccatctaccgggacctccacgcgctcgtctcccacccacgcctgctctccgttgttgcctcgctcctccatatgcccggcctcgtctgcaacgtcccctacacagcgctcccgtcgtcgtcctctgcgtcgaccgctccatccccatgctcatgcgccgcaaggaggccaagccttacgacatgattggtgagaccagaggagcacgagcgcaacctccgtcacccctaagatctcctcaccattgtggccatcctgcaagatcagtactcattatctattaagaagaggataggcactggagagtttgacttgcgatatttgagtacatcccattgctggcgctccgagtatctggccatactattgattcacataccagctaaatttaggaccatcccgattgaaggctcttcccacttaagtgattcttccttctgaatccattttttagcttattcattcggattatgacccataattatgtttttttgtttgcttgaattcggtcaaacaaactgagaaaagcgtggatcctctgaagaatgtctgaaaaaaatgatagacaagtccctagatttaccccaatttcacttgctctatagatttatagttctataatatgtgcttccttatcaatctttgttactcaattatgctagataatcacttgtccttaatctaattaacagtgttgtcatcatagatgaagctgacaacttagttgattccttgaataagatatacaagtcaaagcttacatcttcttaggttactctcacctttcattaacctttccatcacagtctggcaaatagtattttgccttgtgccataggtcattatacttagttgcaattgtattgctttgtgtttcattcaatgaacataaacatctacattccatgttgtccattagttatgatttttgctggaacataaatggcatatagctctgtattttgtgtgcctgatgctcattcagtactattgtcaaagcacaaaagggagatttaggaatttatttggcttataaaggggcataaacaaagagggtcttttagtggtggagttagcttagcttgcctatggggttgtatggcacattataagagattctatatatggtttcatctggtttaggtttagaattttcattttgaaagcaacattcagtccatacatgacttgagcatgctttctaaattgacatttttggtgtttacttgggctaaaaactaggattcttgcatttttctgccatgtgctgtttacaggtgaaattgtgttgttcagaaacaaactttggcatccgtttctcattctcctaactgcatttacatgtattcattttccttttggattgtagctgaaagcagtcctttcccacctagatgaataccttaatagattttacaatgttttgggagctaggaattgatgatacatccagaccttggtagttttaacaaggtcttccacacatgttctgatcaacaatcaagatggtagcactgtgtcttctatgaccacaaaccaattcttgttttcccttgacatcgataacataaacatagttgaattttgtcactttgtgaaagacatcaatataatccacaaggtaaatttcttaatctataaccactgtttgaaattggtagtctacaatctatttgatgctttaagtgaactttagaagtttatatcatttccaagaaaagtttacattaccttttccaattaatgttgactcaacatatataagtaactaccaaaatttatttggaatagaaattgaatattaacaaacaaaaaatatcttgtacttaaaatttgtatactaatataacagaactgcgacaaactcaatgatgggcacaaaagagctttgcacaatctcattccaggatcaacgactcatagatgtttttatcaacactgcacacattgtttgctgaaattagctcatgttattgatggtgtttgaaagaaacattaaagttttgcttcgacaaatgtcttttgctcagggcatctggcttggtgtttcttgtttggtgatacctgtacaagcaaatttggtgacctgctacttaaaaactgtttctgcaaagaggtcgtcttgactgatcgcaatgatgaagttctggagtgttgttgttatgatgaaggcagacccaagtattgaaagggatgatctgattttgctctaggagattgccatgtacatgcttcttgcatgtggagctgtctatgtgatcttgataagaaagatttgtggatgttgacccaacaggaaattgctactgaggtgcaaagtgaatccaagtgaaagtaattaggggagttagctatgtcaaatggaaagagagtggttgctaaaggataggaagctgaagctggatgaaggaagcaactacatgcaaccgatggcaataatgcattgcagggttgaggctcgttagaaatgtcaagttggtcccggacgtgggtatggtgcccgcaaggccgacagagctgagatcaagcactgagatcgtgccctcgtgcctacggctgcatgtcacacctggccagaggcataggctaccactactgttctaagaggacaacctgctcgatagctagcctaggatggccttcagttccagcaaggcttgtcggctcgtctcactgcagaacgctattgttggcgcctaattgaacgaagttgataccggtaggatcccatgaagcaacataagcagcagaagtctgacgaggaatgacatagatgcagtgctttcgtttgttgctactgaaaaaagatctgaaccaagtatttctgtaagtataccaacaagttagttgctactactttgtatattgatcttcgttggccgaatgtttgagtttttttcaaggcacaaacactttattttgagatctatc

SEQ ID NO: 74376 - DNA, 1328 bp, Zea Mays
atccaattttgggtccgcagaacctcctcctctcgctccgccgccgccttcccctcgcccaccacgctttggtcccaaacccacggtcgctcatcctggacctccacgccatcgaggcagtgaagctgggctcattcgtgcaatcgtgctcaagtctggcatcaactcccccatctaccgggacctccacgcgctcgtctcccacccacgcctgctctccgttgttgcctcgctcctccatatgcccggcctcgtctgcaacgtcccctacacagcgctcccgtcgtcgtcctctgcgtcgaccgctccatccccatgctcatgcgccgcaaggaggccaagccttacgacatgattgaggataggcactggagagtttgacttgcgatatttgagtacatcccattgctggcgctccgagtatctgggcatctggcttggtgtttcttgtttggtgatacctgtacaagcaaatttggtgacctgctacttaaaaactgtttctgcaaagaggtcgtcttgactgatcgcaatgatgaagttctggagtgttgttgttatgatgaaggcagacccaagtattgaaagggatgatctgattttgctctaggagattgccatgtacatgcttcttgcatgtggagctgtctatgtgatcttgataagaaagatttgtggatgttgacccaacaggaaattgctactgaggtgcaaagtgaatccaagtgaaagtaattaggggagttagctatgtcaaatggaaagagagtggttgctaaaggataggaagctgaagctggatgaaggaagcaactacatgcaaccgatggcaataatgcattgcagggttgaggctcgttagaaatgtcaagttggtcccggacgtgggtatggtgcccgcaaggccgacagagctgagatcaagcactgagatcgtgccctcgtgcctacggctgcatgtcacacctggccagaggcataggctaccactactgttctaagaggacaacctgctcgatagctagcctaggatggccttcagttccagcaaggcttgtcggctcgtctcactgcagaacgctattgttggcgcctaattgaacgaagttgataccggtaggatcccatgaagcaacataagcagcagaagtctgacgaggaatgacatagatgcagtgctttcgtttgttgctactgaaaaaagatctgaaccaagtatttctgtaagtataccaacaagttagttgctactactttgtatattgatcttcgttggccgaatgtttgagtttttttcaaggcacaaacactttattttgagatctatc

SEQ ID NO: 74377 - DNA, 3370 bp, Zea Mays
atccaattttgggtccgcagaacctcctcctctcgctccgccgccgccttcccctcgcccaccacgctttggtcccaaacccacggtcgctcatcctggacctccacgccatcgaggcagtgaagctgggctcattcgtgcaatcgtgctcaagtctggcatcaactcccccatctaccgggacctccacgcgctcgtctcccacccacgcctgctctccgttgttgcctcgctcctccatatgcccggcctcgtctgcaacgtcccctacacagcgctcccgtcgtcgtcctctgcgtcgaccgctccatccccatgctcatgcgccgcaaggaggccaagccttacgacatgattggtgagaccagaggagcacgagcgcaacctccgtcacccctaagatctcctcaccattgtggccatcctgcaagatcagtactcattatctattaagaaggttacggttagcttggtgtgtaagtgtgttggacaaatgaggtcccgtttttttactggatttatttgccttttcttttctgttttggatatttgaagtcttatttactagctattaatacattgtttttaagtcatcggccttgcaagcattgcctctttctttaaaattatctgatgactggtgaattctgttttgatcttttagattattggcattgaccttttatctcaaacgctgcgacccgtcattgttgaacttgcagaggataggcactggagagtttgacttgcgatatttgagtacatcccattgctggcgctccgagtatctggccatactattgattcacataccagctaaatttaggaccatcccgattgaaggctcttcccacttaagtgattcttccttctgaatccattttttagcttattcattcggattatgacccataattatgtttttttgtttgcttgaattcggtcaaacaaactgagaaaagcgtggatcctctgaagaatgtctgaaaaaaatgatagacaagtccctagatttaccccaatttcacttgctctatagatttatagttctataatatgtgcttccttatcaatctttgttactcaattatgctagataatcacttgtccttaatctaattaacagtgttgtcatcatagatgaagctgacaacttagttgattccttgaataagatatacaagtcaaagcttacatcttcttaggttactctcacctttcattaacctttccatcacagtctggcaaatagtattttgccttgtgccataggtcattatacttagttgcaattgtattgctttgtgtttcattcaatgaacataaacatctacattccatgttgtccattagttatgatttttgctggaacataaatggcatatagctctgtattttgtgtgcctgatgctcattcagtactattgtcaaagcacaaaagggagatttaggaatttatttggcttataaaggggcataaacaaagagggtcttttagtggtggagttagcttagcttgcctatggggttgtatggcacattataagagattctatatatggtttcatctggtttaggtttagaattttcattttgaaagcaacattcagtccatacatgacttgagcatgctttctaaattgacatttttggtgtttacttgggctaaaaactaggattcttgcatttttctgccatgtgctgtttacaggtgaaattgtgttgttcagaaacaaactttggcatccgtttctcattctcctaactgcatttacatgtattcattttccttttggattgtagctgaaagcagtcctttcccacctagatgaataccttaatagattttacaatgttttgggagctaggaattgatgatacatccagaccttggtagttttaacaaggtcttccacacatgttctgatcaacaatcaagatggtagcactgtgtcttctatgaccacaaaccaattcttgttttcccttgacatcgataacataaacatagttgaattttgtcactttgtgaaagacatcaatataatccacaaggtaaatttcttaatctataaccactgtttgaaattggtagtctacaatctatttgatgctttaagtgaactttagaagtttatatcatttccaagaaaagtttacattaccttttccaattaatgttgactcaacatatataagtaactaccaaaatttatttggaatagaaattgaatattaacaaacaaaaaatatcttgtacttaaaatttgtatactaatataacagaactgcgacaaactcaatgatgggcacaaaagagctttgcacaatctcattccaggatcaacgactcatagatgtttttatcaacactgcacacattgtttgctgaaattagctcatgttattgatggtgtttgaaagaaacattaaagttttgcttcgacaaatgtcttttgctcagggcatctggcttggtgtttcttgtttggtgatacctgtacaagcaaatttggtgacctgctacttaaaaactgtttctgcaaagaggtcgtcttgactgatcgcaatgatgaagttctggaggcaagtgttgttgttatgatgaaggcagacccaagtattgaaagggatgatctgattttgctctaggagattgccatgtacatgcttcttgcatgtggagctgtctatgtgatcttgataagaaagatttgtggatgttgacccaacaggaaattgctactgaggtgcaaagtgaatccaagtgaaagtaattaggggagttagctatgtcaaatggaaagagagtggttgctaaaggataggaagctgaagctggatgaaggaagcaactacatgcaaccgatggcaataatgcattgcagggttgaggctcgttagaaatgtcaagttggtcccggacgtgggtatggtgcccgcaaggccgacagagctgagatcaagcactgagatcgtgccctcgtgcctacggctgcatgtcacacctggccagaggcataggctaccactactgttctaagaggacaacctgctcgatagctagcctaggatggccttcagttccagcaaggcttgtcggctcgtctcactgcagaacgctattgttggcgcctaattgaacgaagttgataccggtaggatcccatgaagcaacataagcagcagaagtctgacgaggaatgacatagatgcagtgctttcgtttgttgctactgaaaaaagatctgaaccaagtatttctgtaagtataccaacaagttagttgctactactttgtatattgatcttcgttggccgaatgtttgagtttttttcaaggcacaaacactttattttgagatctatc

SEQ ID NO: 74378 - DNA, 1622 bp, Zea Mays
atccaattttgggtccgcagaacctcctcctctcgctccgccgccgccttcccctcgcccaccacgctttggtcccaaacccacggtcgctcatcctggacctccacgccatcgaggcagtgaagctgggctcattcgtgcaatcgtgctcaagtctggcatcaactcccccatctaccgggacctccacgcgctcgtctcccacccacgcctgctctccgttgttgcctcgctcctccatatgcccggcctcgtctgcaacgtcccctacacagcgctcccgtcgtcgtcctctgcgtcgaccgctccatccccatgctcatgcgccgcaaggaggccaagccttacgacatgattggtgagaccagaggagcacgagcgcaacctccgtcacccctaagatctcctcaccattgtggccatcctgcaagatcagtactcattatctattaagaaggttacggttagcttggtgtgtaagtgtgttggacaaatgaggtcccgtttttttactggatttatttgccttttcttttctgttttggatatttgaagtcttatttactagctattaatacattgtttttaagtcatcggccttgcaagcattgcctctttctttaaaattatctgatgactggtgaattctgttttgatcttttagattattggcattgaccttttatctcaaacgctgcgacccgtcattgttgaacttgcagaggataggcactggagagtttgacttgcgatatttgagtacatcccattgctggcgctccgagtatctgctgtttctgcaaagaggtcgtcttgactgatcgcaatgatgaagttctggagtgttgttgttatgatgaaggcagacccaagtattgaaagggatgatctgattttgctctaggagattgccatgtacatgcttcttgcatgtggagctgtctatgtgatcttgataagaaagatttgtggatgttgacccaacaggaaattgctactgaggtgcaaagtgaatccaagtgaaagtaattaggggagttagctatgtcaaatggaaagagagtggttgctaaaggataggaagctgaagctggatgaaggaagcaactacatgcaaccgatggcaataatgcattgcagggttgaggctcgttagaaatgtcaagttggtcccggacgtgggtatggtgcccgcaaggccgacagagctgagatcaagcactgagatcgtgccctcgtgcctacggctgcatgtcacacctggccagaggcataggctaccactactgttctaagaggacaacctgctcgatagctagcctaggatggccttcagttccagcaaggcttgtcggctcgtctcactgcagaacgctattgttggcgcctaattgaacgaagttgataccggtaggatcccatgaagcaacataagcagcagaagtctgacgaggaatgacatagatgcagtgctttcgtttgttgctactgaaaaaagatctgaaccaagtatttctgtaagtataccaacaagttagttgctactactttgtatattgatcttcgttggccgaatgtttgagtttttttcaaggcacaaacactttattttgagatctatc

SEQ ID NO: 74379 - DNA, 1689 bp, Zea Mays
atccaattttgggtccgcagaacctcctcctctcgctccgccgccgccttcccctcgcccaccacgctttggtcccaaacccacggtcgctcatcctggacctccacgccatcgaggcagtgaagctgggctcattcgtgcaatcgtgctcaagtctggcatcaactcccccatctaccgggacctccacgcgctcgtctcccacccacgcctgctctccgttgttgcctcgctcctccatatgcccggcctcgtctgcaacgtcccctacacagcgctcccgtcgtcgtcctctgcgtcgaccgctccatccccatgctcatgcgccgcaaggaggccaagccttacgacatgattggtgagaccagaggagcacgagcgcaacctccgtcacccctaagatctcctcaccattgtggccatcctgcaagatcagtactcattatctattaagaaggttacggttagcttggtgtgtaagtgtgttggacaaatgaggtcccgtttttttactggatttatttgccttttcttttctgttttggatatttgaagtcttatttactagctattaatacattgtttttaagtcatcggccttgcaagcattgcctctttctttaaaattatctgatgactggtgaattctgttttgatcttttagattattggcattgaccttttatctcaaacgctgcgacccgtcattgttgaacttgcagaggataggcactggagagtttgacttgcgatatttgagtacatcccattgctggcgctccgagtatctggccatactattgattcacataccagctaaatttaggaccatcccgattgaaggctcttcccacttaactgtttctgcaaagaggtcgtcttgactgatcgcaatgatgaagttctggagtgttgttgttatgatgaaggcagacccaagtattgaaagggatgatctgattttgctctaggagattgccatgtacatgcttcttgcatgtggagctgtctatgtgatcttgataagaaagatttgtggatgttgacccaacaggaaattgctactgaggtgcaaagtgaatccaagtgaaagtaattaggggagttagctatgtcaaatggaaagagagtggttgctaaaggataggaagctgaagctggatgaaggaagcaactacatgcaaccgatggcaataatgcattgcagggttgaggctcgttagaaatgtcaagttggtcccggacgtgggtatggtgcccgcaaggccgacagagctgagatcaagcactgagatcgtgccctcgtgcctacggctgcatgtcacacctggccagaggcataggctaccactactgttctaagaggacaacctgctcgatagctagcctaggatggccttcagttccagcaaggcttgtcggctcgtctcactgcagaacgctattgttggcgcctaattgaacgaagttgataccggtaggatcccatgaagcaacataagcagcagaagtctgacgaggaatgacatagatgcagtgctttcgtttgttgctactgaaaaaagatctgaaccaagtatttctgtaagtataccaacaagttagttgctactactttgtatattgatcttcgttggccgaatgtttgagtttttttcaaggcacaaacactttattttgagatctatc

SEQ ID NO: 74380 - DNA, 3246 bp, Zea Mays
atccaattttgggtccgcagaacctcctcctctcgctccgccgccgccttcccctcgcccaccacgctttggtcccaaacccacggtcgctcatcctggacctccacgccatcgaggcagtgaagctgggctcattcgtgcaatcgtgctcaagtctggcatcaactcccccatctaccgggacctccacgcgctcgtctcccacccacgcctgctctccgttgttgcctcgctcctccatatgcccggcctcgtctgcaacgtcccctacacagcgctcccgtcgtcgtcctctgcgtcgaccgctccatccccatgctcatgcgccgcaaggaggccaagccttacgacatgattgaggataggcactggagagtttgacttgcgatatttgagtacatcccattgctggcgctccgagtatctggccatactattgattcacataccagctaaatttaggaccatcccgattgaaggctcttcccacttaagtgattcttccttctgaatccattttttagcttattcattcggattatgacccataattatgtttttttgtttgcttgaattcggtcaaacaaactgagaaaagcgtggatcctctgaagaatgtctgaaaaaaatgatagacaagtccctagatttaccccaatttcacttgctctatagatttatagttctataatatgtgcttccttatcaatctttgttactcaattatgctagataatcacttgtccttaatctaattaacagtgttgtcatcatagatgaagctgacaacttagttgattccttgaataagatatacaagtcaaagcttacatcttcttaggttactctcacctttcattaacctttccatcacagtctggcaaatagtattttgccttgtgccataggtcattatacttagttgcaattgtattgctttgtgtttcattcaatgaacataaacatctacattccatgttgtccattagttatgatttttgctggaacataaatggcatatagctctgtattttgtgtgcctgatgctcattcagtactattgtcaaagcacaaaagggagatttaggaatttatttggcttataaaggggcataaacaaagagggtcttttagtggtggagttagcttagcttgcctatggggttgtatggcacattataagagattctatatatggtttcatctggtttaggtttagaattttcattttgaaagcaacattcagtccatacatgacttgagcatgctttctaaattgacatttttggtgtttacttgggctaaaaactaggattcttgcatttttctgccatgtgctgtttacaggtgaaattgtgttgttcagaaacaaactttggcatccgtttctcattctcctaactgcatttacatgtattcattttccttttggattgtagctgaaagcagtcctttcccacctagatgaataccttaatagattttacaatgttttgggagctaggaattgatgatacatccagaccttggtagttttaacaaggtcttccacacatgttctgatcaacaatcaagatggtagcactgtgtcttctatgaccacaaaccaattcttgttttcccttgacatcgataacataaacatagttgaattttgtcactttgtgaaagacatcaatataatccacaaggtaaatttcttaatctataaccactgtttgaaattggtagtctacaatctatttgatgctttaagtgaactttagaagtttatatcatttccaagaaaagtttacattaccttttccaattaatgttgactcaacatatataagtaactaccaaaatttatttggaatagaaattgaatattaacaaacaaaaaatatcttgtacttaaaatttgtatactaatataacagaactgcgacaaactcaatgatgggcacaaaagagctttgcacaatctcattccaggatcaacgactcatagatgtttttatcaacactgcacacattgtttgctgaaattagctcatgttattgatggtgtttgaaagaaacattaaagttttgcttcgacaaatgtcttttgctcagggcatctggcttggtgtttcttgtttggtgatacctgtacaagcaaatttggtgacctgctacttaaaaactgtttctgcaaagaggtcgtcttgactgatcgcaatgatgaagttctggagtgttgttgttatgatgaaggcagacccaagtattgaaagggatgatctgattttgctctaggagattgccatgtacatgcttcttgcatgtggagctgtctatgtgatcttgataagaaagatttgtggatgttgacccaacaggaaattgctactgaggtgcaaagtgaatccaagtgaaagtaattaggggagttagctatgtcaaatggaaagagagtggttgctaaaggataggaagctgaagctggatgaaggaagcaactacatgcaaccgatggcaataatgcattgcagggttgaggctcgttagaaatgtcaagttggtcccggacgtgggtatggtgcccgcaaggccgacagagctgagatcaagcactgagatcgtgccctcgtgcctacggctgcatgtcacacctggccagaggcataggctaccactactgttctaagaggacaacctgctcgatagctagcctaggatggccttcagttccagcaaggcttgtcggctcgtctcactgcagaacgctattgttggcgcctaattgaacgaagttgataccggtaggatcccatgaagcaacataagcagcagaagtctgacgaggaatgacatagatgcagtgctttcgtttgttgctactgaaaaaagatctgaaccaagtatttctgatcactgcgttgaaaaggaaaaaaagagagacaaaaccagaaaaaaggaggaaaactggctatatgggcctaccttggcccactgcggggatgcgacccactgcaaaagccggcccgcgcgcggccttctcgcacagaggcggtggtcacattccaatcagaatcctataattattagtaataactcgcagcctatgtgtactgttttctattgttcattggactcgatcggtttgcgctcaacactcctaggagtttttcttcttcttcttcttgtttcttggatgcatgcttgctagttgctacgtaacacttctttttaatgcaagtaacttattagcgttgcctg

SEQ ID NO: 74381 - DNA, 4515 bp, Zea Mays
atccaattttgggtccgcagaacctcctcctctcgctccgccgccgccttcccctcgcccaccacgctttggtcccaaacccacggtcgctcatcctggacctccacgccatcgaggcagtgaagctgggctcattcgtgcaatcgtgctcaagtctggcatcaactcccccatctaccgggacctccacgcgctcgtctcccacccacgcctgctctccgttgttgcctcgctcctccatatgcccggcctcgtctgcaacgtcccctacacagcgctcccgtcgtcgtcctctgcgtcgaccgctccatccccatgctcatgcgccgcaaggaggccaagccttacgacatgattgaggataggcactggagagtttgacttgcgatatttgagtacatcccattgctggcgctccgagtatctggtatcttgttctattgttgctaccctgattcttcatcacctatgaccgtgatagtgcttaccctattgagtgcctaactcagtttagtgcataagcgtgctcttttgatatatagtttatgactttgccatcagctgttttgatgtattcctatgcttacaaattctataatgttaactgtatatgtttccttacatcttaattcatcgtgtttcccattgcacggtttattccctacatttccctgtcctacatttggtacttgattacttgttagaaggtgcaaatcagctcctcaattgctgtgagatcaatacaatttaatcattaatgattattttttgttacacattatcttttattacaaattaactcgagtccactgatctgagctgaaaagcttaagagtcctctctgggtatgcttaagtgttagtagtaccggtttcctgaaaaaaaagaggggctaataatttcaagctcttttcatatagttctataattatgtgccgttgtgaacgtcgccttcttcatttcctacctgtgcgatccccttttaattgagttttcacagttgccggtatattttttgtcgcatcaaccttaagaactccatgtattaaggttgtaggatattattgttggattaggtgaactataatcaaaacaaaaaaaatatccagatactctcataattatgtgaatattttttctcaaatcaagtaggagaactgcttgtcatttcattgagaggaagaaaattaagtacatctaaaggaaaggatcctcaaatactagaagaaaataagtacatctagaagacattattagttgtagggatacacgcctgaggacaacaatcaaaagccctatgccgccatcctcaaggtctatgatcatatcagggaccaaacgttgccgaataaactgctgatatgtttagtttcatgaaattttaattttacttgattcatttgtaggattgaatagatttcgctgaacttgaagggttggttactattggtgttcttttaccatgaaatatgagatcaggctaggttttggctgtagcattttcgtattgacgttgtgcttagactataattcacctttatttacatccatggattagttgttgtattggtcagtttgctcatatcctctttctttttgttttgttttggatttttggactttggttgctttagatctgtgagctgctacttgtattttaaattgatcacaaaccgcttactgcaatgcaggccatactattgattcacataccagctaaatttaggaccatcccgattgaaggctcttcccacttaagtgattcttccttctgaatccattttttagcttattcattcggattatgacccataattatgtttttttgtttgcttgaattcggtcaaacaaactgagaaaagcgtggatcctctgaagaatgtctgaaaaaaatgatagacaagtccctagatttaccccaatttcacttgctctatagatttatagttctataatatgtgcttccttatcaatctttgttactcaattatgctagataatcacttgtccttaatctaattaacagtgttgtcatcatagatgaagctgacaacttagttgattccttgaataagatatacaagtcaaagcttacatcttcttaggttactctcacctttcattaacctttccatcacagtctggcaaatagtattttgccttgtgccataggtcattatacttagttgcaattgtattgctttgtgtttcattcaatgaacataaacatctacattccatgttgtccattagttatgatttttgctggaacataaatggcatatagctctgtattttgtgtgcctgatgctcattcagtactattgtcaaagcacaaaagggagatttaggaatttatttggcttataaaggggcataaacaaagagggtcttttagtggtggagttagcttagcttgcctatggggttgtatggcacattataagagattctatatatggtttcatctggtttaggtttagaattttcattttgaaagcaacattcagtccatacatgacttgagcatgctttctaaattgacatttttggtgtttacttgggctaaaaactaggattcttgcatttttctgccatgtgctgtttacaggtgaaattgtgttgttcagaaacaaactttggcatccgtttctcattctcctaactgcatttacatgtattcattttccttttggattgtagctgaaagcagtcctttcccacctagatgaataccttaatagattttacaatgttttgggagctaggaattgatgatacatccagaccttggtagttttaacaaggtcttccacacatgttctgatcaacaatcaagatggtagcactgtgtcttctatgaccacaaaccaattcttgttttcccttgacatcgataacataaacatagttgaattttgtcactttgtgaaagacatcaatataatccacaaggtaaatttcttaatctataaccactgtttgaaattggtagtctacaatctatttgatgctttaagtgaactttagaagtttatatcatttccaagaaaagtttacattaccttttccaattaatgttgactcaacatatataagtaactaccaaaatttatttggaatagaaattgaatattaacaaacaaaaaatatcttgtacttaaaatttgtatactaatataacagaactgcgacaaactcaatgatgggcacaaaagagctttgcacaatctcattccaggatcaacgactcatagatgtttttatcaacactgcacacattgtttgctgaaattagctcatgttattgatggtgtttgaaagaaacattaaagttttgcttcgacaaatgtcttttgctcagggcatctggcttggtgtttcttgtttggtgatacctgtacaagcaaatttggtgacctgctacttaaaaactgtttctgcaaagaggtcgtcttgactgatcgcaatgatgaagttctggaggcaagtgttgttgttatgatgaaggcagacccaagtattgaaagggatgatctgattttgctctaggagattgccatgtacatgcttcttgcatgtggagctgtctatgtgatcttgataagaaagatttgtggatgttgacccaacaggaaattgctactgaggtgcaaagtgaatccaagtgaaagtaattaggggagttagctatgtcaaatggaaagagagtggttgctaaaggataggaagctgaagctggatgaaggaagcaactacatgcaaccgatggcaataatgcattgcagggttgaggctcgttagaaatgtcaagttggtcccggacgtgggtatggtgcccgcaaggccgacagagctgagatcaagcactgagatcgtgccctcgtgcctacggctgcatgtcacacctggccagaggcataggctaccactactgttctaagaggacaacctgctcgatagctagcctaggatggccttcagttccagcaaggcttgtcggctcgtctcactgcagaacgctattgttggcgcctaattgaacgaagttgataccggtaggatcccatgaagcaacataagcagcagaagtctgacgaggaatgacatagatgcagtgctttcgtttgttgctactgaaaaaagatctgaaccaagtatttctgatcactgcgttgaaaaggaaaaaaagagagacaaaaccagaaaaaaggaggaaaactggctatatgggcctaccttggcccactgcggggatgcgacccactgcaaaagccggcccgcgcgcggccttctcgcacagaggcggtggtcacattccaatcagaatcctataattattagtaataactcgcagcctatgtgtactgttttctattgttcattggactcgatcggtttgcgctcaacactcctaggagtttttcttcttcttcttcttgtttcttggatgcatgcttgctagttgctacgtaacacttctttttaatgcaagtaacttattagcgttgcctg

SEQ ID NO: 74382 - DNA, 3732 bp, Zea Mays
atccaattttgggtccgcagaacctcctcctctcgctccgccgccgccttcccctcgcccaccacgctttggtcccaaacccacggtcgctcatcctggacctccacgccatcgaggcagtgaagctgggctcattcgtgcaatcgtgctcaagtctggcatcaactcccccatctaccgggacctccacgcgctcgtctcccacccacgcctgctctccgttgttgcctcgctcctccatatgcccggcctcgtctgcaacgtcccctacacagcgctcccgtcgtcgtcctctgcgtcgaccgctccatccccatgctcatgcgccgcaaggaggccaagccttacgacatgattgaggataggcactggagagtttgacttgcgatatttgagtacatcccattgctggcgctccgagtatctggccatactattgattcacataccagctaaatttaggaccatcccgattgaaggctcttcccacttaagtgattcttccttctgaatccattttttagcttattcattcggattatgacccataattatgtttttttgtttgcttgaattcggtcaaacaaactgagaaaagcgtggatcctctgaagaatgtctgaaaaaaatgatagacaagtccctagatttaccccaatttcacttgctctatagatttatagttctataatatgtgcttccttatcaatctttgttactcaattatgctagataatcacttgtccttaatctaattaacagtgttgtcatcatagatgaagctgacaacttagttgattccttgaataagatatacaagtcaaagcttacatcttcttaggttactctcacctttcattaacctttccatcacagtctggcaaatagtattttgccttgtgccataggtcattatacttagttgcaattgtattgctttgtgtttcattcaatgaacataaacatctacattccatgttgtccattagttatgatttttgctggaacataaatggcatatagctctgtattttgtgtgcctgatgctcattcagtactattgtcaaagcacaaaagggagatttaggaatttatttggcttataaaggggcataaacaaagagggtcttttagtggtggagttagcttagcttgcctatggggttgtatggcacattataagagattctatatatggtttcatctggtttaggtttagaattttcattttgaaagcaacattcagtccatacatgacttgagcatgctttctaaattgacatttttggtgtttacttgggctaaaaactaggattcttgcatttttctgccatgtgctgtttacaggtgaaattgtgttgttcagaaacaaactttggcatccgtttctcattctcctaactgcatttacatgtattcattttccttttggattgtagctgaaagcagtcctttcccacctagatgaataccttaatagattttacaatgttttgggagctaggaattgatgatacatccagaccttggtagttttaacaaggtcttccacacatgttctgatcaacaatcaagatggtagcactgtgtcttctatgaccacaaaccaattcttgttttcccttgacatcgataacataaacatagttgaattttgtcactttgtgaaagacatcaatataatccacaaggtaaatttcttaatctataaccactgtttgaaattggtagtctacaatctatttgatgctttaagtgaactttagaagtttatatcatttccaagaaaagtttacattaccttttccaattaatgttgactcaacatatataagtaactaccaaaatttatttggaatagaaattgaatattaacaaacaaaaaatatcttgtacttaaaatttgtatactaatataacagaactgcgacaaactcaatgatgggcacaaaagagctttgcacaatctcattccaggatcaacgactcatagatgtttttatcaacactgcacacattgtttgctgaaattagctcatgttattgatggtgtttgaaagaaacattaaagttttgcttcgacaaatgtcttttgctcagggcatctggcttggtgtttcttgtttggtgatacctgtacaagcaaatttggtgacctgctacttaaaaagtccgtgtttggtttacttgcttgttggcaccattgcaaaattgcatgttccttgtttggttgtatgaaaactgactatattatgacttgttgtatgcattattggtgtattatgcagctgtttctgcaaagaggtcgtcttgactgatcgcaatgatgaagttctggaggcaaggttcagttgtttaggaattcattcactgatacatcttattattcagttgaagcgccacatatattggtagataaatgctactgatacattcaagtgatgaaccagtccattcatgagctaataagtgcagtaatcagtacaccgcagagagcataaacatacccaactattatggtggtggtggctatattatatgttatataacatgctgcataactgttaagatcatgaacattttagatgttgaataccttgcttgcaaggagtgtcacgaataccgaaacttgttctcgcacatgctgaatcgtatcacattcctattcctctgtctatttcagcccttctatttttggtttctggcagtgttgttgttatgatgaaggcagacccaagtattgaaagggatgatctgattttgctctaggagattgccatgtacatgcttcttgcatgtggagctgtctatgtgatcttgataagaaagatttgtggatgttgacccaacaggaaattgctactgaggtgcaaagtgaatccaagtgaaagtaattaggggagttagctatgtcaaatggaaagagagtggttgctaaaggataggaagctgaagctggatgaaggaagcaactacatgcaaccgatggcaataatgcattgcagggttgaggctcgttagaaatgtcaagttggtcccggacgtgggtatggtgcccgcaaggccgacagagctgagatcaagcactgagatcgtgccctcgtgcctacggctgcatgtcacacctggccagaggcataggctaccactactgttctaagaggacaacctgctcgatagctagcctaggatggccttcagttccagcaaggcttgtcggctcgtctcactgcagaacgctattgttggcgcctaattgaacgaagttgataccggtaggatcccatgaagcaacataagcagcagaagtctgacgaggaatgacatagatgcagtgctttcgtttgttgctactgaaaaaagatctgaaccaagtatttctgatcactgcgttgaaaaggaaaaaaagagagacaaaaccagaaaaaaggaggaaaactggctatatgggcctaccttggcccactgcggggatgcgacccactgcaaaagccggcccgcgcgcggccttctcgcacagaggcggtggtcacattccaatcagaatcctataattattagtaataactcgcagcctatgtgtactgttttctattgttcattggactcgatcggtttgcgctcaacactcctaggagtttttcttcttcttcttcttgtttcttggatgcatgcttgctagttgctacgtaacacttctttttaatgcaagtaacttattagcgttgcctg

SEQ ID NO: 74383 - DNA, 1645 bp, Zea Mays
atccaattttgggtccgcagaacctcctcctctcgctccgccgccgccttcccctcgcccaccacgctttggtcccaaacccacggtcgctcatcctggacctccacgccatcgaggcagtgaagctgggctcattcgtgcaatcgtgctcaagtctggcatcaactcccccatctaccgggacctccacgcgctcgtctcccacccacgcctgctctccgttgttgcctcgctcctccatatgcccggcctcgtctgcaacgtcccctacacagcgctcccgtcgtcgtcctctgcgtcgaccgctccatccccatgctcatgcgccgcaaggaggccaagccttacgacatgattgaggataggcactggagagtttgacttgcgatatttgagtacatcccattgctggcgctccgagtatctggccatactattgattcacataccagctaaatttaggaccatcccgattgaaggctcttcccacttaaggcatctggcttggtgtttcttgtttggtgatacctgtacaagcaaatttggtgacctgctacttaaaaactgtttctgcaaagaggtcgtcttgactgatcgcaatgatgaagttctggaggcaagtgttgttgttatgatgaaggcagacccaagtattgaaagggatgatctgattttgctctaggagattgccatgtacatgcttcttgcatgtggagctgtctatgtgatcttgataagaaagatttgtggatgttgacccaacaggaaattgctactgaggtgcaaagtgaatccaagtgaaagtaattaggggagttagctatgtcaaatggaaagagagtggttgctaaaggataggaagctgaagctggatgaaggaagcaactacatgcaaccgatggcaataatgcattgcagggttgaggctcgttagaaatgtcaagttggtcccggacgtgggtatggtgcccgcaaggccgacagagctgagatcaagcactgagatcgtgccctcgtgcctacggctgcatgtcacacctggccagaggcataggctaccactactgttctaagaggacaacctgctcgatagctagcctaggatggccttcagttccagcaaggcttgtcggctcgtctcactgcagaacgctattgttggcgcctaattgaacgaagttgataccggtaggatcccatgaagcaacataagcagcagaagtctgacgaggaatgacatagatgcagtgctttcgtttgttgctactgaaaaaagatctgaaccaagtatttctgatcactgcgttgaaaaggaaaaaaagagagacaaaaccagaaaaaaggaggaaaactggctatatgggcctaccttggcccactgcggggatgcgacccactgcaaaagccggcccgcgcgcggccttctcgcacagaggcggtggtcacattccaatcagaatcctataattattagtaataactcgcagcctatgtgtactgttttctattgttcattggactcgatcggtttgcgctcaacactcctaggagtttttcttcttcttcttcttgtttcttggatgcatgcttgctagttgctacgtaacacttctttttaatgcaagtaacttattagcgttgcctg

SEQ ID NO: 74384 - DNA, 1640 bp, Zea Mays
atccaattttgggtccgcagaacctcctcctctcgctccgccgccgccttcccctcgcccaccacgctttggtcccaaacccacggtcgctcatcctggacctccacgccatcgaggcagtgaagctgggctcattcgtgcaatcgtgctcaagtctggcatcaactcccccatctaccgggacctccacgcgctcgtctcccacccacgcctgctctccgttgttgcctcgctcctccatatgcccggcctcgtctgcaacgtcccctacacagcgctcccgtcgtcgtcctctgcgtcgaccgctccatccccatgctcatgcgccgcaaggaggccaagccttacgacatgattgaggataggcactggagagtttgacttgcgatatttgagtacatcccattgctggcgctccgagtatctggccatactattgattcacataccagctaaatttaggaccatcccgattgaaggctcttcccacttaaggcatctggcttggtgtttcttgtttggtgatacctgtacaagcaaatttggtgacctgctacttaaaaactgtttctgcaaagaggtcgtcttgactgatcgcaatgatgaagttctggagtgttgttgttatgatgaaggcagacccaagtattgaaagggatgatctgattttgctctaggagattgccatgtacatgcttcttgcatgtggagctgtctatgtgatcttgataagaaagatttgtggatgttgacccaacaggaaattgctactgaggtgcaaagtgaatccaagtgaaagtaattaggggagttagctatgtcaaatggaaagagagtggttgctaaaggataggaagctgaagctggatgaaggaagcaactacatgcaaccgatggcaataatgcattgcagggttgaggctcgttagaaatgtcaagttggtcccggacgtgggtatggtgcccgcaaggccgacagagctgagatcaagcactgagatcgtgccctcgtgcctacggctgcatgtcacacctggccagaggcataggctaccactactgttctaagaggacaacctgctcgatagctagcctaggatggccttcagttccagcaaggcttgtcggctcgtctcactgcagaacgctattgttggcgcctaattgaacgaagttgataccggtaggatcccatgaagcaacataagcagcagaagtctgacgaggaatgacatagatgcagtgctttcgtttgttgctactgaaaaaagatctgaaccaagtatttctgatcactgcgttgaaaaggaaaaaaagagagacaaaaccagaaaaaaggaggaaaactggctatatgggcctaccttggcccactgcggggatgcgacccactgcaaaagccggcccgcgcgcggccttctcgcacagaggcggtggtcacattccaatcagaatcctataattattagtaataactcgcagcctatgtgtactgttttctattgttcattggactcgatcggtttgcgctcaacactcctaggagtttttcttcttcttcttcttgtttcttggatgcatgcttgctagttgctacgtaacacttctttttaatgcaagtaacttattagcgttgcctg

SEQ ID NO: 74385 - DNA, 832 bp, Zea Mays
ggaattcattcactgatacatcttattattcagttgaagcgccacatatattgtgttgttgttatgatgaaggcagacccaagtattgaaagggatgatctgattttgctctaggagattgccatgtacatgcttcttgcatgtggagctgtctatgtgatcttgataagaaagatttgtggatgttgacccaacaggaaattgctactgaggtgcaaagtgaatccaagtgaaagtaattaggggagttagctatgtcaaatggaaagagagtggttgctaaaggataggaagctgaagctggatgaaggaagcaactacatgcaaccgatggcaataatgcattgcagggttgaggctcgttagaaatgtcaagttggtcccggacgtgggtatggtgcccgcaaggccgacagagctgagatcaagcactgagatcgtgccctcgtgcctacggctgcatgtcacacctggccagaggcataggctaccactactgttctaagaggacaacctgctcgatagctagcctaggatggccttcagttccagcaaggcttgtcggctcgtctcactgcagaacgctattgttggcgcctaattgaacgaagttgataccggtaggatcccatgaagcaacataagcagcagaagtctgacgaggaatgacatagatgcagtgctttcgtttgttgctactgaaaaaagatctgaaccaagtatttctgtaagtataccaacaagttagttgctactactttgtatattgatcttcgttggccgaatgtttgagtttttttcaaggcacaaacactttattttgagatctatc

SEQ ID NO: 74386 - DNA, 359 bp, Zea Mays
ccccactccgcccacttatattcataaaaccaccccacccacccctttcttttctcttcttttcctatcctatcctttctctctctcttgcaaccttcctccttcctccagttccagaggagagagacgcgagaagctttctcgctctactagtctctctctaccatcccttttcttcttcctctcctctctctcttccatgtcactgtcctaggctgaagaaatcgcaataaaaatcgctagactagcagcagcagcagggcaggaagcgagtgattaggggggtagatagagagagagacaggacgctctactgcactagctgcgcaactcagagaagatactccaataccctcttg

SEQ ID NO: 74387 - DNA, 1773 bp, Zea Mays
agctccccactctctctccgctgctgcctccgcggacggattccatccccggccctataagtgtggcttcgggacggcgcttcccatccgacaccggcgccttcgcggactgggtcgcctcctccgccgccgcggcgcgcggggacgacctctccctcggcttcaatgccagcgcggcggccgccgcggccgcggccgcctccggcgcctcgctgggcgcgggcctctggggcccggcgtcctccgcctccgccgccatgcgccaggcggccgccatgaactacgggatggccgacgtggggatggtcgtcgtcgcgcccgccgcctccttccaccacacgcaccaccaccaccaccaccacgaggccgccgccgccgccgccgcggctgcggcggcctccggcgaccccatcttcccgctgctctccggcggcccctgcgtgcttgatccggacaagtcggcctccgccagcgccatccagttctggcagcagcagcctccgccgccgtcgtcgccggctgctgcagcgggcgctaaccctaaccctagcgccagccccttcgcctacctcaagaagcccctcccgatgctggacgccggcgccggctcctcaggctccggcgccaccacgtgccaggactgcggcaaccaagcgaagaaggactgcggccacaaccggtgccgcacctgctgcaagagccgcggcttcgactgcaacacgcacgtcaagagcacctgggtccccgccgcccgccgccgcgagcgccagcagctcgccgcctccggctccgcctcgtcctcccccgccaccgcctccgcggcggccgtcgccgcgtccgcgtccgcgtccgcgtccaagaagccccgcctcctctcgtcgcagaccaccacctcgcacacgtccacctccaacgccacgacgccccgaagcttcgacaccacgtccagccaccaagggacagcctcccgaggcaggtgcgcgcgccggcggtgttcaagtgcgtgcgcgtgacgtccatcgaggacggcgaggacgagtacgcgtaccaggcgacggtcaccatcaacggccacctcttcaaggggttcctgtacgaccagggccccgacgacgggcgccacgcggccaccagcaacgacgactgcacggccggcggggtgcccaacatctccgagctccatctcggagcggcgtctggttccggcgccggcaccggcacctcgatgtcgatggctcctcccacggggctgtacggtggcggtggcggaggacatcatccgcacattctcggcgggtcgtcgagctacggtaacaccatgaactgatggagtacgttccttccttgtacaccggaagagtcccggcccgttaatttccattccttgttgctcttcattttccacgctatagtagcagagttcaattttctcagccttgtcactcacccggcgccatagatagcagggcatcaatgcatggtgttattctgttctacctccttcattccatcgtcctactgtgttatttagccattcgttggtgtataataacatcgatgagttgttttttcttcttcttccagttgttctactgctatagcaagtactgcactgctagttcttttcccccctatcacactagttgggtacgtacgtagagaggagaataattgttagtaggaattgggaagaagatactctcggtagtgcaaagattaaattttttaccattgtgcataagatatcgcctgctagctggttcccaatgcctg

SEQ ID NO: 74388 - DNA, 1313 bp, Zea Mays
tataaagaggccaaacccgtccgtcgctcacgcagtcacgagcgctgccactgcgcgcgcgccatggtcgtcgtcctccgatccagcacaagaccacagctagatcgagggactagtagtggaccactaccacacatttgcttgcaggacaggtacctcgaacgtacgctagctccctaggtcgttgttggtgactactaccaagctatagctagcgaaggcggcggaagagaagtcgatcaggcgccggccgggcgagaccatgtcgcgccaccggcggcagccatcccgcgcgctccctctcgatttcaatctcgacgacgacgacgatacggcggcagccaaatgcggcgccacgtctctcgtcgacgtcgacgggagccagaaccctcgtccaggtggcagcggggatggcaaagggcaggacgacgacgaagaagaagccgccgccggccactggcagccggactccgccggatgggaccggcggcaacaagccgctggccgacggcgccagccgcggacgtcgttgagtcaagaccgacaacgccgccgccggcgcagctagctagctagcagctgactgtgactgcacgtacgtacgggtacggcgctatgttttttgatccattcctatgtgtgtcctagggcctgtttggttcagcttttttctgaccagcttttctgaaaatctggctgtgaggagaatctggctgtggggagaatctgaatatcattacgattacgtgtggaggaagataaaattgttcatagggctcaggatctagaaagtgacgaattcctactattacaacgactcaactgattatgtgtttatgttgattttggatggtttttgccccccaacaaattttatagaagctggctgaaaagctgagcgtttggcagtccgcagcagcttttggtggccagaagctaccagaagccaaaacaaacaggccacacggacctgcgctgcgctcccaaagtattcagtacccacactcctctccccagcccacacggacggtacggtgttactgttaaccagagcataggacatgctaatgatgctaagctgttcttttggcacgtggaagtggaagctgctctccatcagtttatctatcgccacacccatattcaaacttaccgttcaaaacagtgttttgtatgattatataggtggtcatgatctaaggcaaacaaatttatattctcataaaaaatcatgatacattaaagtgttgggttgatctctggttagtttttcgtgcctgtcatgatctattgatctactacctagatccgaa

SEQ ID NO: 74389 - DNA, 2084 bp, Zea Mays
agcgtcacgcactaggagaagacggggtagttgtggttgtagccttgtaggtgtagcgtaggccatggcgccagcatcccgcccttcacgccaagccaagccaagccaagccgaccgaccgaatcggaatacggagcccccggtttcttcgccacctactcctgacttttggaaccaaggggactgacagcaagattgcaagaagcaaggaacaagtatagtggatcatctggtgtggaagcaaggactcgcgtgcacagcacactccccgtgctctgctctctgctccgctcttgcattgcaagccactacaaaaacttggcgtctactacctgtgttctgctctctccctcaacgcttgagatcgatcgagacacaagcacaacaacctctctctctctctctctctctctctctctctctctctctctatctctccgtgactgccatggagttgccggtgagctttctgcgcgaccaaggcggaggaggaggagcagaggagcagagcggcacccagctggagcacgaggaggatgtcccctgcgtgctggacatcttcgtgcacgaggcgcggggcacccacaagaccatccgcgtctacggggaccaccaggacgtgtacgcgaggctggcgctgacgtcggcgcccgaggccggcgccagcgcgcgtctcggcgagcgcctcccgccgctgcgcgtcgcccgcgggaggctggccgtggacgtgctcaagtgcgagctctggatgcgcagcgggggcgtcccggacgaccagctcctcggcttcgcgctcgtgccgctcgccgccgtcgccgcggccgacggcgccagggtcatcgcggccgacttcgagctctcgtccaccgacctcctccactcgcccgcgggcgccgtgcgcctctcgctcgccctccgtccggggcacgccgacgcgtgcgagccgtcggaggcggccgtcctcggcctcggccccgcgcccatggccgttgaccttgaccactcgaggatcgagttcacggaccttagagttagagtggagcaggagaagtcggcgtcctctgacggtgacggcagcaccagccggaacgctgccgcctcgacggccagcacggtgagcgaggaggacagggcgttctcttcttccgccgaggcggcacagcagccgcccgacgtcgaggaggccaccacggcgtcggcgcccgtgtcccggcgctcgccggacacgccgacttcgcgcggcgggaaggccaaggccaaggccgacgtcgacgtgctcccgtccccggccggggacatcgtcgacgtggaggcggagcagagcgcgatgcagcggcagatcatggagatgtacgtgaagagcatgcagcagttcagcgagtcgctggccaagatgcagctgccggttgcgctcggcggcggcggcggcgtagtagagaaggaagagacgcccgatgacaagaaggtgatcgagcggcagcaggggaagaaggacggggcaagggtgttctacgggagcagagctttcttctgaactggtaaaaaaaagataccagggaaaaatgacataatctcttgcaaacttgttcgagttcggcatagcattcatcccatcccatggtttgttcatcattagtttccgcttgcccattcgtattcgtaacttaattcattcgattaagtagaacaagatcacataatttaggagagagtaacatgtacttacgtgagtttttacggactcgcttcggagacaagcgacggggaaaagcgagattttacccgtgtcactgagaatctgattatcagtacaaatgcggctaacatacttgaagctgcgtttgggagaatccaatgaagcaaaattcgtttggcagggttattcccgattctcgcttttcttcgtccagaagctgattataatcgtatccaaacatgcccagaatttgacggtctgttgccaaagatgtttagatgtgtacaaatgaaagggctattaggatatctgcaagtcgtgattagggatgacaacagataattcaccgtcaggttttacctcctccaatctccgttctcgtgacgag

SEQ ID NO: 74390 - DNA, 5090 bp, Zea Mays
  misc_feature (5089)..(5090): n is a, c, g, or t
gaaactgcctctaaagctaaagctactctcgctccatcaaaccaaccctcccaccatcaccaaagatatatactattactacatagttaacaaactttatctgcctcctgtcctgctaatctatatatcccctctccactactgctaccttctctcgcgcgtctctgctcaaagaataatgtcagcgtagcctagctagctcatagggattcctctttcatccctcctgagatcgacgatctcaccaattaagaacacacacgcacacagcagctacgtacgtacctagctagctagcatgatggaccatcagctgttcgacgaccccttcgggagcagcatctcgtcgctggaggcggaaatcttctccgccgccgcccagctgccgccgtcgccgccgtggccagacatcgacctcgacgacgactacgacatccacgacctctccgcgccggccgccaacgccgctacgtcctcgggcggcggctacggctccggcggctccggcggccacaggaagctcagccacaacgcgtacgagcgcggccgccggaagcagctcaacgagctctactcctccctccgctccctgctcccggacgccgaccaaactaagaagctgagcatccccaccaccgtgtcccgagttctcaagtacatcccggagctgcagaagcaggtggacaacctggagaggaggaagaaggagctgaccaacgccaactgcaagccgggagttctgaaaaccaccaaggccgtaactcccattgtttctgctacctgcctcaacgacacggagatcatggttcaggtcagcctgcacagcgatgtggccgccacagctctccctctctccaagtgcatcaaggtgctagagaacgaaggccttcatctcgtcagctcatcaacctactcctccgcctttgagaacaagacattctacagcctccatcttcaggtgcatcactgcttcttcttttttttttgaaagaacgactgcttctttcattagatgcatgttcaatgttcctgccttcctctgacgttgacttgaatttctttttactctgtctaattagttagtataattgcactgatttatacaatctaacactattaccacagtcatctcaatttccacccttgcttttctagatgcttgctcaaaaaatacatgcagttccaagctccgaatcctcaagcaagaggtgtcactggatcactgagcatcagtagaatcagagaacgaccacaacagacaaaataaatacagacaggaaacaaatgaactcatcaaactaattaaatatgcaaacaagctataagcatgatcactatgattaaatctagaaagaatccattgagtaagtacaacactaaaccaaaagaacactagtttaatttcaaatttggtaaactactcattagtgattgaggttccacttaccttttgaagatcccaaacaatcgaccattttacagcacatgatgcttagaacattcacccaacatctagattatgcaaatataattaaaatgcccaaaatttccttccagaagactagaacaaggtttggaaactcgactcggcacgaaccgagctcgcgagttggttcggttcgtgagccacaccctgataatataattgaattataaaataaattaaaatatataaatataaaacataaaattatcattcaatattatgagtaatctaaattatgaattgtcatatactccctccgttataaaataacaccgttataaaataatattcattttagcctcatatatcattcaatattttagcctcatatactccctccattatgagtaatctatattcaattggatgatgatgaatctagcctcatatataaaacacatacaaaacacatacatcaagtgatgtataaatctattaatttactaaaataaaatttttaatttaggacagagggagtattcatcatcaaaagctaaacaagcctattatctgtaaatttatccaatatttattattatttggcatattaattagtttggcgagccatcttggctcggctcgctgctctaatgaactcaaaaaataggcacggctcacacgaggctcgcaagccgctctgagctcgagccggctcacaagcctcgaccttttttaagccctaactagaacgacgtagaatatatgaatccaacattacattaacttggtacaaattaatcacaccaaatattatactacttagtatcatatcatgcttagagatacatttcactaatatacgtccactacacaagaactgcaagaacatatctctatcatctgcctcgaatatctatacaccaatcaactaaagctattatcgataaaaaattattatgctatgcacaaagaacttaaaactccatagcttagggatctgcaataataatcaggatctggagacatgaagcagtcgatgcacctagtaagagtgtgccctaacttacagaagccccactatctcgctcaggtgcaccaccgctcaccactcttgcgcgtcgcctatcgcccgtctacacgcaacccactcgcgtcacacgtcgttggactcatcactggttactattgtgctctattttctaaaccgaccatataccttcttatacgtgtcatgcctcgtgccatggcctaggcggcccgaggcccaaatctatccatgtctgtctccattaaccttaaaagaactagcccgaacgtccaatctagcccaagcttaggtcctgatctaggccacacgtcgttaatatgcgtaacacagacatccatctacacacgatcaacatcgacaacatatatttgactgtcgccatcatcaattcacatccatcatcattgatctacatgttgtcattattgatctacatgaccaagccatcaatctacatgccactgttgttgattcgcacgctaccactagatctgcgtgggaggttgagagagagagagagagagcacaagtagatgagggataaagatggaaagggaatagatcttacctgcttttagggttgataatggtctttgaccagtggcgaagctagagtaaattaggggagggtgcatataccttgagggtgcatgataacaatttacaggtggtgcatatatggtgaaaatttggtccaaaccactagatttccaatttttcgtgggtgcatgtgcaccccctaatttctacgtagctccgcccctgtctttgacatgtcaacgagaagggttggagggtgtgtgtagggcaaaaaatagctcgaggcttgcaggccggctcaagctccatacgactcgctcggtttatagtgactcacaaactctgaccgagtctatcatgtttctcaagtttgatccatgacttagccgagtcagctggctgtggctcgtgaactaagtccaaactggcataacagagaacaagagcctaagatgttgtctaactagacaaagcccaagacagacccaaactagcctaacaaagcccaagactgaccaaactagaatttgtatgcaaagtaggatgtatcgtgagccagagtcgagtctctatctcgagctcgtacaccaaaccgagtcaagcatgtctcttctcgacttgtttccaccactaggtgtgtggtgacaacctccatcagtgctgacctcctcgcattctttgcgacccatttaggcatagatcggcacaggtggagggtgtgctcacagctctagccttaagacttcttgcgctctttaaaactgtgtccaacagatcgtgtatatggtcgtgcaaaatatattttttgcactagagatataacacaatttgtagaacgaagtttaaaacaggaggtgagatagataataggataggagtgcttttgggcacaatatccgtagactccagcaaggatgtagagctgaagactatgatggagaagaggggcggatgcgtgatagagaaagggccacgatgcatgagggagggagaggctcaatgtgtggcagagtgtagctagcgtcgggtgcagagtgggtatgagaagagctagggttcatcgtctcttataaattctaggttgatttgggtcaacgactatttatttaagaggcctatctccgttaattgattttaagagacaatcaagttttaagtgtctttgtaaatggtttgtctgtctccaaaaaatcaggggacattttagaagacagtgagattttatgtccacctctgttaatcaaatcgtttgtcttccaaaatcatctatgtaatagtgataatatgataatttattctattgagctaggctcatataaatttagtcaagtatgcttaaatatttctcttattaatatgcaaagtggactctatttgaactcatctaaaatcttcgtattccggttaaaaggttataacacattataatttatttttttttgtaaacgctctaatgtgtttaaggaaaaaatatggctacaactgaagttttattataggaaaattcaacgtcctgtccactgcagtggaagccaaaacacttgtctacaccactctttgtaactaggatgcaggacctaagagcatgtacaatctagatattatgttacggttctctaagcactaatacatctaagaaacttcttcatacaattcaatgtatacaagtcttctatcttattcactagaatctcttaacatatggttcatttatgtgggttgtatggatggaactgtatctaaacttagagaaccgtgctagagacgttcattcaccaaaatatatcttatgttttttacacttatctccttagtaactcttaaaatacagatcatttatgtgggttatacattgccctaacacctatatcttaatgacatccaaaggaaggcatgtaataagaggtacaaacgagctctaaggttttagcctaccatgcatacgaaaaacacaagtatatagatatgtagttttgggcttatttaatctggaacgatagggaaaaaaatgttgtccaacgtaaggattttacttgtaagaaaaaaaaaaagacactgttcatatccacaaaatnn

SEQ ID NO: 74391 - DNA, 4857 bp, Zea Mays
  misc_feature (4856)..(4857): n is a, c, g, or t
ctaaagctaaagctactctcgctccatcaaaccaaccctcccaccatcaccaaagatatatactattactacatagttaacaaactttatctgcctcctgtcctgctaatctatatatcccctctccactactgctaccttctctcgcgcgtctctgctcaaagaataatgtcagcgtagcctagctagctcatagggattcctctttcatccctcctgagatcgacgatctcaccaattaagaacacacacgcacacagcagctacgtacgtacctagctagctagcatgatggaccatcagctgttcgacgaccccttcgggagcagcatctcgtcgctggaggcggaaatcttctccgccgccgcccagctgccgccgtcgccgccgtggccagacatcgacctcgacgacgactacgacatccacgacctctccgcgccggccgccaacgccgctacgtcctcgggcggcggctacggctccggcggctccggcggccacaggaagctcagccacaacgcgtacgagcgcggccgccggaagcagctcaacgagctctactcctccctccgctccctgctcccggacgccgaccaaactaagaagctgagcatccccaccaccgtgtcccgagttctcaagtacatcccggagctgcagaagcaggtggacaacctggagaggaggaagaaggagctgaccaacgccaactgcaagccgggagttctgaaaaccaccaaggccgtaactcccattgtttctgctacctgcctcaacgacacggagatcatggttcaggtcagcctgcacagcgatgtggccgccacagctctccctctctccaagtgcatcaaggtgctagagaacgaaggccttcatctcgtcagctcatcaacctactcctccgcctttgagaacaagacattctacagcctccatcttcagtccaagctccgaatcctcaagcaagaggtgtcactggatcactgagcatcagtagaatcagagaacgaccacaacagacaaaataaatacagacaggaaacaaatgaactcatcaaactaattaaatatgcaaacaagctataagcatgatcactatgattaaatctagaaagaatccattgagtaagtacaacactaaaccaaaagaacactagtttaatttcaaatttggtaaactactcattagtgattgaggttccacttaccttttgaagatcccaaacaatcgaccattttacagcacatgatgcttagaacattcacccaacatctagattatgcaaatataattaaaatgcccaaaatttccttccagaagactagaacaaggtttggaaactcgactcggcacgaaccgagctcgcgagttggttcggttcgtgagccacaccctgataatataattgaattataaaataaattaaaatatataaatataaaacataaaattatcattcaatattatgagtaatctaaattatgaattgtcatatactccctccgttataaaataacaccgttataaaataatattcattttagcctcatatatcattcaatattttagcctcatatactccctccattatgagtaatctatattcaattggatgatgatgaatctagcctcatatataaaacacatacaaaacacatacatcaagtgatgtataaatctattaatttactaaaataaaatttttaatttaggacagagggagtattcatcatcaaaagctaaacaagcctattatctgtaaatttatccaatatttattattatttggcatattaattagtttggcgagccatcttggctcggctcgctgctctaatgaactcaaaaaataggcacggctcacacgaggctcgcaagccgctctgagctcgagccggctcacaagcctcgaccttttttaagccctaactagaacgacgtagaatatatgaatccaacattacattaacttggtacaaattaatcacaccaaatattatactacttagtatcatatcatgcttagagatacatttcactaatatacgtccactacacaagaactgcaagaacatatctctatcatctgcctcgaatatctatacaccaatcaactaaagctattatcgataaaaaattattatgctatgcacaaagaacttaaaactccatagcttagggatctgcaataataatcaggatctggagacatgaagcagtcgatgcacctagtaagagtgtgccctaacttacagaagccccactatctcgctcaggtgcaccaccgctcaccactcttgcgcgtcgcctatcgcccgtctacacgcaacccactcgcgtcacacgtcgttggactcatcactggttactattgtgctctattttctaaaccgaccatataccttcttatacgtgtcatgcctcgtgccatggcctaggcggcccgaggcccaaatctatccatgtctgtctccattaaccttaaaagaactagcccgaacgtccaatctagcccaagcttaggtcctgatctaggccacacgtcgttaatatgcgtaacacagacatccatctacacacgatcaacatcgacaacatatatttgactgtcgccatcatcaattcacatccatcatcattgatctacatgttgtcattattgatctacatgaccaagccatcaatctacatgccactgttgttgattcgcacgctaccactagatctgcgtgggaggttgagagagagagagagagagcacaagtagatgagggataaagatggaaagggaatagatcttacctgcttttagggttgataatggtctttgaccagtggcgaagctagagtaaattaggggagggtgcatataccttgagggtgcatgataacaatttacaggtggtgcatatatggtgaaaatttggtccaaaccactagatttccaatttttcgtgggtgcatgtgcaccccctaatttctacgtagctccgcccctgtctttgacatgtcaacgagaagggttggagggtgtgtgtagggcaaaaaatagctcgaggcttgcaggccggctcaagctccatacgactcgctcggtttatagtgactcacaaactctgaccgagtctatcatgtttctcaagtttgatccatgacttagccgagtcagctggctgtggctcgtgaactaagtccaaactggcataacagagaacaagagcctaagatgttgtctaactagacaaagcccaagacagacccaaactagcctaacaaagcccaagactgaccaaactagaatttgtatgcaaagtaggatgtatcgtgagccagagtcgagtctctatctcgagctcgtacaccaaaccgagtcaagcatgtctcttctcgacttgtttccaccactaggtgtgtggtgacaacctccatcagtgctgacctcctcgcattctttgcgacccatttaggcatagatcggcacaggtggagggtgtgctcacagctctagccttaagacttcttgcgctctttaaaactgtgtccaacagatcgtgtatatggtcgtgcaaaatatattttttgcactagagatataacacaatttgtagaacgaagtttaaaacaggaggtgagatagataataggataggagtgcttttgggcacaatatccgtagactccagcaaggatgtagagctgaagactatgatggagaagaggggcggatgcgtgatagagaaagggccacgatgcatgagggagggagaggctcaatgtgtggcagagtgtagctagcgtcgggtgcagagtgggtatgagaagagctagggttcatcgtctcttataaattctaggttgatttgggtcaacgactatttatttaagaggcctatctccgttaattgattttaagagacaatcaagttttaagtgtctttgtaaatggtttgtctgtctccaaaaaatcaggggacattttagaagacagtgagattttatgtccacctctgttaatcaaatcgtttgtcttccaaaatcatctatgtaatagtgataatatgataatttattctattgagctaggctcatataaatttagtcaagtatgcttaaatatttctcttattaatatgcaaagtggactctatttgaactcatctaaaatcttcgtattccggttaaaaggttataacacattataatttatttttttttgtaaacgctctaatgtgtttaaggaaaaaatatggctacaactgaagttttattataggaaaattcaacgtcctgtccactgcagtggaagccaaaacacttgtctacaccactctttgtaactaggatgcaggacctaagagcatgtacaatctagatattatgttacggttctctaagcactaatacatctaagaaacttcttcatacaattcaatgtatacaagtcttctatcttattcactagaatctcttaacatatggttcatttatgtgggttgtatggatggaactgtatctaaacttagagaaccgtgctagagacgttcattcaccaaaatatatcttatgttttttacacttatctccttagtaactcttaaaatacagatcatttatgtgggttatacattgccctaacacctatatcttaatgacatccaaaggaaggcatgtaataagaggtacaaacgagctctaaggttttagcctaccatgcatacgaaaaacacaagtatatagatatgtagttttgggcttatttaatctggaacgatagggaaaaaaatgttgtccaacgtaaggattttacttgtaagaaaaaaaaaaagacactgttcatatccacaaaatnn

SEQ ID NO: 74392 - DNA, 4494 bp, Zea Mays
cgccagtgtgcatccgttttcacgaggagaggccgtgtcgtatgggcggcggggacaaaggggccggcggcgtcgtgcttggcctgaagccctgaacggcgacggggacaaaggggccagcggcgtcgtgcttggccacgaaggcgaggcggcggctaggaagcctgaacaagccaatgttagaagagtgagggaaggtctacatgctaatatgccaaggtgagacaatccagcgttggatcagaaattaaagactgagattttacgtgtgcaccatgtgcaccgatcagtgatgtgcacaggatacgccgccgatcccctattcccctccctccacagcctcctctctttctctctcccgactcctcaacatcgcgacctctctcccctcccctgcccctgcccctcccacctccctgcaccgccaaacccctcgctcccgcctcctcctccgccgctctaagatctggtctctcgcggccctgcggcgcgccccgagctcgtcgcctcgcgcgcacgcgagcttccctgcccacccggacacgagccgacgagcgagccccccattgcggcgccccgtttcccccgcacgcggcggcagggcgcggagagcgagtccggcagtccgcgcgcgcctgttcgtgatggggcggtgctggcgccggggctgatgcggaggccgctgccatgtcggacgtctcgttggatctcggcggcatccgggcggggcccgtggagcgtgacatcgagcaggccatcactgctctcaagaaaggagcatacttgctgaagtacggacgtagaggaaaaccaaagttttgtccatttaggttatccaatgatgaatctgtactgatatggttctcagggaaagaagagaaacatctaaggttgagccatatatccaagataattcctgggcaacggacttcaatttttcagaggtatccacggcctgagaaagaatgccagtctttttctctaatttcacatgataggtcattggatgtaatatgcaaagataaagatgaagctgaagtatggttcgctgggctgaaaacactgatttcacgttgtcaccaaagaaaatggagaactgaatctagaagtgatttgctttcctctggtgcaactagtccgaggacttacacacgacggagttctcctttgagttcacctttcagcagcaatgacagcatccacaaggatggcagtgacaattatcgactccgtactccatatggaagcccaccaaagaatggattggagaaggcattttctgatgtcatgctgtatgcagttcctccccgtggtttctttccatcagattctaatgctggatctgtccattctatgtcttctggacactcggataacacaaatgggcaccctagaggcgttccaatggatgctttccgagccagttattcaagtgcagttagttcatctagtcatggttctggtcatgacgatggtgatgctttaggcgatgtttttatatggggagaaggaaccggggaaggaattcttggtggtggtggttcaagagttggaagctcctcaggtgcaaaaatggactgccttgtaccaaaaccgttagaatttgccgtgcgacttgatgtgcagaacatatcttgtggaggaaggcatgctgcacttgttactaaacaaggcgagatatactcatggggtgaggaatcagggggacggcttggtcatggtgttgattgtgatgtgtctcagccaaaacttattgatgctctttctcatatgaacattgagcttgtagcatgtggtgaatatcacacttgtgctgttacactatctggagatctttacacatggggggatggcacatttaaatttgggcttttaggtcatggaaatgatatcagtcactgggtaccaaagcacgtgaatggaccattagagggcatacatgtttcatcaatttcatgtggaccttggcatacagccgtagtaacttccgctggacagcttttcacatttggtgatggatcttttggggttctgggccatggagatcgtgagagtatctcggtccccagggaagttgaatctctcaaagggctacgcacggtgcgggcagcttgtggtgtttggcacactgctgcagttgtagaagtcatggctgggaattcaagttctagcaattgttcttctggtaagatatttacatggggtgatggtgataaaggtcgcttaggtcatggtgacaagggaccaaaacttgtcccaacttgtgtggctgctttggtggagcccaatttttgtcaggttgcttgtgggcattgcttgacagtagccctaacaacttctgggcatgtgtatacaatgggcagtgctgtctatggtcaacttgggaatgcacaagctgatggtatgcttcctgtgcgtgttgaagggaagctacacaaaaactttgtggaggagatttcatgtggcgcttatcatgtggctgtattgacttctaagaccgaggtgtacacatggggaaaaggtgcaaatgggcggttaggtcatggcgatactgatgataagaatactcctacattggtcgaagcactgaaagataagcaagtcagaattgttgtttgtggaattaatttcactgcagcaatatgcattcacaaatgggtatctggagttgatcaatcgatgtgctcaggttgccgtcagccattcaacttgaggagaaaacgccataattgttacaactgtgctctagtattttgtcattcctgcagcagtaaaaaatccctgaaggcttcattagcacctaatacaaacaagccctaccgtgtctgcgatacctgctacagcaaactgacaaagggacttgagacggatatgcattcttcagcgaagcgagctgctactgtaccgggagtcagtgatgcaaatgaggaggatctggaaacaaggtcaaatgctcaactatcaaggttgtcttcaatggaatcttttaagcatttggatagcagatattccaagaaaaataagaagtttgaatttaatagcactcgtgtttcccctgtgcctaatggaagttcacattggagtggactaaacatttcaagatctttcaatcctgtatttggatcttcaaagaagttcttctcagcatcagttcctggatctagaattgtttctagggcaacatcaccgatttcaagaagagcaagccctccacgatctacaacaccaacacctactctgggtggtctaacatctccaagagttgttcccaatgatggcaagccaacaaatgatgcattaagccaagaggttctgaatttgaggtctcaggtggagagtcttgctaggaagtctcaactcctggaagtggagctggaaagaactaccaaacaactgaaggaagctatttctattgctggtgaggaaactgcaaagtgcaaggcagcaaaggaagtaatcaagtcactcactgcacaattgaaggggatggcagagagattacctggaggagcagccaagaacactaagttgccacctcttcctggaattttcattccaagtgacattccgtctatgcctacggagagtgagggcagcccaagcagctctggagaacaaatcataaatggtcataatggattgcttacttctaatggacaaagttctattaggaataaaacgagccatccagaagttggcaagaatggaggtaggctgcctgatgctgaatcttgccacgatgctgaatgggtagagcaagatgaaccaggtgtttacattactctcactgcgttgcctggaggcgccagagatctcaagcgggttcggttcagccggaagagattcagtgagacacaagcagaacagtggtggcaacagaaccgggcgagggtataccagcagtacaatgtccgcgtgattgacaaatcgaccgccagtgtcaacagtgacattgcggctaactgacactagattgacctggagaaacatacctgattacaagcggagctgaggccatgtaacctgaagggctctctcgtcagtcaagctgggttgctaacgtggctaccattttacctacccccctgagaagaggtggtttctgctcccaggaaaacaggaagttttttttatcttcagttttacataattctttactcttaccccgacccccccccctttttttttctcattgtgtgaaaagtagagtgcttgagcagaggtaatgtaaatgcttagtagaagcaggctaatctatcttgtaaatgcataagcaagcatcggttttagaatgccttgggaatcttccaatatgattgcaaatgcaaatggcaaatctgggccaagtattgatggtctctgaagtttgtagtagagcctgtatgcatataaatctgaagcaatcccgaggtcggaagtcgtacaagtgattaagtactccctctactgaaccaaatcataagatgttttagtaattctacgattgactttttt

SEQ ID NO: 74393 - DNA, 4070 bp, Zea Mays
ctctctttctctctcccgactcctcaacatcgcgacctctctcccctcccctgcccctgcccctcccacctccctgcaccgccaaacccctcgctcccgcctcctcctccgccgctctaagatctggtctctcgcggccctgcggcgcgccccgagctcgtcgcctcgcgcgcacgcgagcttccctgcccacccggacacgagccgacgagcgagccccccattgcggcgccccgtttcccccgcacgcggcggcagggcgcggagagcgagtccggcagtccgcgcgcgcctgttcgtgatggggcggtgctggcgccggggctgatgcggaggccgctgccatgtcggacgtctcgttggatctcggcggcatccgggcggggcccgtggagcgtgacatcgagcaggccatcactgctctcaagaaaggagcatacttgctgaagtacggacgtagaggaaaaccaaagttttgtccatttaggttatccaatgatgaatctgtactgatatggttctcagggaaagaagagaaacatctaaggttgagccatatatccaagataattcctgggcaacggactatatgcaaagataaagatgaagctgaagtatggttcgctgggctgaaaacactgatttcacgttgtcaccaaagaaaatggagaactgaatctagaagtgatttgctttcctctggtgcaactagtccgaggacttacacacgacggagttctcctttgagttcacctttcagcagcaatgacagcatccacaaggatggcagtgacaattatcgactccgtactccatatggaagcccaccaaagaatggattggagaaggcattttctgatgtcatgctgtatgcagttcctccccgtggtttctttccatcagattctaatgctggatctgtccattctatgtcttctggacactcggataacacaaatgggcaccctagaggcgttccaatggatgctttccgagccagttattcaagtgcagttagttcatctagtcatggttctggtcatgacgatggtgatgctttaggcgatgtttttatatggggagaaggaaccggggaaggaattcttggtggtggtggttcaagagttggaagctcctcaggtgcaaaaatggactgccttgtaccaaaaccgttagaatttgccgtgcgacttgatgtgcagaacatatcttgtggaggaaggcatgctgcacttgttactaaacaaggcgagatatactcatggggtgaggaatcagggggacggcttggtcatggtgttgattgtgatgtgtctcagccaaaacttattgatgctctttctcatatgaacattgagcttgtagcatgtggtgaatatcacacttgtgctgttacactatctggagatctttacacatggggggatggcacatttaaatttgggcttttaggtcatggaaatgatatcagtcactgggtaccaaagcacgtgaatggaccattagagggcatacatgtttcatcaatttcatgtggaccttggcatacagccgtagtaacttccgctggacagcttttcacatttggtgatggatcttttggggttctgggccatggagatcgtgagagtatctcggtccccagggaagttgaatctctcaaagggctacgcacggtgcgggcagcttgtggtgtttggcacactgctgcagttgtagaagtcatggctgggaattcaagttctagcaattgttcttctggtaagatatttacatggggtgatggtgataaaggtcgcttaggtcatggtgacaagggaccaaaacttgtcccaacttgtgtggctgctttggtggagcccaatttttgtcaggttgcttgtgggcattgcttgacagtagccctaacaacttctgggcatgtgtatacaatgggcagtgctgtctatggtcaacttgggaatgcacaagctgatggtatgcttcctgtgcgtgttgaagggaagctacacaaaaactttgtggaggagatttcatgtggcgcttatcatgtggctgtattgacttctaagaccgaggtgtacacatggggaaaaggtgcaaatgggcggttaggtcatggcgatactgatgataagaatactcctacattggtcgaagcactgaaagataagcaagtcagaattgttgtttgtggaattaatttcactgcagcaatatgcattcacaaatgggtatctggagttgatcaatcgatgtgctcaggttgccgtcagccattcaacttgaggagaaaacgccataattgttacaactgtgctctagtattttgtcattcctgcagcagtaaaaaatccctgaaggcttcattagcacctaatacaaacaagccctaccgtgtctgcgatacctgctacagcaaactgacaaagggacttgagacggatatgcattcttcagcgaagcgagctgctactgtaccgggagtcagtgatgcaaatgaggaggatctggaaacaaggtcaaatgctcaactatcaaggttgtcttcaatggaatcttttaagcatttggatagcagatattccaagaaaaataagaagtttgaatttaatagcactcgtgtttcccctgtgcctaatggaagttcacattggagtggactaaacatttcaagatctttcaatcctgtatttggatcttcaaagaagttcttctcagcatcagttcctggatctagaattgtttctagggcaacatcaccgatttcaagaagagcaagccctccacgatctacaacaccaacacctactctgggtggtctaacatctccaagagttgttcccaatgatggcaagccaacaaatgatgcattaagccaagaggttctgaatttgaggtctcaggtggagagtcttgctaggaagtctcaactcctggaagtggagctggaaagaactaccaaacaactgaaggaagctatttctattgctggtgaggaaactgcaaagtgcaaggcagcaaaggaagtaatcaagtcactcactgcacaattgaaggggatggcagagagattacctggaggagcagccaagaacactaagttgccacctcttcctggaattttcattccaagtgacattccgtctatgcctacggagagtgagggcagcccaagcagctctggagaacaaatcataaatggtcataatggattgcttacttctaatggacaaagttctattaggaataaaacgagccatccagaagttggcaagaatggaggtaggctgcctgatgctgaatcttgccacgatgctgaatgggtagagcaagatgaaccaggtgtttacattactctcactgcgttgcctggaggcgccagagatctcaagcgggttcggttcagccggaagagattcagtgagacacaagcagaacagtggtggcaacagaaccgggcgagggtataccagcagtacaatgtccgcgtgattgacaaatcgaccgccagtgtcaacagtgacattgcggctaactgacactagattgacctggagaaacatacctgattacaagcggagctgaggccatgtaacctgaagggctctctcgtcagtcaagctgggttgctaacgtggctaccattttacctacccccctgagaagaggtggtttctgctcccaggaaaacaggaagttttttttatcttcagttttacataattctttactcttaccccgacccccccccctttttttttctcattgtgtgaaaagtagagtgcttgagcagaggtaatgtaaatgcttagtagaagcaggctaatctatcttgtaaatgcataagcaagcatcggttttagaatgccttgggaatcttccaatatgattgcaaatgcaaatggcaaatctgggccaagtattgatggtctctgaagtttgtagtagagcctgtatgcatataaatctgaagcaatcccgaggtcggaagtcgtacaagtgattaagtactccctctactgaaccaaatcataagatgttttagtaattctacgattgactttttt

SEQ ID NO: 74394 - DNA, 4107 bp, Zea Mays
ctttctctctcccgactcctcaacatcgcgacctctctcccctcccctgcccctgcccctcccacctccctgcaccgccaaacccctcgctcccgcctcctcctccgccgctctaagatctggtctctcgcggccctgcggcgcgccccgagctcgtcgcctcgcgcgcacgcgagcttccctgcccacccggacacgagccgacgagcgagccccccattgcggcgccccgtttcccccgcacgcggcggcagggcgcggagagcgagtccggcagtccgcgcgcgcctgttcgtgatggggcggtgctggcgccggggctgatgcggaggccgctgccatgtcggacgtctcgttggatctcggcggcatccgggcggggcccgtggagcgtgacatcgagcaggccatcactgctctcaagaaaggagcatacttgctgaagtacggacgtagaggaaaaccaaagttttgtccatttaggttatccaatgatgaatctgtactgatatggttctcagggaaagaagagaaacatctaagtcaatttttcagaggtatccacggcctgagaaagaatgccagtctttttctctaatttcacatgataggtcattggatgtaatatgcaaagataaagatgaagctgaagtatggttcgctgggctgaaaacactgatttcacgttgtcaccaaagaaaatggagaactgaatctagaagtgatttgctttcctctggtgcaactagtccgaggacttacacacgacggagttctcctttgagttcacctttcagcagcaatgacagcatccacaaggatggcagtgacaattatcgactccgtactccatatggaagcccaccaaagaatggattggagaaggcattttctgatgtcatgctgtatgcagttcctccccgtggtttctttccatcagattctaatgctggatctgtccattctatgtcttctggacactcggataacacaaatgggcaccctagaggcgttccaatggatgctttccgagccagttattcaagtgcagttagttcatctagtcatggttctggtcatgacgatggtgatgctttaggcgatgtttttatatggggagaaggaaccggggaaggaattcttggtggtggtggttcaagagttggaagctcctcaggtgcaaaaatggactgccttgtaccaaaaccgttagaatttgccgtgcgacttgatgtgcagaacatatcttgtggaggaaggcatgctgcacttgttactaaacaaggcgagatatactcatggggtgaggaatcagggggacggcttggtcatggtgttgattgtgatgtgtctcagccaaaacttattgatgctctttctcatatgaacattgagcttgtagcatgtggtgaatatcacacttgtgctgttacactatctggagatctttacacatggggggatggcacatttaaatttgggcttttaggtcatggaaatgatatcagtcactgggtaccaaagcacgtgaatggaccattagagggcatacatgtttcatcaatttcatgtggaccttggcatacagccgtagtaacttccgctggacagcttttcacatttggtgatggatcttttggggttctgggccatggagatcgtgagagtatctcggtccccagggaagttgaatctctcaaagggctacgcacggtgcgggcagcttgtggtgtttggcacactgctgcagttgtagaagtcatggctgggaattcaagttctagcaattgttcttctggtaagatatttacatggggtgatggtgataaaggtcgcttaggtcatggtgacaagggaccaaaacttgtcccaacttgtgtggctgctttggtggagcccaatttttgtcaggttgcttgtgggcattgcttgacagtagccctaacaacttctgggcatgtgtatacaatgggcagtgctgtctatggtcaacttgggaatgcacaagctgatggtatgcttcctgtgcgtgttgaagggaagctacacaaaaactttgtggaggagatttcatgtggcgcttatcatgtggctgtattgacttctaagaccgaggtgtacacatggggaaaaggtgcaaatgggcggttaggtcatggcgatactgatgataagaatactcctacattggtcgaagcactgaaagataagcaagtcagaattgttgtttgtggaattaatttcactgcagcaatatgcattcacaaatgggtatctggagttgatcaatcgatgtgctcaggttgccgtcagccattcaacttgaggagaaaacgccataattgttacaactgtgctctagtattttgtcattcctgcagcagtaaaaaatccctgaaggcttcattagcacctaatacaaacaagccctaccgtgtctgcgatacctgctacagcaaactgacaaagggacttgagacggatatgcattcttcagcgaagcgagctgctactgtaccgggagtcagtgatgcaaatgaggaggatctggaaacaaggtcaaatgctcaactatcaaggttgtcttcaatggaatcttttaagcatttggatagcagatattccaagaaaaataagaagtttgaatttaatagcactcgtgtttcccctgtgcctaatggaagttcacattggagtggactaaacatttcaagatctttcaatcctgtatttggatcttcaaagaagttcttctcagcatcagttcctggatctagaattgtttctagggcaacatcaccgatttcaagaagagcaagccctccacgatctacaacaccaacacctactctgggtggtctaacatctccaagagttgttcccaatgatggcaagccaacaaatgatgcattaagccaagaggttctgaatttgaggtctcaggtggagagtcttgctaggaagtctcaactcctggaagtggagctggaaagaactaccaaacaactgaaggaagctatttctattgctggtgaggaaactgcaaagtgcaaggcagcaaaggaagtaatcaagtcactcactgcacaattgaaggggatggcagagagattacctggaggagcagccaagaacactaagttgccacctcttcctggaattttcattccaagtgacattccgtctatgcctacggagagtgagggcagcccaagcagctctggagaacaaatcataaatggtcataatggattgcttacttctaatggacaaagttctattaggaataaaacgagccatccagaagttggcaagaatggaggtaggctgcctgatgctgaatcttgccacgatgctgaatgggtagagcaagatgaaccaggtgtttacattactctcactgcgttgcctggaggcgccagagatctcaagcgggttcggttcagccggaagagattcagtgagacacaagcagaacagtggtggcaacagaaccgggcgagggtataccagcagtacaatgtccgcgtgattgacaaatcgaccgccagtgtcaacagtgacattgcggctaactgacactagattgacctggagaaacatacctgattacaagcggagctgaggccatgtaacctgaagggctctctcgtcagtcaagctgggttgctaacgtggctaccattttacctacccccctgagaagaggtggtttctgctcccaggaaaacaggaagttttttttatcttcagttttacataattctttactcttaccccgacccccccccctttttttttctcattgtgtgaaaagtagagtgcttgagcagaggtaatgtaaatgcttagtagaagcaggctaatctatcttgtaaatgcataagcaagcatcggttttagaatgccttgggaatcttccaatatgattgcaaatgcaaatggcaaatctgggccaagtattgatggtctctgaagtttgtagtagagcctgtatgcatataaatctgaagcaatcccgaggtcggaagtcgtacaagtgattaagtactccctctactgaaccaaatcataagatgttttagtaattctacgattgactttttt

SEQ ID NO: 74395 - DNA, 4713 bp, Zea Mays
caacatcgcgacctctctcccctcccctgcccctgcccctcccacctccctgcaccgccaaacccctcgctcccgcctcctcctccgccgctctaagatctggtctctcgcggccctgcggcgcgccccgagctcgtcgcctcgcgcgcacgcgagcttccctgcccacccggacacgagccgacgagcgagccccccattgcggcgccccgtttcccccgcacgcggcggcagggcgcggagagcgagtccggcagtccgcgcgcgcctgttcgtgatggggcggtgctggcgccggggctgatgcggaggccgctgccatgtcggacgtctcgttggatctcggcggcatccgggcggggcccgtggagcgtgacatcgagcaggtacgtgcagcgtgctgctaactcttctccgcctggattgatttctcctcctccatccatggttgatggttctactgtgggtgcaactgagatgtggatgtgcagatcatcatctatcgcctgcgtgctctcagcccgcgttgggcggattgatttcccctccccggtccatggttctaccgtgggtgcaactgagatgtggatgggcagcgcctacgtgctctctgcccacgcgtagcgcggaattttgggccagctcgtgctctttgtgtgcggacgtgaaatggtgcctgattccggcggaattcatggtccttgatgctgtggttcgatggttttcttcttacgtgctacattgaagctcagactggacattacaggtcgctgttccccttcctctgctgaaattccgggaggtaggaaggttgttgacttgtttggcgtccaaccactaattcgggtgtatagaggtcaagccgggactattatgcttctcattccctgttttctggagctgaggggatcagtcgacagtggcatacttcggtgaacagaagattcattctgggagcgaggacccttacttgccatcactgctctcaagaaaggagcatacttgctgaagtacggacgtagaggaaaaccaaagttttgtccatttaggttatccaatgatgaatctgtactgatatggttctcagggaaagaagagaaacatctaaggttgagccatatatccaagataattcctgggcaacggacttcaatttttcagaggtatccacggcctgagaaagaatgccagtctttttctctaatttcacatgataggtcattggatgtaatatgcaaagataaagatgaagctgaagtatggttcgctgggctgaaaacactgatttcacgttgtcaccaaagaaaatggagaactgaatctagaagtgatttgctttcctctggtgcaactagtccgaggacttacacacgacggagttctcctttgagttcacctttcagcagcaatgacagcatccacaaggatggcagtgacaattatcgactccgtactccatatggaagcccaccaaagaatggattggagaaggcattttctgatgtcatgctgtatgcagttcctccccgtggtttctttccatcagattctaatgctggatctgtccattctatgtcttctggacactcggataacacaaatgggcaccctagaggcgttccaatggatgctttccgagccagttattcaagtgcagttagttcatctagtcatggttctggtcatgacgatggtgatgctttaggcgatgtttttatatggggagaaggaaccggggaaggaattcttggtggtggtggttcaagagttggaagctcctcaggtgcaaaaatggactgccttgtaccaaaaccgttagaatttgccgtgcgacttgatgtgcagaacatatcttgtggaggaaggcatgctgcacttgttactaaacaaggcgagatatactcatggggtgaggaatcagggggacggcttggtcatggtgttgattgtgatgtgtctcagccaaaacttattgatgctctttctcatatgaacattgagcttgtagcatgtggtgaatatcacacttgtgctgttacactatctggagatctttacacatggggggatggcacatttaaatttgggcttttaggtcatggaaatgatatcagtcactgggtaccaaagcacgtgaatggaccattagagggcatacatgtttcatcaatttcatgtggaccttggcatacagccgtagtaacttccgctggacagcttttcacatttggtgatggatcttttggggttctgggccatggagatcgtgagagtatctcggtccccagggaagttgaatctctcaaagggctacgcacggtgcgggcagcttgtggtgtttggcacactgctgcagttgtagaagtcatggctgggaattcaagttctagcaattgttcttctggtaagatatttacatggggtgatggtgataaaggtcgcttaggtcatggtgacaagggaccaaaacttgtcccaacttgtgtggctgctttggtggagcccaatttttgtcaggttgcttgtgggcattgcttgacagtagccctaacaacttctgggcatgtgtatacaatgggcagtgctgtctatggtcaacttgggaatgcacaagctgatggtatgcttcctgtgcgtgttgaagggaagctacacaaaaactttgtggaggagatttcatgtggcgcttatcatgtggctgtattgacttctaagaccgaggtgtacacatggggaaaaggtgcaaatgggcggttaggtcatggcgatactgatgataagaatactcctacattggtcgaagcactgaaagataagcaagtcagaattgttgtttgtggaattaatttcactgcagcaatatgcattcacaaatgggtatctggagttgatcaatcgatgtgctcaggttgccgtcagccattcaacttgaggagaaaacgccataattgttacaactgtgctctagtattttgtcattcctgcagcagtaaaaaatccctgaaggcttcattagcacctaatacaaacaagccctaccgtgtctgcgatacctgctacagcaaactgacaaagggacttgagacggatatgcattcttcagcgaagcgagctgctactgtaccgggagtcagtgatgcaaatgaggaggatctggaaacaaggtcaaatgctcaactatcaaggttgtcttcaatggaatcttttaagcatttggatagcagatattccaagaaaaataagaagtttgaatttaatagcactcgtgtttcccctgtgcctaatggaagttcacattggagtggactaaacatttcaagatctttcaatcctgtatttggatcttcaaagaagttcttctcagcatcagttcctggatctagaattgtttctagggcaacatcaccgatttcaagaagagcaagccctccacgatctacaacaccaacacctactctgggtggtctaacatctccaagagttgttcccaatgatggcaagccaacaaatgatgcattaagccaagaggttctgaatttgaggtctcaggtggagagtcttgctaggaagtctcaactcctggaagtggagctggaaagaactaccaaacaactgaaggaagctatttctattgctggtgaggaaactgcaaagtgcaaggcagcaaaggaagtaatcaagtcactcactgcacaattgaaggggatggcagagagattacctggaggagcagccaagaacactaagttgccacctcttcctggaattttcattccaagtgacattccgtctatgcctacggagagtgagggcagcccaagcagctctggagaacaaatcataaatggtcataatggattgcttacttctaatggacaaagttctattaggaataaaacgagccatccagaagttggcaagaatggaggtaggctgcctgatgctgaatcttgccacgatgctgaatgggtagagcaagatgaaccaggtgtttacattactctcactgcgttgcctggaggcgccagagatctcaagcgggttcggttcagccggaagagattcagtgagacacaagcagaacagtggtggcaacagaaccgggcgagggtataccagcagtacaatgtccgcgtgattgacaaatcgaccgccagtgtcaacagtgacattgcggctaactgacactagattgacctggagaaacatacctgattacaagcggagctgaggccatgtaacctgaagggctctctcgtcagtcaagctgggttgctaacgtggctaccattttacctacccccctgagaagaggtggtttctgctcccaggaaaacaggaagttttttttatcttcagttttacataattctttactcttaccccgacccccccccctttttttttctcattgtgtgaaaagtagagtgcttgagcagaggtaatgtaaatgcttagtagaagcaggctaatctatcttgtaaatgcataagcaagcatcggttttagaatgccttgggaatcttccaatatgattgcaaatgcaaatggcaaatctgggccaagtattgatggtctctgaagtttgtagtagagcctgtatgcatataaatctgaagcaatcccgaggtcggaagtcgtacaagtgattaagtactccctctactgaaccaaatcataagatgttttagtaattctacgattgactttttt

SEQ ID NO: 74396 - DNA, 4117 bp, Zea Mays
caacatcgcgacctctctcccctcccctgcccctgcccctcccacctccctgcaccgccaaacccctcgctcccgcctcctcctccgccgctctaagatctggtctctcgcggccctgcggcgcgccccgagctcgtcgcctcgcgcgcacgcgagcttccctgcccacccggacacgagccgacgagcgagccccccattgcggcgccccgtttcccccgcacgcggcggcagggcgcggagagcgagtccggcagtccgcgcgcgcctgttcgtgatggggcggtgctggcgccggggctgatgcggaggccgctgccatgtcggacgtctcgttggatctcggcggcatccgggcggggcccgtggagcgtgacatcgagcaggccatcactgctctcaagaaaggagcatacttgctgaagtacggacgtagaggaaaaccaaagttttgtccatttaggatgaatctgtactgatatggttctcagggaaagaagagaaacatctaaggttgagccatatatccaagataattcctgggcaacggacttcaatttttcagaggtatccacggcctgagaaagaatgccagtctttttctctaatttcacatgataggtcattggatgtaatatgcaaagataaagatgaagctgaagtatggttcgctgggctgaaaacactgatttcacgttgtcaccaaagaaaatggagaactgaatctagaagtgatttgctttcctctggtgcaactagtccgaggacttacacacgacggagttctcctttgagttcacctttcagcagcaatgacagcatccacaaggatggcagtgacaattatcgactccgtactccatatggaagcccaccaaagaatggattggagaaggcattttctgatgtcatgctgtatgcagttcctccccgtggtttctttccatcagattctaatgctggatctgtccattctatgtcttctggacactcggataacacaaatgggcaccctagaggcgttccaatggatgctttccgagccagttattcaagtgcagttagttcatctagtcatggttctggtcatgacgatggtgatgctttaggcgatgtttttatatggggagaaggaaccggggaaggaattcttggtggtggtggttcaagagttggaagctcctcaggtgcaaaaatggactgccttgtaccaaaaccgttagaatttgccgtgcgacttgatgtgcagaacatatcttgtggaggaaggcatgctgcacttgttactaaacaaggcgagatatactcatggggtgaggaatcagggggacggcttggtcatggtgttgattgtgatgtgtctcagccaaaacttattgatgctctttctcatatgaacattgagcttgtagcatgtggtgaatatcacacttgtgctgttacactatctggagatctttacacatggggggatggcacatttaaatttgggcttttaggtcatggaaatgatatcagtcactgggtaccaaagcacgtgaatggaccattagagggcatacatgtttcatcaatttcatgtggaccttggcatacagccgtagtaacttccgctggacagcttttcacatttggtgatggatcttttggggttctgggccatggagatcgtgagagtatctcggtccccagggaagttgaatctctcaaagggctacgcacggtgcgggcagcttgtggtgtttggcacactgctgcagttgtagaagtcatggctgggaattcaagttctagcaattgttcttctggtaagatatttacatggggtgatggtgataaaggtcgcttaggtcatggtgacaagggaccaaaacttgtcccaacttgtgtggctgctttggtggagcccaatttttgtcaggttgcttgtgggcattgcttgacagtagccctaacaacttctgggcatgtgtatacaatgggcagtgctgtctatggtcaacttgggaatgcacaagctgatggtatgcttcctgtgcgtgttgaagggaagctacacaaaaactttgtggaggagatttcatgtggcgcttatcatgtggctgtattgacttctaagaccgaggtgtacacatggggaaaaggtgcaaatgggcggttaggtcatggcgatactgatgataagaatactcctacattggtcgaagcactgaaagataagcaagtcagaattgttgtttgtggaattaatttcactgcagcaatatgcattcacaaatgggtatctggagttgatcaatcgatgtgctcaggttgccgtcagccattcaacttgaggagaaaacgccataattgttacaactgtgctctagtattttgtcattcctgcagcagtaaaaaatccctgaaggcttcattagcacctaatacaaacaagccctaccgtgtctgcgatacctgctacagcaaactgacaaagggacttgagacggatatgcattcttcagcgaagcgagctgctactgtaccgggagtcagtgatgcaaatgaggaggatctggaaacaaggtcaaatgctcaactatcaaggttgtcttcaatggaatcttttaagcatttggatagcagatattccaagaaaaataagaagtttgaatttaatagcactcgtgtttcccctgtgcctaatggaagttcacattggagtggactaaacatttcaagatctttcaatcctgtatttggatcttcaaagaagttcttctcagcatcagttcctggatctagaattgtttctagggcaacatcaccgatttcaagaagagcaagccctccacgatctacaacaccaacacctactctgggtggtctaacatctccaagagttgttcccaatgatggcaagccaacaaatgatgcattaagccaagaggttctgaatttgaggtctcaggtggagagtcttgctaggaagtctcaactcctggaagtggagctggaaagaactaccaaacaactgaaggaagctatttctattgctggtgaggaaactgcaaagtgcaaggcagcaaaggaagtaatcaagtcactcactgcacaattgaaggggatggcagagagattacctggaggagcagccaagaacactaagttgccacctcttcctggaattttcattccaagtgacattccgtctatgcctacggagagtgagggcagcccaagcagctctggagaacaaatcataaatggtcataatggattgcttacttctaatggacaaagttctattaggaataaaacgagccatccagaagttggcaagaatggaggtaggctgcctgatgctgaatcttgccacgatgctgaatgggtagagcaagatgaaccaggtgtttacattactctcactgcgttgcctggaggcgccagagatctcaagcgggttcggttcagccggaagagattcagtgagacacaagcagaacagtggtggcaacagaaccgggcgagggtataccagcagtacaatgtccgcgtgattgacaaatcgaccgccagtgtcaacagtgacattgcggctaactgacactagattgacctggagaaacatacctgattacaagcggagctgaggccatgtaacctgaagggctctctcgtcagtcaagctgggttgctaacgtggctaccattttacctacccccctgagaagaggtggtttctgctcccaggaaaacaggaagttttttttatcttcagttttacataattctttactcttaccccgacccccccccctttttttttctcattgtgtgaaaagtagagtgcttgagcagaggtaatgtaaatgcttagtagaagcaggctaatctatcttgtaaatgcataagcaagcatcggttttagaatgccttgggaatcttccaatatgattgcaaatgcaaatggcaaatctgggccaagtattgatggtctctgaagtttgtagtagagcctgtatgcatataaatctgaagcaatcccgaggtcggaagtcgtacaagtgattaagtactccctctactgaaccaaatcataagatgttttagtaattctacgattgactttttt

SEQ ID NO: 74397 - DNA, 4131 bp, Zea Mays
caacatcgcgacctctctcccctcccctgcccctgcccctcccacctccctgcaccgccaaacccctcgctcccgcctcctcctccgccgctctaagatctggtctctcgcggccctgcggcgcgccccgagctcgtcgcctcgcgcgcacgcgagcttccctgcccacccggacacgagccgacgagcgagccccccattgcggcgccccgtttcccccgcacgcggcggcagggcgcggagagcgagtccggcagtccgcgcgcgcctgttcgtgatggggcggtgctggcgccggggctgatgcggaggccgctgccatgtcggacgtctcgttggatctcggcggcatccgggcggggcccgtggagcgtgacatcgagcaggccatcactgctctcaagaaaggagcatacttgctgaagtacggacgtagaggaaaaccaaagttttgtccatttaggttatccaatgatgaatctgtactgatatggttctcagggaaagaagagaaacatctaaggttgagccatatatccaagataattcctgggcaacggactgtaatcaatttttcagaggtatccacggcctgagaaagaatgccagtctttttctctaatttcacatgataggtcattggatgtaatatgcaaagataaagatgaagctgaagtatggttcgctgggctgaaaacactgatttcacgttgtcaccaaagaaaatggagaactgaatctagaagtgatttgctttcctctggtgcaactagtccgaggacttacacacgacggagttctcctttgagttcacctttcagcagcaatgacagcatccacaaggatggcagtgacaattatcgactccgtactccatatggaagcccaccaaagaatggattggagaaggcattttctgatgtcatgctgtatgcagttcctccccgtggtttctttccatcagattctaatgctggatctgtccattctatgtcttctggacactcggataacacaaatgggcaccctagaggcgttccaatggatgctttccgagccagttattcaagtgcagttagttcatctagtcatggttctggtcatgacgatggtgatgctttaggcgatgtttttatatggggagaaggaaccggggaaggaattcttggtggtggtggttcaagagttggaagctcctcaggtgcaaaaatggactgccttgtaccaaaaccgttagaatttgccgtgcgacttgatgtgcagaacatatcttgtggaggaaggcatgctgcacttgttactaaacaaggcgagatatactcatggggtgaggaatcagggggacggcttggtcatggtgttgattgtgatgtgtctcagccaaaacttattgatgctctttctcatatgaacattgagcttgtagcatgtggtgaatatcacacttgtgctgttacactatctggagatctttacacatggggggatggcacatttaaatttgggcttttaggtcatggaaatgatatcagtcactgggtaccaaagcacgtgaatggaccattagagggcatacatgtttcatcaatttcatgtggaccttggcatacagccgtagtaacttccgctggacagcttttcacatttggtgatggatcttttggggttctgggccatggagatcgtgagagtatctcggtccccagggaagttgaatctctcaaagggctacgcacggtgcgggcagcttgtggtgtttggcacactgctgcagttgtagaagtcatggctgggaattcaagttctagcaattgttcttctggtaagatatttacatggggtgatggtgataaaggtcgcttaggtcatggtgacaagggaccaaaacttgtcccaacttgtgtggctgctttggtggagcccaatttttgtcaggttgcttgtgggcattgcttgacagtagccctaacaacttctgggcatgtgtatacaatgggcagtgctgtctatggtcaacttgggaatgcacaagctgatggtatgcttcctgtgcgtgttgaagggaagctacacaaaaactttgtggaggagatttcatgtggcgcttatcatgtggctgtattgacttctaagaccgaggtgtacacatggggaaaaggtgcaaatgggcggttaggtcatggcgatactgatgataagaatactcctacattggtcgaagcactgaaagataagcaagtcagaattgttgtttgtggaattaatttcactgcagcaatatgcattcacaaatgggtatctggagttgatcaatcgatgtgctcaggttgccgtcagccattcaacttgaggagaaaacgccataattgttacaactgtgctctagtattttgtcattcctgcagcagtaaaaaatccctgaaggcttcattagcacctaatacaaacaagccctaccgtgtctgcgatacctgctacagcaaactgacaaagggacttgagacggatatgcattcttcagcgaagcgagctgctactgtaccgggagtcagtgatgcaaatgaggaggatctggaaacaaggtcaaatgctcaactatcaaggttgtcttcaatggaatcttttaagcatttggatagcagatattccaagaaaaataagaagtttgaatttaatagcactcgtgtttcccctgtgcctaatggaagttcacattggagtggactaaacatttcaagatctttcaatcctgtatttggatcttcaaagaagttcttctcagcatcagttcctggatctagaattgtttctagggcaacatcaccgatttcaagaagagcaagccctccacgatctacaacaccaacacctactctgggtggtctaacatctccaagagttgttcccaatgatggcaagccaacaaatgatgcattaagccaagaggttctgaatttgaggtctcaggtggagagtcttgctaggaagtctcaactcctggaagtggagctggaaagaactaccaaacaactgaaggaagctatttctattgctggtgaggaaactgcaaagtgcaaggcagcaaaggaagtaatcaagtcactcactgcacaattgaaggggatggcagagagattacctggaggagcagccaagaacactaagttgccacctcttcctggaattttcattccaagtgacattccgtctatgcctacggagagtgagggcagcccaagcagctctggagaacaaatcataaatggtcataatggattgcttacttctaatggacaaagttctattaggaataaaacgagccatccagaagttggcaagaatggaggtaggctgcctgatgctgaatcttgccacgatgctgaatgggtagagcaagatgaaccaggtgtttacattactctcactgcgttgcctggaggcgccagagatctcaagcgggttcggttcagccggaagagattcagtgagacacaagcagaacagtggtggcaacagaaccgggcgagggtataccagcagtacaatgtccgcgtgattgacaaatcgaccgccagtgtcaacagtgacattgcggctaactgacactagattgacctggagaaacatacctgattacaagcggagctgaggccatgtaacctgaagggctctctcgtcagtcaagctgggttgctaacgtggctaccattttacctacccccctgagaagaggtggtttctgctcccaggaaaacaggaagttttttttatcttcagttttacataattctttactcttaccccgacccccccccctttttttttctcattgtgtgaaaagtagagtgcttgagcagaggtaatgtaaatgcttagtagaagcaggctaatctatcttgtaaatgcataagcaagcatcggttttagaatgccttgggaatcttccaatatgattgcaaatgcaaatggcaaatctgggccaagtattgatggtctctgaagtttgtagtagagcctgtatgcatataaatctgaagcaatcccgaggtcggaagtcgtacaagtgattaagtactccctctactgaaccaaatcataagatgttttagtaattctacgattgactttttt

SEQ ID NO: 74398 - DNA, 3322 bp, Zea Mays
gtcaaattgctagtgtacttaatcacttttaatggatggcagtgacaattatcgactccgtactccatatggaagcccaccaaagaatggattggagaaggcattttctgatgtcatgctgtatgcagttcctccccgtggtttctttccatcagattctaatgctggatctgtccattctatgtcttctggacactcggataacacaaatgggcaccctagaggcgttccaatggatgctttccgagccagttattcaagtgcagttagttcatctagtcatggttctggtcatgacgatggtgatgctttaggcgatgtttttatatggggagaaggaaccggggaaggaattcttggtggtggtggttcaagagttggaagctcctcaggtgcaaaaatggactgccttgtaccaaaaccgttagaatttgccgtgcgacttgatgtgcagaacatatcttgtggaggaaggcatgctgcacttgttactaaacaaggcgagatatactcatggggtgaggaatcagggggacggcttggtcatggtgttgattgtgatgtgtctcagccaaaacttattgatgctctttctcatatgaacattgagcttgtagcatgtggtgaatatcacacttgtgctgttacactatctggagatctttacacatggggggatggcacatttaaatttgggcttttaggtcatggaaatgatatcagtcactgggtaccaaagcacgtgaatggaccattagagggcatacatgtttcatcaatttcatgtggaccttggcatacagccgtagtaacttccgctggacagcttttcacatttggtgatggatcttttggggttctgggccatggagatcgtgagagtatctcggtccccagggaagttgaatctctcaaagggctacgcacggtgcgggcagcttgtggtgtttggcacactgctgcagttgtagaagtcatggctgggaattcaagttctagcaattgttcttctggtaagatatttacatggggtgatggtgataaaggtcgcttaggtcatggtgacaagggaccaaaacttgtcccaacttgtgtggctgctttggtggagcccaatttttgtcaggttgcttgtgggcattgcttgacagtagccctaacaacttctgggcatgtgtatacaatgggcagtgctgtctatggtcaacttgggaatgcacaagctgatggtatgcttcctgtgcgtgttgaagggaagctacacaaaaactttgtggaggagatttcatgtggcgcttatcatgtggctgtattgacttctaagaccgaggtgtacacatggggaaaaggtgcaaatgggcggttaggtcatggcgatactgatgataagaatactcctacattggtcgaagcactgaaagataagcaagtcagaattgttgtttgtggaattaatttcactgcagcaatatgcattcacaaatgggtatctggagttgatcaatcgatgtgctcaggttgccgtcagccattcaacttgaggagaaaacgccataattgttacaactgtgctctagtattttgtcattcctgcagcagtaaaaaatccctgaaggcttcattagcacctaatacaaacaagccctaccgtgtctgcgatacctgctacagcaaactgacaaagggacttgagacggatatgcattcttcagcgaagcgagctgctactgtaccgggagtcagtgatgcaaatgaggaggatctggaaacaaggtcaaatgctcaactatcaaggttgtcttcaatggaatcttttaagcatttggatagcagatattccaagaaaaataagaagtttgaatttaatagcactcgtgtttcccctgtgcctaatggaagttcacattggagtggactaaacatttcaagatctttcaatcctgtatttggatcttcaaagaagttcttctcagcatcagttcctggatctagaattgtttctagggcaacatcaccgatttcaagaagagcaagccctccacgatctacaacaccaacacctactctgggtggtctaacatctccaagagttgttcccaatgatggcaagccaacaaatgatgcattaagccaagaggttctgaatttgaggtctcaggtggagagtcttgctaggaagtctcaactcctggaagtggagctggaaagaactaccaaacaactgaaggaagctatttctattgctggtgaggaaactgcaaagtgcaaggcagcaaaggaagtaatcaagtcactcactgcacaattgaaggggatggcagagagattacctggaggagcagccaagaacactaagttgccacctcttcctggaattttcattccaagtgacattccgtctatgcctacggagagtgagggcagcccaagcagctctggagaacaaatcataaatggtcataatggattgcttacttctaatggacaaagttctattaggaataaaacgagccatccagaagttggcaagaatggaggtaggctgcctgatgctgaatcttgccacgatgctgaatgggtagagcaagatgaaccaggtgtttacattactctcactgcgttgcctggaggcgccagagatctcaagcgggttcggttcagccggaagagattcagtgagacacaagcagaacagtggtggcaacagaaccgggcgagggtataccagcagtacaatgtccgcgtgattgacaaatcgaccgccagtgtcaacagtgacattgcggctaactgacactagattgacctggagaaacatacctgattacaagcggagctgaggccatgtaacctgaagggctctctcgtcagtcaagctgggttgctaacgtggctaccattttacctacccccctgagaagaggtggtttctgctcccaggaaaacaggaagttttttttatcttcagttttacataattctttactcttaccccgacccccccccctttttttttctcattgtgtgaaaagtagagtgcttgagcagaggtaatgtaaatgcttagtagaagcaggctaatctatcttgtaaatgcataagcaagcatcggttttagaatgccttgggaatcttccaatatgattgcaaatgcaaatggcaaatctgggccaagtattgatggtctctgaagtttgtagtagagcctgtatgcatataaatctgaagcaatcccgaggtcggaagtcgtacaagtgattaagtactccctctactgaaccaaatcataagatgttttagtaattctacgattgactttttt

SEQ ID NO: 74399 - DNA, 628 bp, Zea Mays
atgaattacaacattcagctcagattgctggcactacgcgggcatccagtggaacttcgatcttgacttcttctacatgtttgaggacgcgaagaatatctttggcaaacgttttatggaaattgttgcggtggtgggttggattatttggaaacaacgaaatggctgcatcttcagaaatgtcgttccctctttcacttcctcgaggatttgtttcaacgacatgttgaaactacaaatgtttagatttagccctgctcttcagcttgatgtatctcaatggctaaactctagaggaaggttatatacagaagcgcctattgattcagattttggagcaatttacggggaaaggaggacaaatagaggatcaaggctctatgcctgaagatggagatttgtttactagatatctttgcaaggaatgggtggaagtttagcaataggttacagtcttaagttgaaaagataccgatgacaaaactctatcatctttcctttgcactttgtcttgcatgacaatttttctggtttttctgtgttctgatttagttggttgaatgttgtaaggcagaaactaggctacttcattatcttaatgaaataaaaccccttcattaaaaaaatt

SEQ ID NO: 74400 - DNA, 627 bp, Zea Mays
gcccgcgattccaccttcctcagtgtcctcgacctcctacccaccactgctgcccaacatgtcgcccaggagggtcggccgccggtgctcgcaagcgacatccctttcagcttcgcgcaactcagcccaccactccccactctggcgctgctcaagcgctaggtcatgatcgcagttgaaggctacacactcctctaaggagcaccaggatgagcgccacaactatgtgtgacacaggaggagaaacaaagcgaagcaagcaaactacaagaacaaactactactagagcaggagaagcaaagaagccaactacaagaactaggagagaaaaccaacgaaaggagaacgaactatagaggaagatgggcgggcattgctgcagaagcttctgacttcacttctattcctattcccctcccgtctctttaggtacacttcttgcttgttgtaagcaaaagcgtgtaagagcatcctcaagactcaatttgatttaggtacaccagcagattgataatttgcagccttcatatcctcttgttctgtatttttattatcattcaaatgatatgtaacatttagttttgtgcatgtctaattataaaatttctactattgtattgaaaaac

SEQ ID NO: 74401 - DNA, 1777 bp, Zea Mays
cttagaaaccaagtagattctaaagaaaagttgcttctgctgcttctcatctgaagagcttgtttcaagtgttggtagctggactactgggtaaccaaaagaaacctgagggttaccaagctctcacctaatctttctctagaattgcgcatctcgacaagggccttcactaactgatgggaaagcatgattcggtaatttaggcccccgagccagatgatttgactgtaatgaaaggcaaaacaaaggaaccaatgtcacaccaaatgcatatggagtaaacttcatgaatccgttgtaaggttctttgcttactcgtgtcctatgattgtttctagtgaacgctcatactgcacatagaccattagaaacctggtattcatgaggatttctagcacatcggagttcctatgcaactcatcaccttccttgtcttgaagtcaggtggctgcagacgaagcataaacttgtttggtgcaatgacatgcaaatcgaattgaaccctcatgacgaggtcagagaaggctcccgagctgaacccctcgacctggacatggtcacagagcacggttgcagtccctcggtcggagctccgattaccaatgactatctgggtacatgacaatcaccataggacctaggaagaagcatagcgttatcctcagccacatcttcttggttagcccgtacaaactgcttccaccagttctagcagagcctggatagaggagattagcagtgctagaccctcttgcagatcaaaggccacaaacaaagcaagaattctgttattcacatttagtatgaataaccacggcagggttcatatgctacaacaaccattgtgctcttgtacctagaataattagagcatttgtgccagaaattccagtcacctgaaaaattcaagcggtagaaaagaaaacaaacaaaaaaggcaactaatgtaccattttgcttgttagagtaatatgttgggattttttttattgtaaacagcaccttatccaccaacttattttgatgtcaaaaggaacccaaacaagatgaatcctggataacatcctctttggggcagaggcgggatattgtacaccaaagttcaaacattgaaacatagcaattgcaaagtgtaaaaatccagattaccctcactacacatgctaaataaattcactacataattatttatcagtgtatttagttgggctagtagcttagattcatgccaaagtttgagtaccgattaaggtttctcacacatgacaaaggcagagaattggcagtgggcgtcttcaaaagattgtcattcgttcaacaaatcactgtcgcttgttcacacttttgtgccatgctcgcctctttcaccttctacattgtctcacttaattcccgactgcaaggaagaagaaaaaaactgtcataaggtgctacatagaaatttttaatctctagttacaaacaactgtggtagaacttaaattacgcacatatagtcataattcttcttcatgtgatagaaagtatgcaaaataatgagctagccaaaagaaagaaatatttttttatcagaaacaggtataaaaccaagttgggttgttcatctttactactctattaagagtacaacgaaggcgtccacaccccttgcccccgcctactgccgcccgcgcgccccgcctgctcgcccacagggcgaggcaacgcctccgccccgacgccctcgtcttacccatcagccgtgcaatacccacccccagccttcgacccaacagat

SEQ ID NO: 74402 - DNA, 1314 bp, Zea Mays
cgcgagcacgacgcgtttggttggcgccgccgcaacagtcacccattcctgcaaccgcatgggcattgccacagtttggcgcacctgccaagggccacagggtgtgctttaacgggccctccccttgtagcggattctggcgaggtccgaaggcccaacaggcctcaatctagcccaatctgtccgttcagcccgtccgcgggccagagtcgcgcgactggagtaccgcggcggcgaaccaagcctcgagcgaaggcggcgaacggaaagccgcctggcgactccagatctctccggcctgctcctcggctcctcgctcctcctgcgccgccgcggaggcagatacagcctctggatccagccccgctgcatctccgctgtggcggtgctttggctgcttcctgcaggttggagtttctgaatggccaatcccagggatgcggtggacgtcagctcctccatgtcggagctgagcgtagaagcagcgccttcatcgattgaggttcaagtccccaagcagggttctcctcggcacgcggataccttagacagagaatggatccacaggcagagtcagtttcagaagatgggatatcgtgatggtgtaacagaagggcagaaggactctgcccaggaaggcttcaatgttgggttcaggcaatctgtaaacgttggctacaaatggggccttgttcgtggggttggcagtgcgctagctagtcttcctgacagcttgaaagaaaaactggtgccggatgttcagcgtagggggaaattacaggacctgcaccgctcagtgcaagaaatatcagcagatgatgctgtccagatgttccacgagagtatctgccagagcaaccgtccttccgatggatcaggatcacacgtaacatcaacctcggatggagctacagaatcaaataggatgaaaagcctatcaaaggaccttgtgttgctgttgcgcgaatgctcggatattaaagtgagtgaagagctggcgtcagattcatgaacaaggtgcccgggaatttcaaccgtgttttctaggtctggcagaatcacatcgagttcccagattactgaacatataaccttagctgtcgatgaacgtgattcacggattctgttttggaaggacctggtactcaaaaggctcgagcttcagagacatggagtgtagctgtagatcctgttattacatatttcccttttgctgcaacctgtaactagaattgtaactgttaatcctataaatttgcagttcttaaacattaaacaatagtaatgcttttttctccctgcattttatcatct

SEQ ID NO: 74403 - DNA, 1289 bp, Zea Mays
cgcgagcacgacgcgtttggttggcgccgccgcaacagtcacccattcctgcaaccgcatgggcattgccacagtttggcgcacctgccaagggccacagggtgtgctttaacgggccctccccttgtagcggattctggcgaggtccgaaggcccaacaggcctcaatctagcccaatctgtccgttcagcccgtccgcgggccagagtcgcgcgactggagtaccgcggcggcgaaccaagcctcgagcgaaggcggcgaacggaaagccgcctggcgactccagatctctccggcctgctcctcggctcctcgctcctcctgcgccgccgcggaggcagatacagcctctggatccagccccgctgcatctccgctgtggttggagtttctgaatggccaatcccagggatgcggtggacgtcagctcctccatgtcggagctgagcgtagaagcagcgccttcatcgattgaggttcaagtccccaagcagggttctcctcggcacgcggataccttagacagagaatggatccacaggcagagtcagtttcagaagatgggatatcgtgatggtgtaacagaagggcagaaggactctgcccaggaaggcttcaatgttgggttcaggcaatctgtaaacgttggctacaaatggggccttgttcgtggggttggcagtgcgctagctagtcttcctgacagcttgaaagaaaaactggtgccggatgttcagcgtagggggaaattacaggacctgcaccgctcagtgcaagaaatatcagcagatgatgctgtccagatgttccacgagagtatctgccagagcaaccgtccttccgatggatcaggatcacacgtaacatcaacctcggatggagctacagaatcaaataggatgaaaagcctatcaaaggaccttgtgttgctgttgcgcgaatgctcggatattaaagtgagtgaagagctggcgtcagattcatgaacaaggtgcccgggaatttcaaccgtgttttctaggtctggcagaatcacatcgagttcccagattactgaacatataaccttagctgtcgatgaacgtgattcacggattctgttttggaaggacctggtactcaaaaggctcgagcttcagagacatggagtgtagctgtagatcctgttattacatatttcccttttgctgcaacctgtaactagaattgtaactgttaatcctataaatttgcagttcttaaacattaaacaatagtaatgcttttttctccctgcattttatcatct

SEQ ID NO: 74404 - DNA, 1372 bp, Zea Mays
cttttccgaaaaaaatccgtgacgaaagcttgtggatgcaaacggaaaggtccccgcgtacgtgtggctttttcccaccctgcctctctgctcttcccaagctccatccccttgctctcaccactgaaatgagcggcggcggcggccttgggtccggctgctcgtaccagaagttcgtccacttcgcgctggagcagacccgccaccgctccactctcgtcccccacccgtcccaggaaaagttcaggttcataaaagcaaatgaggataacaccgttctcaatgccttgtcattcagcacttccaaaattagactgcttcggagcttgacaattgagcaaaaaaactcggttcaggttcttgattttgctgccttctcaagacctgaatacgaccttcctatattttgtgccaatgccttctcatcccctgcacggagtattgttgtcttggacctcaaccctttgtatgataccactgaacacaaggattacagggaaaaatactacagggctttgatgccccttgtacacaagtacagtgagctccatgtctttaatagatgaaatgcagcttctgccctggggtggcaagattacaagtgagtcgctgagattcttctctcccattgttatctggacggtattcgagccaagcgaagccaaccaccaagctctatactcggccttcgtggattactatatggtctggcttgagttcatggacggagcagttcgcgaaagtagcaaagaaaaaatcgaccgcaatagagaagcgcaacataaatatctcacatggagagcagagaaggatcctgggtacccgctgctaaagaagttgatcggtgagagtggtgccaaggacctggtgagggagttcctcttcgaaggagttggctcgctcggaaccaagtcgtttctggagtatttcgccgagtacgcgcaagaggacgggacggtgaacaagaagcggagcatggcggggaagtcctttggaacccgaccttgggacgcccacggactgttcgtcggcgacgctgtggatggatagcggccaagcgggggctgttttgcttctacataagcagtttcatctcaatccccgttgtttattcacggaggacttgcgtagtggtttcagttgttgtttcaagtggttttgcttcggcaaaagtactggacggttttgctggctcaggtttcagatcatcttcaacctttccccatggcattccatgcgaggccggctacaatttctgttgtctctttacttcttttatagcattgttcatcatctttttcgttgtccggtgacttggctttggttgctgccgctgctcggtcggtggttttaaacttttgattcgagtcct

SEQ ID NO: 74405 - DNA, 1229 bp, Zea Mays
ctagctctggattcatggagattttgatacaattactgttccaacttgccacatgccaccgcatctacgaatagtgagaaaagctctgctggtttttcgtggctgctcatgaaaagttcaggttcataaaagcaaatgaggataacaccgttctcaatgccttgtcattcagcacttccaaaattagactgcttcggagcttgacaattgagcaaaaaaactcggttcaggttcttgattttgctgccttctcaagacctgaatacgaccttcctatattttgtgccaatgccttctcatcccctgcacggagtattgttgtcttggacctcaaccctttgtatgataccactgaacacaaggattacagggaaaaatactacagggctttgatgccccttgtacacaagtacagtgagatgaaatgcagcttctgccctggggtggcaagattacaagtgagtcgctgagattcttctctcccattgttatctggacggtattcgagccaagcgaagccaaccaccaagctctatactcggccttcgtggattactatatggtctggcttgagttcatggacggagcagttcgcgaaagtagcaaagaaaaaatcgaccgcaatagagaagcgcaacataaatatctcacatggagagcagagaaggatcctgggtacccgctgctaaagaagttgatcggtgagagtggtgccaaggacctggtgagggagttcctcttcgaaggagttggctcgctcggaaccaagtcgtttctggagtatttcgccgagtacgcgcaagaggacgggacggtgaacaagaagcggagcatggcggggaagtcctttggaacccgaccttgggacgcccacggactgttcgtcggcgacgctgtggatggatagcggccaagcgggggctgttttgcttctacataagcagtttcatctcaatccccgttgtttattcacggaggacttgcgtagtggtttcagttgttgtttcaagtggttttgcttcggcaaaagtactggacggttttgctggctcaggtttcagatcatcttcaacctttccccatggcattccatgcgaggccggctacaatttctgttgtctctttacttcttttatagcattgttcatcatctttttcgttgtccggtgacttggctttggttgctgccgctgctcggtcggtggttttaaacttttgattcgagtcct

SEQ ID NO: 74406 - DNA, 1160 bp, Zea Mays
ccgcatctacgaatagtgagaaaagctctgctggtttttcgtggctgctcatgaaaagttcaggttcataaaagcaaatgaggataacaccgttctcaatgccttgtcattcagcacttccaaaattagactgcttcggagcttgacaattgagcaaaaaaactcggttcaggttcttgattttgctgccttctcaagacctgaatacgaccttcctatattttgtgccaatgccttctcatcccctgcacggagtattgttgtcttggacctcaaccctttgtatgataccactgaacacaaggattacagggaaaaatactacagggctttgatgccccttgtacacaagtacagtgagcttctgccctggggtggcaagattacaagtgagtcgctgagattcttctctcccattgttatctggacggtattcgagccaagcgaagccaaccaccaagctctatactcggccttcgtggattactatatggtctggcttgagttcatggacggagcagttcgcgaaagtagcaaagaaaaaatcgaccgcaatagagaagcgcaacataaatatctcacatggagagcagagaaggatcctgggtacccgctgctaaagaagttgatcggtgagagtggtgccaaggacctggtgagggagttcctcttcgaaggagttggctcgctcggaaccaagtcgtttctggagtatttcgccgagtacgcgcaagaggacgggacggtgaacaagaagcggagcatggcggggaagtcctttggaacccgaccttgggacgcccacggactgttcgtcggcgacgctgtggatggatagcggccaagcgggggctgttttgcttctacataagcagtttcatctcaatccccgttgtttattcacggaggacttgcgtagtggtttcagttgttgtttcaagtggttttgcttcggcaaaagtactggacggttttgctggctcaggtttcagatcatcttcaacctttccccatggcattccatgcgaggccggctacaatttctgttgtctctttacttcttttatagcattgttcatcatctttttcgttgtccggtgacttggctttggttgctgccgctgctcggtcggtggttttaaacttttgattcgagtcct

SEQ ID NO: 74407 - DNA, 1179 bp, Zea Mays
cgaatagtgagaaaagctctgctggtttttcgtggctgctcatgaaaagttcaggttcataaaagcaaatgaggataacaccgttctcaatgccttgtcattcagcacttccaaaattagactgcttcggagcttgacaattgagcaaaaaaactcggttcaggttcttgattttgctgccttctcaagacctgaatacgaccttcctatattttgtgccaatgccttctcatcccctgcacggagtattgttgtcttggacctcaaccctttgtatgataccactgaacacaaggattacagggaaaaatactacagggctttgatgccccttgtacacaagtacagtgagctccatgtctttaatagatgaaatgcagcttctgccctggggtggcaagattacaagtgagtcgctgagattcttctctcccattgttatctggacggtattcgagccaagcgaagccaaccaccaagctctatactcggccttcgtggattactatatggtctggcttgagttcatggacggagcagttcgcgaaagtagcaaagaaaaaatcgaccgcaatagagaagcgcaacataaatatctcacatggagagcagagaaggatcctgggtacccgctgctaaagaagttgatcggtgagagtggtgccaaggacctggtgagggagttcctcttcgaaggagttggctcgctcggaaccaagtcgtttctggagtatttcgccgagtacgcgcaagaggacgggacggtgaacaagaagcggagcatggcggggaagtcctttggaacccgaccttgggacgcccacggactgttcgtcggcgacgctgtggatggatagcggccaagcgggggctgttttgcttctacataagcagtttcatctcaatccccgttgtttattcacggaggacttgcgtagtggtttcagttgttgtttcaagtggttttgcttcggcaaaagtactggacggttttgctggctcaggtttcagatcatcttcaacctttccccatggcattccatgcgaggccggctacaatttctgttgtctctttacttcttttatagcattgttcatcatctttttcgttgtccggtgacttggctttggttgctgccgctgctcggtcggtggttttaaacttttgattcgagtcct

SEQ ID NO: 74408 - DNA, 1804 bp, Zea Mays
gtgtgattgtaatgccaatatggcaattgaaactcgacgaaggtgatgccaaatatgaaaaaaaaaatctcctcgaaaaatgactccctagcattttgggctggctggctccccctccctccctgggatttctccttgcgtgcctccctcgctagggtttagggttctacagccagatagccaccatgcatcaccacttcctctcgcgcctcctcacccaccgtctcctcctccccgccgccacctctccctacgccgcgacgctctccacgccccccaggcgcgcttacgcccgccgcgccaagccgccaccagcgggggactccggagaccacgctgccgcctcctcccctgtagcaccgccgccgccgccggactcggaggcgaaggctgcgtttcagagagagaagctgtcgggcgagctgccgcggccgcccactgtcccgttccagccgcgtgtcgctaacgccgtgcacctcgtcggcaccatctgcgcgcccgtgcacatgcagaggctgcccgacggcagattctccgcggtctccgtgctcgtgcacgaccgtggcatcaactcacccaagttctgggttcccatagttttcaaagataactgggcacaaatagctgcttcccacttgaaagaaaatgatcttgtttatgtgtctgggaaattaacatgtgatggtccaccattcaagcttgctgatggcgaagcaaacattcaggtgttagcaaattcgctaaaatttgtcgatagtaaagctgttgaaatggatgccatactggatgaagatgaaggatttttggagattgttgaggctgaaaagaaagttgaagcaaaaaaaacgacctctacatttccgcctggcacagtttcagattgattgctgaatgctgatcctgattagcaaatgtgccggtgtatcatgttgatcttgctccaataactttggaaactggtcaggactgttggaactatcttgatgcctcaagtagtgaatataaagcaacatccatggttatactcttactgcatattgatgttttaagttgttcgttagaagttagaactgattcactcagagcaccttttgcgaatatatgtacatataggctattgtataacacgtagcctagaatgtctataaagactatgcttttaggatatcctgtatgttgaacgcacttgccaagtatgtttgagggttatgtaccttcattagggccttctttgcttaaattcaaactaataaactagaaaattagaaatagaagtcccagagaggtattacctcattcaaatgcaactacaaaatgtttgtagaggcatcagcagaagcattgtgcctccaaaatagttttttaacatatagtttgtataattgatttgataaaatacactagtggttcttaaatatgtctcatggtataatataggtccctaaattcttaaaatgcactgccggttccccaaatttgttagttacttaagtgtgccacttgattttctagttaccataatcagcataaacttgcctatatggtgtgaaaaatggtacctgacatgtagtttacacgacaacaacaatgaccatgatcctgttgtcgagcatggtgaccttttggtcccaagttaaagtgtaaagtgccacataagtaaatatttgctaaatagtgtgattaggatcccagtgacacactaaagtctctctttagttgttttttctaacctgctctctcttctcaaaaagccaaccaaaggggcggaaacctataggtgcttttggccaaaagcagctttccc

SEQ ID NO: 74409 - DNA, 698 bp, Zea Mays
acggtgctttgcacggctctgagtccctgacgacctcgttcccctccgctgtctcgcctctcccttggttcctcgcggcgacgactgggcgagcgcctcctcccctccctcactccctccgtgagctcctcgccggcggcgcgcgccgccgcccgtcgccacgtcttctccgctgacgtgggctcaccaggagcggtcttctgggcgatctcgcgggtttggctatgtaacattcgcctcagctgacgatgcaaagaatgttcttgattgcgagcatgttcttgggagccgtacattagaagtgaaggtagctactccaaaggaagaaatgaaatcacaaggatcaaagaaagctacaaggatattcgttgctcgaattccgcaatcggtggatgagtcgatgtttcgtagacattttgaagcttttggggaaattcttgatctttacatgccaaaggaacatggttcaaaagggcatcgtggaattgggtttatcacgtttcagagtgcagagtctgtggacaacatcatgcaagagtcacatgagcttgatggtacaacagtagttgttgatcgtgcgactcctaaggatgaagatgtcagataccccccgagtaggccatctcagggtggctatggtgcatataacgcatacatttcagctgctaccagtatttcactgtttgacttccatcaat

SEQ ID NO: 74410 - DNA, 1827 bp, Zea Mays
acggtgctttgcacggctctgagtccctgacgacctcgttcccctccgctgtctcgcctctcccttggttcctcgcggcgacgactgggcgagcgcctcctcccctccctcactccctccgtgagctcctcgccggcggcgcgcgccgccgcccgtcgccacgtcttctccgctgacgtgggctcaccaggttcaaggcaatatctgtgttaatcttggggaccttcagtagattgctgagagttctccttgatacaggggaataaagatccaaataagtttttgacattgatctgtagccagtactgcaatggctacgaagcttgtggttctcggtatcccctgggatgttgacactgaagggttacgagagtacatggccaagtttggacccctagacgattgtgtcgtcatgaaggagcggtcttctgggcgatctcgcgggtttggctatgtaacattcgcctcagctgacgatgcaaagaatgttcttgattgcgagcatgttcttgggagccgtacattagaagtgaaggtagctactccaaaggaagaaatgaaatcacaaggatcaaagaaagctacaaggatattcgttgctcgaattccgcaatcggtggatgagtcgatgtttcgtagacattttgaagcttttggggaaattcttgatctttacatgccaaagagtctgtggacaacatcatgcaagagtcacatgagcttgatggtacaacagtagttgttgatcgtgcgactcctaaggatgaagatgtcagataccccccgagtaggccatctcagggtggctatggtgcatataacgcatacatttcagctgctaccaggtatgcaactctgggtgcaccaacgctgtatgaccatcctggatcagcttatggaagagggtattatggaccctctcaagcagtgggcaagaagatatttgttggtagacttccacaagaagcaaacacagatgatctaaggcagtactttggcagatttggtcgaatcgtagatgcatatattccaaaggaccccaaaagaagcggccaccgaggttttgggtttgtcaccttcgctgatgatggtgtggcagaacgagtagctcgtagaagccatgaaattctaggccatgaggttgcaatagacacagcggcaccacttgagaatgattcagctgctggtgggtacattgatccaatggatctttacggagcttatggttcaatgagatctttcggcaggttctgtggcggtctagattacaattatggctatggccccagcagcggaagcagccgatcaagatcggattggcgataccgaccttactgaacgtgtccattgtcagtgatgttctagtttacctccagggaaggaaactgaaatggcgaaaagaaacattttaagaatgttaagtgttacgttaagtggcatgttaatcgtaagagggccgtgcggaatctgtcgatttgttcatgttgtaattttggacatggaaatgcttttatgcaatttctttgccgtgattcacattattgacacacgatgaaggcagcagcctttgtgtagttattgtgtgggagtgctggatgtgtgataaaaaaaaagatcattttcaaaagaagttataagcgatcgacgggcgcccggaaccgtctgatcgttagtctctacggttggttgcacgtggtaactatataattctttgcaacttaggccccctttggaccccgctgactaaaatcctgccgactaaagtttagttacatcatatcagaacactaattagaaatattaaatataacctaattataaaactaa

SEQ ID NO: 74411 - DNA, 3423 bp, Zea Mays
attctctctctcctttccccactactagctgcccgtcacccgccgctctgttccatccagcctgcgccggtcccattcgcccgccattccgccgcgcgccgccggcagggcgccgcgtcccgggaacgcgcgcgtgcggtgcgggcgcggggggattcgtcgcgcgcgggcaccaggagagggagggggcgcggggggattcgtcgaccgcgccacctgggaactgggatgccgtgatcgacgccgcgcgcctggagcctggggatggggcgggttggcctcggcgtggcggcgggttgcgcggccgccacgtgcgcgatcgctgccgcgctggtggcgcgcagggcgtcggcgcgggcgcgctggcgccgggccgtcgcgctgctcagggagttcgaggacggctgcgccacgccgccgccacgcctgcgccaggtcgtcgacgccatggtcgtcgagatgcacgccggcctcgcctccgacggcggcagcaagctcaagatgctgctcaccttcgtcgacgcgctgcccgccggaaatgaagaaggaacatattattccatcgatctcggaggaacaaactttagagtgttaagagttgaagttggtgctgggtctgtggtcacccgtcggaaggttgaacttcccatccctgaggaattgaccaagggtacaattgaggagctattcaactttgttgccatgactctaaaggaatttgtagaaacagaagatgggaacgatgaacaacgagcgcttggtttcacattttctttcccagttagacaaacatcagtatcttcggggtcattgattaggtggaataaagggtttttgattgaagatgcggttgggaaagatgtggctcaatgcttaaatgaagctcttgctaggaatggactaaatgtgcgagttactgcactggtgaatgacaccgtggggacattagctctaggacattatcacgatgaggatacagtggctgctgtgatcattggtgctggcaccaatgcttgctatattgaacgcactgatgcaattattaaatgtcagggtcttcttacaaactctggtggcatggtagtaaacatggaatggggcagtttctggtcatcacatttgccaagaactccttatgacatctcccttgatgatgagacacaaaaccgcaatgatcaggggtttgagaaaatggtctctgggatttatcttggggaaattgcaaggctggtgctgcatcgaatggctctagaatcagatttttttggtgacgctgctgataatctatgtacccccttcacattgagcacaccactcctcgctgcaattcgcaaggacgattcaccagatctgagcgaagtcaggaagatactgcaagaacatctgaaggtcagctttcctgacctccatgaagtcaaacatgtgttttcctccaacctgtgaaggttctggtgattttgctgcagataccggacactcctctgaaaactcgaaggctggttgtcaaagtgtgcgacatcgtcacccggagagctgcccgcctagccgccgctggtattgtcgggatactgaaaaagctcggccgtgatgggagcggtgttgcttcaagcgggagaacgggagggcagatgaggcggacggtggttgccatcgagggtgggctgtacgagggctacccggtgttcagggagtacctagacgaagccctggtggagatcttgggggaggaggtggcgcggacggtggcgctgagggtgacagtggatgggtctggggccggcgctgccctccttgccgccgtacattcgtcgaatagacagcaagttcacagagagtaccaagctgtcatgggctgggctgacagaggacagggatccttcagtaataagaagcccgatatgagaacagcacataccataacggaagtacgttcgtgggccacgagccacaaaggccgaaagcgtgcgccattcgaaaaacgcgacggtttcttccagaaggctccgaggctccaaccacacgtcggttcctccgactccgcgcgcgtctcccgccgttccgccggcaccgtacacgatggctctccaattcgattaatcggctctgtggctgtcggatcaagtttcgcttgtacagttacgacaaggattacacggattgtgcgacgaatgatgcacgggaggaggatagtacggtacaaacaaggcactcctgagtgggatgagatgctagttacaagtgaaataacaggcagtgttatttgttaatcaaggcactactaccctcaagcaactttctgcactgttgataaccgggatactggttcattgaatgtgcaatgctgccgtaacctgagagagacggtgctgaagaaaggaaccccactaggatcttgccaaagacttccttagcaaatctgcggatggagctcctcggtattagaagattcagccaaggatgtggaacttcccagaggccttgtgccctcagtttcaactcagaggtgtgcaccctgtccaagaactccagtgtcgtcactattgaagttcttggttagctcgaggcagtatagtactcttccatccgactgaaaatggcttgcttcgactgggtcttgtggcttgaaggacgccctccagttgttgaggacgcctgtcctgtttatgatgacaaaaccttcaacgtagtcaaaggagttctctgccattatcagcatctcctggtcctcggtgaagctttcaaaatccgagctcaagtgcaatccttgctctggtgatgatcccgaactgaccaagaccaccgagagcagcatagaagagatcagcgttatcatcgggtgagcaggtttatgaacattgaagtgaacttcaggcagtggagcagaatctagagggcggtgcggagcattctttaaagaagcttatgatgtttttcttactgagtcaatgtatgcataagctaataatatttctgaaaattattagagcgatattgctggtgcaacatcctatcctctggaagcatagtagatagaggtttctctatattatctgtctctaagggctctttctcacaaaacttcaactttgaacaaatactatgaagagcatgattgtattctgcaacagatttgaattcttgcagatgaagctgattccactcatgattggccgaaggtcatatgagttccttctgctgttcatagcgctctttacgagctttccataagttatgtgggcatctttccataaggtactcttgcttgagatattaatgaatgtagagcctcaaaaggaaaagagcagtgttctttttaacattattaactgggttatcaccaatgattggtgttgcaatagcatcaataatctcacgagaagtaaaaataatttcaatgtctgaagcccccaagttaggtaattt

SEQ ID NO: 74412 - DNA, 3344 bp, Zea Mays
attctctctctcctttccccactactagctgcccgtcacccgccgctctgttccatccagcctgcgccggtcccattcgcccgccattccgccgcgcgccgccggcagggcgccgcgtcccgggaacgcgcgcgtgcggtgcgggcgcggggggattcgtcgcgcgcgggcaccaggagagggagggggcgcggggggattcgtcgaccgcgccacctgggaactgggatgccgtgatcgacgccgcgcgcctggagcctggggatggggcgggttggcctcggcgtggcggcgggttgcgcggccgccacgtgcgcgatcgctgccgcgctggtggcgcgcagggcgtcggcgcgggcgcgctggcgccgggccgtcgcgctgctcagggagttcgaggacggctgcgccacgccgccgccacgcctgcgccaggtcgtcgacgccatggtcgtcgagatgcacgccggcctcgcctccgacggcggcagcaagctcaagatgctgctcaccttcgtcgacgcgctgcccgccggaaatgaagaaggaacatattattccatcgatctcggaggaacaaactttagagtgttaagagttgaagttggtgctgggtctgtggtcacccgtcggaaggttgaacttcccatccctgaggaattgaccaagggtacaattgaggagctattcaactttgttgccatgactctaaaggaatttgtagaaacagaagatgggaacgatgaacaacgagcgcttggtttcacattttctttcccagttagacaaacatcagtatcttcggggtcattgattaggtggaataaagggtttttgattgaagatgcggttgggaaagatgtggctcaatgcttaaatgaagctcttgctaggaatggactaaatgtgcgagttactgcactggtgaatgacaccgtggggacattagctctaggacattatcacgatgaggatacagtggctgctgtgatcattggtgctggcaccaatgcttgctatattgaacgcactgatgcaattattaaatgtcagggtcttcttacaaactctggtggcatggtagtaaacatggaatggggcagtttctggtcatcacatttgccaagaactccttatgacatctcccttgatgatgagacacaaaaccgcaatgatcaggggtttgagaaaatggtctctgggatttatcttggggaaattgcaaggctggtgctgcatcgaatggctctagaatcagatttttttggtgacgctgctgataatctatgtacccccttcacattgagcacaccactcctcgctgcaattcgcaaggacgattcaccagatctgagcgaagtcaggaagatactgcaagaacatctgaagataccggacactcctctgaaaactcgaaggctggttgtcaaagtgtgcgacatcgtcacccggagagctgcccgcctagccgccgctggtattgtcgggatactgaaaaagctcggccgtgatgggagcggtgttgcttcaagcgggagaacgggagggcagatgaggcggacggtggttgccatcgagggtgggctgtacgagggctacccggtgttcagggagtacctagacgaagccctggtggagatcttgggggaggaggtggcgcggacggtggcgctgagggtgacagtggatgggtctggggccggcgctgccctccttgccgccgtacattcgtcgaatagacagcaagttcacagagagtaccaagctgtcatgggctgggctgacagaggacagggatccttcagtaataagaagcccgatatgagaacagcacataccataacggaagtacgttcgtgggccacgagccacaaaggccgaaagcgtgcgccattcgaaaaacgcgacggtttcttccagaaggctccgaggctccaaccacacgtcggttcctccgactccgcgcgcgtctcccgccgttccgccggcaccgtacacgatggctctccaattcgattaatcggctctgtggctgtcggatcaagtttcgcttgtacagttacgacaaggattacacggattgtgcgacgaatgatgcacgggaggaggatagtacggtacaaacaaggcactcctgagtgggatgagatgctagttacaagtgaaataacaggcagtgttatttgttaatcaaggtttcttggaccgctacgatcctccagtgattgcctccaaaggtgtcagagttcaggttcattgaatgtgcaatgctgccgtaacctgagagagacggtgctgaagaaaggaaccccactaggatcttgccaaagacttccttagcaaatctgcggatggagctcctcggtattagaagattcagccaaggatgtggaacttcccagaggccttgtgccctcagtttcaactcagaggtgtgcaccctgtccaagaactccagtgtcgtcactattgaagttcttggttagctcgaggcagtatagtactcttccatccgactgaaaatggcttgcttcgactgggtcttgtggcttgaaggacgccctccagttgttgaggacgcctgtcctgtttatgatgacaaaaccttcaacgtagtcaaaggagttctctgccattatcagcatctcctggtcctcggtgaagctttcaaaatccgagctcaagtgcaatccttgctctggtgatgatcccgaactgaccaagaccaccgagagcagcatagaagagatcagcgttatcatcgggtttatgaacattgaagtgaacttcaggcagtggagcagaatctagagggcggtgcggagcattctttaaagaagcttatgatgtttttcttactgagtcaatgtatgcataagctaataatatttctgaaaattattagagcgatattgctggtgcaacatcctatcctctggaagcatagtagatagaggtttctctatattatctgtctctaagggctctttctcacaaaacttcaactttgaacaaatactatgaagagcatgattgtattctgcaacagatttgaattcttgcagatgaagctgattccactcatgattggccgaaggtcatatgagttccttctgctgttcatagcgctctttacgagctttccataagttatgtgggcatctttccataaggtactcttgcttgagatattaatgaatgtagagcctcaaaaggaaaagagcagtgttctttttaacattattaactgggttatcaccaatgattggtgttgcaatagcatcaataatctcacgagaagtaaaaataatttcaatgtctgaagcccccaagttaggtaattt

SEQ ID NO: 74413 - DNA, 3496 bp, Zea Mays
attctctctctcctttccccactactagctgcccgtcacccgccgctctgttccatccagcctgcgccggtcccattcgcccgccattccgccgcgcgccgccggcagggcgccgcgtcccgggaacgcgcgcgtgcggtgcgggcgcggggggattcgtcgcgcgcgggcaccaggagagggagggggcgcggggggattcgtcgaccgcgccacctgggaactgggatgccgtgatcgacgccgcgcgcctggagcctggggatggggcgggttggcctcggcgtggcggcgggttgcgcggccgccacgtgcgcgatcgctgccgcgctggtggcgcgcagggcgtcggcgcgggcgcgctggcgccgggccgtcgcgctgctcagggagttcgaggacggctgcgccacgccgccgccacgcctgcgccaggtcgtcgacgccatggtcgtcgagatgcacgccggcctcgcctccgacggcggcagcaagctcaagatgctgctcaccttcgtcgacgcgctgcccgccggaaatgaagaaggaacatattattccatcgatctcggaggaacaaactttagagtgttaagagttgaagttggtgctgggtctgtggtcacccgtcggaaggttgaacttcccatccctgaggaattgaccaagggtacaattgaggagctattcaactttgttgccatgactctaaaggaatttgtagaaacagaagatgggaacgatgaacaacgagcgcttggtttcacattttctttcccagttagacaaacatcagtatcttcggggtcattgattaggtggaataaagggtttttgattgaagatgcggttgggaaagatgtggctcaatgcttaaatgaagctcttgctaggaatggactaaatgtgcgagttactgcactggtgaatgacaccgtggggacattagctctaggacattatcacgatgaggatacagtggctgctgtgatcattggtgctggcaccaatgcttgctatattgaacgcactgatgcaattattaaatgtcagggtcttcttacaaactctggtggcatggtagtaaacatggaatggggcagtttctggtcatcacatttgccaagaactccttatgacatctcccttgatgatgagacacaaaaccgcaatgatcaggggtttgagaaaatggtctctgggatttatcttggggaaattgcaaggctggtgctgcatcgaatggctctagaatcagatttttttggtgacgctgctgataatctatgtacccccttcacattgagcacaccactcctcgctgcaattcgcaaggacgattcaccagatctgagcgaagtcaggaagatactgcaagaacatctgaagataccggacactcctctgaaaactcgaaggctggttgtcaaagtgtgcgacatcgtcacccggagagctgcccgcctagccgccgctggtattgtcgggatactgaaaaagctcggccgtgatgggagcggtgttgcttcaagcgggagaacgggagggcagatgaggcggacggtggttgccatcgagggtgggctgtacgagggctacccggtgttcagggagtacctagacgaagccctggtggagatcttgggggaggaggtggcgcggacggtggcgctgagggtgacagtggatgggtctggggccggcgctgccctccttgccgccgtacattcgtcgaatagacagcaagttcacagagagtaccaagctgtcatgggctgggctgacagaggacagggatccttcagtaataagaagcccgatatgagaacagcacataccataacggaagtacgttcgtgggccacgagccacaaaggccgaaagcgtgcgccattcgaaaaacgcgacggtttcttccagaaggctccgaggctccaaccacacgtcggttcctccgactccgcgcgcgtctcccgccgttccgccggcaccgtacacgatggctctccaattcgattaatcggctctgtggctgtcggatcaagtttcgcttgtacagttacgacaaggattacacggattgtgcgacgaatgatgcacgggaggaggatagtacggtacaaacaaggcactcctgagtgggatgagatgctagttacaagtgaaataacaggcagtgttatttgttaatcaaggcactactaccctcaagcaactttctgcactgttgataaccgggatactggttagtgatcagttgatcatcacagctcgtctcaattatcaacgctgtaacaacatacaggtttcttggaccgctacgatcctccagtgattgcctccaaaggtgtcagagttcaggttcattgaatgtgcaatgctgccgtaacctgagagagacggtgctgaagaaaggaaccccactaggatcttgccaaagacttccttagcaaatctgcggatggagctcctcggtattagaagattcagccaaggatgtggaacttcccagaggccttgtgccctcagtttcaactcagaggtgtgcaccctgtccaagaactccagcgaaataacaggttcacctgttccatggtatcagtgtcgtcactattgaagttcttggttagctcgaggcagtatagtactcttccatccgactgaaaatggcttgcttcgactgggtcttgtggcttgaaggacgccctccagttgttgaggacgcctgtcctgtttatgatgacaaaaccttcaacgtagtcaaaggagttctctgccattatcagcatctcctggtcctcggtgaagctttcaaaatccgagctcaagtgcaatccttgctctggtgatgatcccgaactgaccaagaccaccgagagcagcatagaagagatcagcgttatcatcgggtgagcaggtttatgaacattgaagtgaacttcaggcagtggagcagaatctagagggcggtgcggagcattctttaaagaagcttatgatgtttttcttactgagtcaatgtatgcataagctaataatatttctgaaaattattagagcgatattgctggtgcaacatcctatcctctggaagcatagtagatagaggtttctctatattatctgtctctaagggctctttctcacaaaacttcaactttgaacaaatactatgaagagcatgattgtattctgcaacagatttgaattcttgcagatgaagctgattccactcatgattggccgaaggtcatatgagttccttctgctgttcatagcgctctttacgagctttccataagttatgtgggcatctttccataaggtactcttgcttgagatattaatgaatgtagagcctcaaaaggaaaagagcagtgttctttttaacattattaactgggttatcaccaatgattggtgttgcaatagcatcaataatctcacgagaagtaaaaataatttcaatgtctgaagcccccaagttaggtaattt

SEQ ID NO: 74414 - DNA, 3642 bp, Zea Mays
attctctctctcctttccccactactagctgcccgtcacccgccgctctgttccatccagcctgcgccggtcccattcgcccgccattccgccgcgcgccgccggcagggcgccgcgtcccgggaacgcgcgcgtgcggtgcgggcgcggggggattcgtcgcgcgcgggcaccaggagagggagggggcgcggggggattcgtcgaccgcgccacctgggaactgggatgccgtgatcgacgccgcgcgcctggagcctggggatggggcgggttggcctcggcgtggcggcgggttgcgcggccgccacgtgcgcgatcgctgccgcgctggtggcgcgcagggcgtcggcgcgggcgcgctggcgccgggccgtcgcgctgctcagggagttcgaggacggctgcgccacgccgccgccacgcctgcgccaggtcgtcgacgccatggtcgtcgagatgcacgccggcctcgcctccgacggcggcagcaagctcaagatgctgctcaccttcgtcgacgcgctgcccgccggaaatgaagaaggaacatattattccatcgatctcggaggaacaaactttagagtgttaagagttgaagttggtgctgggtctgtggtcacccgtcggaaggttgaacttcccatccctgaggaattgaccaagggagctattcaactttgttgccatgactctaaaggaatttgtagaaacagaagatgggaacgatgaacaacgagcgcttggtttcacattttctttcccagttagacaaacatcagtatcttcggggtcattgattaggtggaataaagggtttttgattgaagatgcggttgggaaagatgtggctcaatgcttaaatgaagctcttgctaggaatggactaaatgtgcgagttactgcactggtgaatgacaccgtggggacattagctctaggacattatcacgatgaggatacagtggctgctgtgatcattggtgctggcaccaatgcttgctatattgaacgcactgatgcaattattaaatgtcagggtcttcttacaaactctggtggcatggtagtaaacatggaatggggcagtttctggtcatcacatttgccaagaactccttatgacatctcccttgatgatgagacacaaaaccgcaatgatcaggtgaacaccctgtgcaaatcatgttatgtaatagttgtaccttttgttagtattgccgaacaaatttgacattgatgcaggggtttgagaaaatggtctctgggatttatcttggggaaattgcaaggctggtgctgcatcgaatggctctagaatcagatttttttggtgacgctgctgataatctatgtacccccttcacattgagcacaccactcctcgctgcaattcgcaaggacgattcaccagatctgagcgaagtcaggaagatactgcaagaacatctgaaggtcagctttcctgacctccatgaagtcaaacatgtgttttcctccaacctgtgaaggttctggtgattttgctgcagataccggacactcctctgaaaactcgaaggctggttgtcaaagtgtgcgacatcgtcacccggagagctgcccgcctagccgccgctggtattgtcgggatactgaaaaagctcggccgtgatgggagcggtgttgcttcaagcgggagaacgggagggcagatgaggcggacggtggttgccatcgagggtgggctgtacgagggctacccggtgttcagggagtacctagacgaagccctggtggagatcttgggggaggaggtggcgcggacggtggcgctgagggtgacagtggatgggtctggggccggcgctgccctccttgccgccgtacattcgtcgaatagacagcaagttcacagagagtaccaagctgtcatgggctgggctgacagaggacagggatccttcagtaataagaagcccgatatgagaacagcacataccataacggaagtacgttcgtgggccacgagccacaaaggccgaaagcgtgcgccattcgaaaaacgcgacggtttcttccagaaggctccgaggctccaaccacacgtcggttcctccgactccgcgcgcgtctcccgccgttccgccggcaccgtacacgatggctctccaattcgattaatcggctctgtggctgtcggatcaagtttcgcttgtacagttacgacaaggattacacggattgtgcgacgaatgatgcacgggaggaggatagtacggtacaaacaaggcactcctgagtgggatgagatgctagttacaagtgaaataacaggcagtgttatttgttaatcaaggcactactaccctcaagcaactttctgcactgttgataaccgggatactggttagtgatcagttgatcatcacagctcgtctcaattatcaacgctgtaacaacatacaggtttcttggaccgctacgatcctccagtgattgcctccaaaggtgtcagagttcaggttcattgaatgtgcaatgctgccgtaacctgagagagacggtgctgaagaaaggaaccccactaggatcttgccaaagacttccttagcaaatctgcggatggagctcctcggtattagaagattcagccaaggatgtggaacttcccagaggccttgtgccctcagtttcaactcagaggtgtgcaccctgtccaagaactccagcgaaataacaggttcacctgttccatggtatcagtgtcgtcactattgaagttcttggttagctcgaggcagtatagtactcttccatccgactgaaaatggcttgcttcgactgggtcttgtggcttgaaggacgccctccagttgttgaggacgcctgtcctgtttatgatgacaaaaccttcaacgtagtcaaaggagttctctgccattatcagcatctcctggtcctcggtgaagctttcaaaatccgagctcaagtgcaatccttgctctggtgatgatcccgaactgaccaagaccaccgagagcagcatagaagagatcagcgttatcatcgggtgagcaggtttatgaacattgaagtgaacttcaggcagtggagcagaatctagagggcggtgcggagcattctttaaagaagcttatgatgtttttcttactgagtcaatgtatgcataagctaataatatttctgaaaattattagagcgatattgctggtgcaacatcctatcctctggaagcatagtagatagaggtttctctatattatctgtctctaagggctctttctcacaaaacttcaactttgaacaaatactatgaagagcatgattgtattctgcaacagatttgaattcttgcagatgaagctgattccactcatgattggccgaaggtcatatgagttccttctgctgttcatagcgctctttacgagctttccataagttatgtgggcatctttccataaggtactcttgcttgagatattaatgaatgtagagcctcaaaaggaaaagagcagtgttctttttaacattattaactgggttatcaccaatgattggtgttgcaatagcatcaataatctcacgagaagtaaaaataatttcaatgtctgaagcccccaagttaggtaattt

SEQ ID NO: 74415 - DNA, 2206 bp, Zea Mays
tcccgagcaagcgttttgcttcgcaaggaagcccccccaccccaccaatctccgccgtcgcattggcaccccaccggaccaaacccgaatctcatacgctctcttgctcgcttcaatcaatggcgggctagtgccgaagcgaagacgcgagaacctgcgatatttctggctactgccattgacattgtggaaaggctgctggcagaagatgagacagaaacctctcagaagataagtgccgaaccaatgagtgggacaaagtcagcttctataataggcacaaaagtagcccagtgcctggccaaaagaggtgactgcagtagctcactccaaaaggcaggcatttttgactgggttgatgcttcgagtgatgatgaatgcacagccattatgacttccaggaaaaaacaaaggatccaagctaatactcaagcgaagaatttgacctcccagagatatggtggtcgtggatcaattgccactgttggttccatatcagattgtactggcgatggcagctgaagccatggaagcactgtccaatgcatcaactgtcaattatgtagtcagggagaatgcacatcctgaaagctcagttcttagaacaaacatgggaaaagaaagcaaagccaataagatatgttttgagttgtcacttcaaaagcgaattggtggaagttcaagctctgtgaaaaagcatcccagcaagttaaaagacaagaagagtcgaaaacagatgacaaggaaagcaaaaggaagcatagacagtaccactatagaaggagatacaaatcatgaggtgtctgaaggagttaagggatctggtgcaagtgattcaaatgttgtaggttctaatgctgtaatgtgccctaaaaggaagaggacctatatgtttatctcaagaagttcaaaagttcaattcaataaagctgggagctcaactacaccaagatccaaaagtaaagaagtagttgatgtatcaacaacaaaaccagttagtgtatctggccctgatttaaaccagcttgccagagtagaaaaacaattcacatctgcacaggaagatcataactccagcttgacaaacagaggaccactgggagagctaaacagtaaatgctcccattttaggacacaagtatcaaagaagccactgaagagaggacttgtgaaatcaccaggttccagagaacttgtcagtctgttaagaaatgaagcatctctagttttgcagacaagcaggcaaagaagaaacatgtccaaagtccatgtcctgttgagccatagcatggataaggaaaccatcaaaatgcaaacaaagatattgatatattttggactacaagtggcggcaactatttcagaagctacacactttgttgccgaaaagtttgcccgtacaaggaacatgcttcaagcaatagctatgggaatacctatagtcacgccatcatggcttgaatgctgtagagaagcaaggtgcttcgttgatgagaaggcatacattatgagagatatgaagaaggaaaaggagctaggttttagcatgcctgtctcacttagcagagcccgcaaaaaaccattgcttcagggtagaagagtattaatcacaccaaacgccaagcctagcaaggagcttctgaagagtttagtagttgcagctcacggtcagccattggagagaatcacagcctctacaatgaagaagaaaatttttgagggggcctttgtactctcttgtgaacaagatcacagtgtttgcatgccattaattgagagtggtctggaagtgtttgactcggagcttctactgaacggtattgtcactcagaagctagagttcgccaggtatcgtctttttccatgaataagccatatgcccatatgagtgcgatctgggtaggtttggttccggcaccatgcatgccagacaaagcactcttgtacatatgcatccttatccttctctagttactctgaccccttgcacactagtgtgtatttattgttcgagcctctggcccttattaccataattatttgcttttgtattggctcttggtacgtaggccatgtgagatttttgtacccttttgttgtatggcagtgaccatgttagcctatattaaagctaagtacctgcatggattggatatatcatataccattctgccaatgagcttattcagagggcttgttcgtttca

SEQ ID NO: 74416 - DNA, 2277 bp, Zea Mays
accaatctccgccgtcgcattggcaccccaccggaccaaacccgaatctcatacgctctcttgctcgcttcaatcaatggcgggctagtgccgaagcgaagacgcgagaacctgcgatatttctggttctgcttgcctgtcactctatcagcaaccacagcttgggtgcaatgagcaccgcaagagttcagggaagattagattaccttaattcacaggagcctggtgatgcatcacaggctactgccattgacattgtggaaaggctgctggcagaagatgagacagaaacctctcagaagataagtgccgaaccaatgagtgggacaaagtcagcttctataataggcacaaaagtagcccagtgcctggccaaaagaggtgactgcagtagctcactccaaaaggcaggcatttttgactgggttgatgcttcgagtgatgatgaatgcacagccattatgacttccaggaaaaaacaaaggatccaagctaatactcaagcgaagaatttgacctcccagagatatggtggtcgtggatcaattgccactgttggttccatatcagattgtactggcgatggcagctgaagccatggaagcactgtccaatgcatcaactgtcaattatgtagtcagggagaatgcacatcctgaaagctcagttcttagaacaaacatgggaaaagaaagcaaagccaataagatatgttttgagttgtcacttcaaaagcgaattggtggaagttcaagctctgtgaaaaagcatcccagcaagttaaaagacaagaagagtcgaaaacagatgacaaggaaagcaaaaggaagcatagacagtaccactatagaaggagatacaaatcatgaggtgtctgaaggagttaagggatctggtgcaagtgattcaaatgttgtaggttctaatgctgtaatgtgccctaaaaggaagaggacctatatgtttatctcaagaagttcaaaagttcaattcaataaagctgggagctcaactacaccaagatccaaaagtaaagaagtagttgatgtatcaacaacaaaaccagttagtgtatctggccctgatttaaaccagcttgccagagtagaaaaacaattcacatctgcacaggaagatcataactccagcttgacaaacagaggaccactgggagagctaaacagtaaatgctcccattttaggacacaagtatcaaagaagccactgaagagaggacttgtgaaatcaccaggttccagagaacttgtcagtctgttaagaaatgaagcatctctagttttgcagacaagcaggcaaagaagaaacatgtccaaagtccatgtcctgttgagccatagcatggataaggaaaccatcaaaatgcaaacaaagatattgatatattttggactacaagtggcggcaactatttcagaagctacacactttgttgccgaaaagtttgcccgtacaaggaacatgcttcaagcaatagctatgggaatacctatagtcacgccatcatggcttgaatgctgtagagaagcaaggtgcttcgttgatgagaaggcatacattatgagagatatgaagaaggaaaaggagctaggttttagcatgcctgtctcacttagcagagcccgcaaaaaaccattgcttcagggtagaagagtattaatcacaccaaacgccaagcctagcaaggagcttctgaagagtttagtagttgcagctcacggtcagccattggagagaatcacagcctctacaatgaagaagaaaatttttgagggggcctttgtactctcttgtgaacaagatcacagtgtttgcatgccattaattgagagtggtctggaagtgtttgactcggagcttctactgaacggtattgtcactcagaagctagagttcgccaggtatcgtctttttccatgaataagccatatgcccatatgagtgcgatctgggtaggtttggttccggcaccatgcatgccagacaaagcactcttgtacatatgcatccttatccttctctagttactctgaccccttgcacactagtgtgtatttattgttcgagcctctggcccttattaccataattatttgcttttgtattggctcttggtacgtaggccatgtgagatttttgtacccttttgttgtatggcagtgaccatgttagcctatattaaagctaagtacctgcatggattggatatatcatataccattctgccaatgagcttattcagagggcttgttcgtttca

SEQ ID NO: 74417 - DNA, 2093 bp, Zea Mays
ctccgccgtcgcattggcaccccaccggaccaaacccgaatctcatacgctctcttgctcgcttcaatcaatggcgggctagtgccgaagcgaagacgcgagaacctgcgatatttctggctactgccattgacattgtggaaaggctgctggcagaagatgagacagaaacctctcagaagataagtgccgaaccaatgagtgggacaaagtcagcttctataataggcacaaaagtagcccagtgcctggccaaaagaggtgactgcagtagctcactccaaaaggcaggcatttttgactgggttgatgcttcgagtgatgatgaatgcacagccattatgacttccaggaaaaaacaaaggatccaagctaatactcaagcgaagaatttgacctcccagagatatggtggtcgtggatcaattgccactgttggttccatatcagattgtactggcggtaagtcaggcttgaattcttctaaaaagccagaacctgttggttctaccgatgatttatatgatattggtccatatactcagatggcagctgaagccatggaagcactgtccaatgcatcaactgtcaattatgtagtcagggagaatgcacatcctgaaagctcagttcttagaacaaacatgggaaaagaaagcaaagccaataagatatgttttgagttgtcacttcaaaagcgaattggtggaagttcaagctctgtgaaaaagcatcccagcaagttaaaagacaagaagagtcgaaaacagatgacaaggaaagcaaaaggaagcatagacagtaccactatagaaggagatacaaatcatgaggtgtctgaaggagttaagggatctggtgcaagtgattcaaatgttgtaggttctaatgctgtaatgtgccctaaaaggaagaggacctatatgtttatctcaagaagttcaaaagttcaattcaataaagctgggagctcaactacaccaagatccaaaagtaaagaagtagttgatgtatcaacaacaaaaccagttagtgtatctggccctgatttaaaccagcttgccagagtagaaaaacaattcacatctgcacaggaagatcataactccagcttgacaaacagaggaccactgggagagctaaacagtaaatgctcccattttaggacacaagtatcaaagaagccactgaagagaggacttgtgaaatcaccaggttccagagaacttgtcagtctgttaagaaatgaagcatctctagttttgcagacaagcaggcaaagaagaaacatgtccaaagtccatgtcctgttgagccatagcatggataaggaaaccatcaaaatgcaaacaaagatattgatatattttggactacaagtggcggcaactatttcagaagctacacactttgttgccgaaaagtttgcccgtacaaggaacatgcttcaagcaatagctatgggaatacctatagtcacgccatcatggcttgaatgctgtagagaagcaaggtgcttcgttgatgagaaggcatacattatgagagatatgaagaaggaaaaggagctaggttttagcatgcctgtctcacttagcagagcccgcaaaaaaccattgcttcagggtagaagagtattaatcacaccaaacgccaagcctagcaaggagcttctgaagagtttagtagttgcagctcacggtcagccattggagagaatcacagcctctacaatgaagaagaaaatttttgagggggcctttgtactctcttgtgaacaagatcacagtgtttgcatgccattaattgagagtggtctggaagtgtttgactcggagcttctactgaacggtattgtcactcagaagctagagttcgccaggtgctttgagataggaaaaggaggcatttggaacattatcccatggcatgtcgatgatgtggatacaaagctatacacatcgtcgatgcattaacttgatgtggcaatcagacaagttgtgctcgcaaacgtcctcaagagcaccagtgggcacatcgaatataggcgtggcaccgacaatcgctgagaagatccagcaactgaagatgat

SEQ ID NO: 74418 - DNA, 2259 bp, Zea Mays
tcacaactggtgcttcagtctaaggttctgcttgcctgtcactctatcagcaaccacagcttgggtgcaatgagcaccgcaagagttcagggaagattagattaccttaattcacaggagcctggtgatgcatcacaggctactgccattgacattgtggaaaggctgctggcagaagatgagacagaaacctctcagaagataagtgccgaaccaatgagtgggacaaagtcagcttctataataggcacaaaagtagcccagtgcctggccaaaagaggtgactgcagtagctcactccaaaaggcaggcatttttgactgggttgatgcttcgagtgatgatgaatgcacagccattatgacttccaggaaaaaacaaaggatccaagctaatactcaagcgaagaatttgacctcccagagatatggtggtcgtggatcaattgccactgttggttccatatcagattgtactggcggtaagtcaggcttgaattcttctaaaaagccagaacctgttggttctaccgatgatttatatgatattggtccatatactcagatggcagctgaagccatggaagcactgtccaatgcatcaactgtcaattatgtagtcagggagaatgcacatcctgaaagctcagttcttagaacaaacatgggaaaagaaagcaaagccaataagatatgttttgagttgtcacttcaaaagcgaattggtggaagttcaagctctgtgaaaaagcatcccagcaagttaaaagacaagaagagtcgaaaacagatgacaaggaaagcaaaaggaagcatagacagtaccactatagaaggagatacaaatcatgaggtgtctgaaggagttaagggatctggtgcaagtgattcaaatgttgtaggttctaatgctgtaatgtgccctaaaaggaagaggacctatatgtttatctcaagaagttcaaaagttcaattcaataaagctgggagctcaactacaccaagatccaaaagtaaagaagtagttgatgtatcaacaacaaaaccagttagtgtatctggccctgatttaaaccagcttgccagagtagaaaaacaattcacatctgcacaggaagatcataactccagcttgacaaacagaggaccactgggagagctaaacagtaaatgctcccattttaggacacaagtatcaaagaagccactgaagagaggacttgtgaaatcaccaggttccagagaacttgtcagtctgttaagaaatgaagcatctctagttttgcagacaagcaggcaaagaagaaacatgtccaaagtccatgtcctgttgagccatagcatggataaggaaaccatcaaaatgcaaacaaagatattgatatattttggactacaagtggcggcaactatttcagaagctacacactttgttgccgaaaagtttgcccgtacaaggaacatgcttcaagcaatagctatgggaatacctatagtcacgccatcatggcttgaatgctgtagagaagcaaggtgcttcgttgatgagaaggcatacattatgagagatatgaagaaggaaaaggagctaggttttagcatgcctgtctcacttagcagagcccgcaaaaaaccattgcttcagggtagaagagtattaatcacaccaaacgccaagcctagcaaggagcttctgaagagtttagtagttgcagctcacggtcagccattggagagaatcacagcctctacaatgaagaagaaaatttttgagggggcctttgtactctcttgtgaacaagatcacagtgtttgcatgccattaattgagagtggtctggaagtgtttgactcggagcttctactgaacggtattgtcactcagaagctagagttcgccaggtatcgtctttttccatgaataagccatatgcccatatgagtgcgatctgggtaggtttggttccggcaccatgcatgccagacaaagcactcttgtacatatgcatccttatccttctctagttactctgaccccttgcacactagtgtgtatttattgttcgagcctctggcccttattaccataattatttgcttttgtattggctcttggtacgtaggccatgtgagatttttgtacccttttgttgtatggcagtgaccatgttagcctatattaaagctaagtacctgcatggattggatatatcatataccattctgccaatgagcttattcagagggcttgttcgtttca

SEQ ID NO: 74419 - DNA, 1156 bp, Zea Mays
aaaaaatttgctgcagcccggcagcaatccaggatctttacagcccctcacaaaaaagaggatagacctcatgcgcaggtcaataacacaactaaaacgttacctggtggacctgcaggtggggtctatcctcctttttgtgagggactgcaaacctcctggtttgcagccgggctgcaataaagtttttttttccaaaatctgtgcttgtaaggataaggtgatatattccctttacttaatccaacatctgaccttattgccagtataattagttgaggttaaattggcaaattcttttttaattttttcctatgaatactgtttgcattgcttcatacataactgttaggaagagtaagtttatgttttccattacaaagtggatccttttttattggtgggtgggtgggtggaagaggcttgcatagggcgagatagttatggttagttcaactaccggagaataatccagtgctccatttattttccaacaacttacaactacaggtaggaaatcctatcgctgacgagctaacagtaacacagcatggtgttgtcatatgcttacgccgccaggatgcagggcgatgctccctgccgctggattctttttctcctcgcgctatgcaccataacgagcctgctagtacgatgaaaggagtacacgggccggccaacatcagcaaccgccgccgctgtttgtacgtgctaaagaggaccgaccgcacgggtctcccaccggcaaggcgaccatcagaagaccataacgagctcgcccctcgttgcttggtagctgtcagtttgtcgctgcatgtaaatattggatgggtttacaaaaccgcgagacgcgtggtggtcaaagccacagggggtggcaggcccttgtccagcgtgtgtgtagtgctgctgccgctgctgctgattctcaagtctgaattcggcagacgcggcctcgtcaaaagtgtaaagaacctccagttccggagggttcgttccgcatctatccacgcgctcagttttgctgtggcggtagttcatgtgtctgtgcttaccgtgtcgtataaagttgtaatatcagctaagatcgtggagtcgtagaatcaagcaaaatagaagtccaaacgacagaatcgagatttttttgttttgtttt

SEQ ID NO: 74420 - DNA, 6132 bp, Zea Mays
cttgagcctccttcccagctcacttttctcttctctcccttgccaatggtgtgtcagtgtctttccttcctactcagtattagctagctgcaacatgcatggtttttttgcccccttcatgattgatatattcgtcgtcagaaaagaagaaaaaaatgtgtgttttattaaacacagtcacacagatgtgtgtattctttgcaggttaataacacagctttgtttgttcttattattattagttacaacagcagtaggtggcaatggcaaacaagaacctgggttccaccgcggtctggcagatggtaacaaagggaggcactggacccaaggcaaggaatgaaggggaagggcggacaagaccgcatgcggagatgagaggaaagggtgaggcaacaagagcaagagacgagacagaaccctcgctgtccatcctcccacgacagagatggcatgtctgcccctccaagctccaactccatccagcgagctggacctggaggagactggacccagagagggacatcatcagaccagaccagaacaggcgtgggaccgtgggtgccgttgccttgccttcatcacatggttacatacaaagaaagaagatgtggatgctcgatgcccagccagctaataaactttcttaaagtctataatatctacatcttatcaataggctttctgtaaaaatatattttattttaatctaatactccatccgtatcaaaataaatttcgttttaagtcaacggtgaattcatcaaagacttgagggatgtattttacatatgtgtctagatttatcctcgttcgcttgaatatatagtcatttgatgaaaaaggagaggggggatcgagacaggcgggatatatataacgaacataggaggatatggagggcgctgcggggccagctagaaaaaggtcggggatttagaccctggatggctttgcttgatctgcttttcgatgatgccattggtcgtgtaattaatagacagtatggcagacggttcgcggcatgcagtaatgcaaagcttcttctctcatgatgcttcggtctttatcagaagctagtagctggtatagcagatccgtacgattgatggattggtacttgctcatcctcgataccttgggacagttgtagtgagaaataacacaaaacggcccaaattcatcgatagatcgatttagggtgttcgaatttcgatacccttccttgttccttcacacagacacagtgacacagcgcacgccacatgctttgtgtcatgccaaggccaaggctctaacgggacggtacaactgccacggacaatgaacagggaggaggggttgcatgtggccagcctgtgtgcgagcaatcagaggatgcacaatacttgtcagactgtacgattagtcctcttccaatccggccgttaatccaaaagcattccaactcacacaggggcgcagaggagaaagagacagacaggcagcgagagagagagagctcaaagcaggcaggcaggcaggctcgtcgggctcatgagttgctttcattcagttcctgacgaactggaggccgttggcccgggagtaccgctccatgaagcgcatgaagcggtcccactcctgaggcgtgcgcatcacgtacttggcctcgatccgcgccggcttgccgttcacgaacttggcgctcacgtccacggactgcagcacgccctcgtcgtccaccatgtaaaagcccgtgatgtcgcccagctccgccgacgagtcgaacaccgacggacgctcgaacgcgaagacggccacgccgttggtgccgtcgcgggacttggtcagccgcacgtccgggaccgtctgctcgtccgtgccctggatgaactggatcgcaggccggcccgccatcgccaccacctgcgcccgccgccatcgcccagggcactgaaccgacgatacgccgtggaacaacgactgcaggtgcaggctcaagttctgctgttgatgctgctggctagggacacctgcgacgtggtaccgacggggatgctgtgctgcccgtgccgacaccggcgaggcgacagcaagagccttcatcactgcggccatccctagctaggggtggtctctgtgactctcgagtgagaggcaggcagctagctgtccggggaagctgcagccagaaagggagcgctggtgtggtgtctgggaggaggtggaggacgggtgaaatgcagaggggagcagcgggtttgagtggtgcagagtgggacgagatactacgatagtgattgggtggcggtgtgttcaaaagacagccatccatcatccagattccagagggattctattgcaggcaggccctatcttcttctcctcctcctcctcctcctcccgatgacaattgacaactgcttgcttctgctctccggtttcgcatatttgcacgtatgctcctgtttcttggtgggcccaccgcccttccttttcttctcctcacacatctcagcctgtcttcttcctttccttggatcatgagaaggcatgcatgcagttgtggctgtgtggtgccctcgtggcccatggaggcaccaggaatgacaaccggcgcttgagcggccagcagctttggcgggggtaactcgcaagcagtatcggctgccagcagttcctatattatctgcagccgccgcccaaaggccgtctccgttcctctctgcccttcatcttcttcgcccaaacaccatccagctgcccagcacaccatgttggaggaaggcaccctttataaaattaccatgttctggcagtaattttcaattagtgaagtgaaacatacacgacctggagtttttcctccgcagttgtatgcttgcacagttagttaaaaaaaaactggtcagaaacagcagtggaatttaagtactagtattgcataatttgcatttgaagaaaaaggagaagtagaaaagttatgccatgtaggatttggatcatggtctagctaaaccttatgaacacagggtacaaagagtagacagcgtacttacgaataagataccactataccagcgtgcaacttgcagctcataattgagacggcttgtgagaagaacttgggaagttgacaaacattcatggcgattcgtcatattgtatggcttccatggtttatgacccaccgcttaaccaacagtgctacgaccatggggcttcaccagccctttatcttgcaaaacgctcctaacttgggccacaccactccacatgtctttgtatgcataaaggtttgctgcagttacataataaccgctatttccaggctccaaatgtagcaaatgttttgcgatggattcgcccatcttgagttcactcctgctactgcaagcatttaacagtgcgccccaaattccgtgtgtttgttgagacggcaagctctccacaaacttgtgcgcttcctgcagccgaccagcccgcccaagcatgtctacaatgcagacatggtgctctggggctggtgtgatcccaaacttttctgacataaggcaataatacttccacccttcatcaacaagtccagagtgactgcaagctgacagtagagcaataaatgtgcttttcgtggctttcattccagaatcatgcatcttccagaaaagatctatagatttcatcccatggccatggaatccaaaagctgatatcaaggagttccacccggcaatcgatttttcggcagaagcttcaaatactctgacagcaatgtccagtctcccacacttgcaatacatatcaacaagtgatgctgaaataaaaacattattgtgcagaacagacctgaacacatgcccgtgtatgctctttccttgtctataaccaccaagctgtgtgcaagcacagatgataccgacaacagatatttcattaggttcgaaatcctccatcttctgatagaactgcaatgctctccagcctttgttattctgtgcaaagccagagatcatacagttccaggagcacaaatttgtgtctcccatgctataaaagactaactcagcacttctagtatctccaaagcgaaaatacatggtcaataatgaatttttcaccctcaaattggaagcaaacaagtgcttcaggatcatgcagtggatggatttcccaagtgctagtagattaagatctccacatgctgataagacactaactattgtaatactgtcagggtttatggccaaagaacaatacatgaaccgaaagatttccaatgcatctttatggagttcattttgcagacacccaactatgaccgtattccaggaaatgatatctgataccggtattattctttcaataagcgaaaaggcggccagtggatcaccacagctcatatacatgtgtatcaaagcattaacagccgaaaccccactagatgtaaatccacacttcaggctgaaagagtgaagtgctttcccaaagctaagttcttccggaatggagcatgatggtatgacagctagcatagtggccaagctgcacgatgaaccttcagaaagtaatcctttgaacattaactgagcctcttctctcagtgggccatatcttgagtaaccagaaatcattgtgttccacgatatcaagtcccttcttggcattgtcataaacaacaggcctgcattagatggttcgtcacatttcaaatacagatcgagtaagctatttcccatggaaggctcctcacgaagaagtccttttctgattacgtatccatggagtgtttccccttcagaaagtaggccttgatcagcacagcctgaaactatggtcaccaaagtggcgacatctggctggttctccaatctcatttgcctcaaaacagcaagggcctcggttactctttcattctggactagacccttgatcatagcattccatgataccaaattcctgttcaaattgctggcgaagaccttcttcgcagcctctggcattccaaactcagagtagaacgtcacgagagaattcgctactgagcaagacgcggtgtcctcataaccgagtttgactgcacagctatgcacagactccccaaaggagaagagatcatccagacgagagcaggctgagaggacagaagagaggctcacctcatctggctggaagatggagcaactcatttccctgaagtagcacgctgacacctcagcgagcccgttaaaaatgctcccacttatgacagagttccatgaggtggtgtccctgcacggcatgctatgaaacacaacctctgcggacctaaactcaccacactttgcatacatgtcaacgagagcgttccacgcgccgagacaatgagcgccgagacaactcttggccgccatgccatggagctccattccacgccgaaggttacccgcgcgggacgcccccgacagcatgacgaccacggtggtggagtcaaactccccgagctcgcgcgccatccgccggaacagagccgcggcgtcgtcgtaccggcagctcgtcgtcagggcgccgacggccgcgttccacaggatcacgtcgggcgcaacggcctcgcggaagagcgccagggcggcgcctgctccggctcccgctcccgcgccgcggccggccctggcgtacgccgcgagcagggacgtgcgcactggcgggtccagcacggcgcctgacttgagggccgcgcagtggaggcacgcgatgcaggccgtgtcaccggaggaggaagacggtgcggacgtgagggcacgtacgatggcggccgccctcccgcgcggcgtttcgtcgagcaggcggtgggcgtcgtccggcgcatggtggagcaaggccgcgcgggcggcgaggacggacgggggtctgaggagcgacgaggcgcggaggagattggcggcgagaaggccgggggtgtggcgtcgcatccaccgccgcggcgcgtcgagcttaggcggcggctgcggcgccgctcctgcattggaaggccgaggccggttatttgtgatcgttgagaattgacagctcagaagaggaaaggccggcgaagaaaagctacggaaactttggcccagcccaccaggatggaaagggattaagggagtccaactgttggctgtgccagttatg

SEQ ID NO: 74421 - DNA, 1798 bp, Zea Mays
tttcgtcgtgaaccaggaggtgttgttcgtactggtagggaccaatctgcaaaaaaaaggtctgccggctggaccccgcaaccgcggaaaggcgaccccacacgcgccccgcctcggagacttcgccgcccgctccgcgtcccccgaccccgaggctgcctccgctaccgctactctgctggctgctgcacctgcaccaccccaaaatcagcggtggggccgagagcgaccgccttccctctttatcctccccgtctcccgccgtcgtcttcactgattcactccgacgcctcccctgccgctgccgcaactgggaggcggtccctgtcgcgcgcgacgacgagccttcatgacggggacacgctgctgattcatagcgcaccacccgccgcctggcgcgtctgctcgcggccgatacctccgcggccggcggcgatgggccaggacctcgtcgagatccatccgagcgagctccagttcacctttgaggtgaagaaacaaagttcatgtgtcgtccacctaatcaacaagtccaacgactatgttgctttcaaggttaaaacaacatctcctaaaagatactgtgttcgaccaaatactggggttatccttccaaggaaaacatgtgaattcacagttaccatgcaagcgctccgaactgctccgccagacatgcaactaaaggacaagtttttggtacagaccacaattgttccttatggtacatctgacgaggaactcgttcctgcctttttctccaaagaaactggcagatacattgaggaaagcaaattgagagttgttcttgttagtgcataccaatcccttgaagagcaaccgactaataaaattcatgacactgagccagttgttgaagttcctgtactgaaagaggtgccaaatatagagaacgaagtgccagatgctgcaaaagaagttcctgcccctctggtacaagctccagcgattgtgactggaataccttcacctgtcgaagagactcctggcctgagagaattccgtgtgccgctgaatgaagcaccagctgtattggcagaatctccttccgctcaaaaagacccttctgttattacagttgaacatgcctctactgttataattgaacattcccctgctatttccattgaatcccctcctttgaaacaaagtgtcacagtttttaaggaatctcctccttcgaaacaaagcattgcagctttcaaggaatatcctcctccttcgaaacaaagcattgcagtttttaaggaatctcctccactggaggaaactagtcctaaagaagctgttgtgctaagtgaccgaggactcttcagtgtgcagaaccatcaattatctcatgtaacagaagatgttcagaatctgaaatcaaagctcaacaatctcgaatcaaaattggaagaggctggaaagatgataataaggctaaaagaagagagcagaagtaccacccaggagcgggataagctacagcaagaaatggtattcctaagaaagaagggaaccccaaggagccaagtgggtttccccttgctgtttgttgtctacgtcgcgcttcttggtaccttactcggttacctgctccgtctatgaattcagaactctaagaaaacaaaaaagttcagcagctgggatgcctcatatgcggcaagagaactgaattgaacggcagttgcactctaaaatgttggagagtttgctggattcgcttgtcctgaatcggtattgaactgtcgtgtgactatttacacctagtttccttccagttattgattttatg

SEQ ID NO: 74422 - DNA, 1781 bp, Zea Mays
tgcactaatggctcacaccccgcacctgatattaattgtattgagagaggaggacattgatgagagggaaaggagttaaagttaagctttatgaacatgatatatatttttggcatccataacctgcaaatgtgttgcggagcgcttgggccggacctggatcgagtacaatcagagccataactgattttggtcctatgggtcatgagtgttctcgggaagaaaagaaaagacacaatgagaaagttgaggtgaagaaacaaagttcatgtgtcgtccacctaatcaacaagtccaacgactatgttgctttcaaggttaaaacaacatctcctaaaagatactgtgttcgaccaaatactggggttatccttccaaggaaaacatgtgaattcacagttaccatgcaagcgctccgaactgctccgccagacatgcaactaaaggacaagtttttggtacagaccacaattgttccttatggtacatctgacgaggaactcgttcctgcctttttctccaaagaaactggcagatacattgaggaaagcaaattgagagttgttcttgttagtgcataccaatcccttgaagagcaaccgactaataaaattcatgacactgagccagttgttgaagttcctgtactgaaagaggtgccaaatatagagaacgaagtgccagatgctgcaaaagaagttcctgcccctctggtacaagctccagcgattgtgactggaataccttcacctgtcgaagagactcctggcctgagagaattccgtgtgccgctgaatgaagcaccagctgtattggcagaatctccttccgctcaaaaagacccttctgttattacagttgaacatgcctctactgttataattgaacattcccctgctatttccattgaatcccctcctttgaaacaaagtgtcacagtttttaaggaatctcctccttcgaaacaaagcattgcagctttcaaggaatatcctcctccttcgaaacaaagcattgcagtttttaaggaatctcctccactggaggaaactagtcctaaagaagctgttgtgctaagtgaccgaggactcttcagtgtgcagaaccatcaattatctcatgtaacagaagatgttcagaatctgaaatcaaagctcaacaatctcgaatcaaaattggaagaggctggaaagatgataataaggctaaaagaagagagcagaagtaccacccaggagcgggataagctacagcaagaaatggtattcctaagaaagaagggaaccccaaggagccaagtgggtttccccttgctgtttgttgtctacgtcgcgcttcttggtaccttactcggttacctgctccgtctatgaattcagaactctaagaaaacaaaaaagttcagcagctgggatgcctcatatgcggcaagagaactgaattgaacggcagttgcactctaaaatgttggagaggtgaatttatttgcattattagttcaggacttcgtatggttttttgcacataacagcagtaccaaactaccagcagttgcgtgcatatatagaacagtttttttttttttttggcgttgtatagaatagaaccgacccaaaagatgcctgctgtcttgtagactaattatggggattcttcctatgcctaagctttctcttttcttctgtctcttttacagtttgctggattcgcttgtcctgaatcggtattgaactgtcgtgtgactatttacacctagtttccttccagttattgattttatg

SEQ ID NO: 74423 - DNA, 1446 bp, Zea Mays
cctggatcgagtacaatcagagccataactgattttggtcctatgggtcatgagtgttctcgggaagaaaagaaaagacacaatgagaaagttgaggtgaagaaacaaagttcatgtgtcgtccacctaatcaacaagtccaacgactatgttgctttcaaggttaaaacaacatctcctaaaagatactgtgttcgaccaaatactggggttatccttccaaggaaaacatgtgaattcacagcgctccgaactgctccgccagacatgcaactaaaggacaagtttttggtacagaccacaattgttccttatggtacatctgacgaggaactcgttcctgcctttttctccaaagaaactggcagatacattgaggaaagcaaattgagagttgttcttgttagtgcataccaatcccttgaagagcaaccgactaataaaattcatgacactgagccagttgttgaagttcctgtactgaaagaggtgccaaatatagagaacgaagtgccagatgctgcaaaagaagttcctgcccctctggtacaagctccagcgattgtgactggaataccttcacctgtcgaagagactcctggcctgagagaattccgtgtgccgctgaatgaagcaccagctgtattggcagaatctccttccgctcaaaaagacccttctgttattacagttgaacatgcctctactgttataattgaacattcccctgctatttccattgaatcccctcctttgaaacaaagtgtcacagtttttaaggaatctcctccttcgaaacaaagcattgcagctttcaaggaatatcctcctccttcgaaacaaagcattgcagtttttaaggaatctcctccactggaggaaactagtcctaaagaagctgttgtgctaagtgaccgaggactcttcagtgtgcagaaccatcaattatctcataatcacagccttcaagtcaacatatacataaagctcctgttcttgttgctcttgtaacagaagatgttcagaatctgaaatcaaagctcaacaatctcgaatcaaaattggaagaggctggaaagatgataataaggctaaaagaagagagcagaagtaccacccaggagcgggataagctacagcaagaaatggtattcctaagaaagaagggaaccccaaggagccaagtgggtttccccttgctgtttgttgtctacgtcgcgcttcttggtaccttactcggttacctgctccgtctatgaattcagaactctaagaaaacaaaaaagttcagcagctgggatgcctcatatgcggcaagagaactgaattgaacggcagttgcactctaaaatgttggagagtttgctggattcgcttgtcctgaatcggtattgaactgtcgtgtgactatttacacctagtttccttccagttattgattttatg

SEQ ID NO: 74424 - DNA, 631 bp, Zea Mays
agtgttctcgggaagaaaagaaaagacacaatgagaaagttgaggtgaagaaacaaagttcatgtgtcgtccacctaatcaacaagtccaacgactatgttgctttcaaggttaaaacaacatctcctaaaagatactgtgttcgaccaaatactggggttatccttccaaggaaaacatgtgaattcacaggtaacagaagatgttcagaatctgaaatcaaagctcaacaatctcgaatcaaaattggaagaggctggaaagatgataataaggctaaaagaagagagcagaagtaccacccaggagcgggataagctacagcaagaaatggtattcctaagaaagaagggaaccccaaggagccaagtgggtttccccttgctgtttgttgtctacgtcgcgcttcttggtaccttactcggttacctgctccgtctatgaattcagaactctaagaaaacaaaaaagttcagcagctgggatgcctcatatgcggcaagagaactgaattgaacggcagttgcactctaaaatgttggagagtttgctggattcgcttgtcctgaatcggtattgaactgtcgtgtgactatttacacctagtttccttccagttattgattttatg

SEQ ID NO: 74425 - DNA, 1537 bp, Zea Mays
cttttcttcttcttaattgagaggcagagcttctgccaaagttcaaaaaaaaaaattgtcatgtaaagaaaaaaaaagtcaattcagtaattgttaacatctgcttcaagtcctggtgcggtatcggtggtggcaagataagttttacactagagttaccatgcaagcgctccgaactgctccgccagacatgcaactaaaggacaagtttttggtacagaccacaattgttccttatggtacatctgacgaggaactcgttcctgcctttttctccaaagaaactggcagatacattgaggaaagcaaattgagagttgttcttgttagtgcataccaatcccttgaagagcaaccgactaataaaattcatgacactgagccagttgttgaagttcctgtactgaaagaggtgccaaatatagagaacgaagtgccagatgctgcaaaagaagttcctgcccctctggtacaagctccagcgattgtgactggaataccttcacctgtcgaagagactcctggcctgagagaattccgtgtgccgctgaatgaagcaccagctgtattggcagaatctccttccgctcaaaaagacccttctgttattacagttgaacatgcctctactgttataattgaacattcccctgctatttccattgaatcccctcctttgaaacaaagtgtcacagtttttaaggaatctcctccttcgaaacaaagcattgcagctttcaaggaatatcctcctccttcgaaacaaagcattgcagtttttaaggaatctcctccactggaggaaactagtcctaaagaagctgttgtgctaagtgaccgaggactcttcagtgtgcagaaccatcaattatctcatgtaacagaagatgttcagaatctgaaatcaaagctcaacaatctcgaatcaaaattggaagaggctggaaagatgataataaggctaaaagaagagagcagaagtaccacccaggagcgggataagctacagcaagaaatggtattcctaagaaagaagggaaccccaaggagccaagtgggtttccccttgctgtttgttgtctacgtcgcgcttcttggtaccttactcggttacctgctccgtctatgaattcagaactctaagaaaacaaaaaagttcagcagctgggatgcctcatatgcggcaagagaactgaattgaacggcagttgcactctaaaatgttggagaggtgaatttatttgcattattagttcaggacttcgtatggttttttgcacataacagcagtaccaaactaccagcagttgcgtgcatatatagaacagtttttttttttttttggcgttgtatagaatagaaccgacccaaaagatgcctgctgtcttgtagactaattatggggattcttcctatgcctaagctttctcttttcttctgtctcttttacagtttgctggattcgcttgtcctgaatcggtattgaactgtcgtgtgactatttacacctagtttccttccagttattgattttatg

SEQ ID NO: 74426 - DNA, 663 bp, Zea Mays
ccaccacatagtatgggttgtattccttactgggccaagccgtatgttctctctgcagtcctcgcctccgccctccggcgcggcgggggagactttgcgcgccgacgcggccgcgccgtctcatctgtatggcgcccggtgtctccacgcgctctccactctcccgcagcccgcaggagtgcaggacccggctgccgcaaccgccccgtcgcagcgccaaacatcggttggaagttggcctcttctgatgaacactcggtattgtggcagtcattggattctcgtctatagaagggcaccatgcaagcatgtgccgcttatttctttaatttggttccctggctcttgtggagtaattctagcactcagaagatgtttctcttgatgatatatatatacactgtcaccagcaaaacagctgaacttctcatcctagatcatgtccaaaggcagtctaggttcagtgcagatttgtattcatgcaagcatacaatgatatgataatactaacatagtatacgctgctgccagagacaattaagactgaacagttttttttttttgggaacagatagatttgaccacattgttttttgttttataacagcatccagaagttcatatgaaaaaaaaatgctttctgcagaacgaaataaccttaag

SEQ ID NO: 74427 - DNA, 947 bp, Zea Mays
gcggcgggggagactttgcgcgccgacgcggccgcgccgtctcatctgtatggcgcccggtgtctccacgcgctctccactctcccgcagcccgcaggagtgcaggacccggctgccgcaaccgccccgtcgcagcgccaaacatcggtctctgcccccctcctgattttcccaagctagcagcttctactgattctgcaagaatcacaagattcaacaatgaaaatgaagctcaagctgatgcgctgaacttcggacagtcttcaggttcactaaaaaacaagaaagtgacttcagctttcagcatactgctgtacattcttgattcccattaaccgagaatatagaggtcgaagctaacacataatttaacacttcccagacccagaaagtacagctgacattagagttgcttcggtaggctttctgttagactgttactggttttggatcgctagcttgttgagcaatttcagcatcacctgtggcagactaaaacgacgcctttaggttggaagttggcctcttctgatgaacactcggtattgtggcagtcattggattctcgtctatagaagggcaccatgcaagcatgtgccgcttatttctttaatttggttccctggctcttgtggagtaattctagcactcagaagatgtttctcttgatgatatatatatacactgtcaccagcaaaacagctgaacttctcatcctagatcatgtccaaaggcagtctaggttcagtgcagatttgtattcatgcaagcatacaatgatatgataatactaacatagtatacgctgctgccagagacaattaagactgaacagttttttttttttgggaacagatagatttgaccacattgttttttgttttataacagcatccagaagttcatatgaaaaaaaaatgctttctgcagaacgaaataaccttaag

SEQ ID NO: 74428 - DNA, 2468 bp, Zea Mays
cgcagcccgcaggagtgcaggacccggctgccgcaaccgccccgtcgcagcgccaaacatcgatcaggaggctgtcagagatctggcaccgcaacgtcgtgacgttgatcggcttctgccaagaaggcggtctacagatgctggtgttcgaatacctgcccaacgccagtgtcagcggccacttgtacgacaccggcaaggagacgatgaccaggctggagttcaagcagaggctgtcaatagccattggagcagctaaaggtctgagtcacctccacagcctggcgccgccgctgatccacagggacttcaagacgagcaacgtgctggtcgacgagaacttcatcgccaaggtgtccgacgccgggatccacaggctgctgcgagggcctgatggtggcgccgtcgccgctctggcgagtcgcggtgtcttccaagacccggaggtacattcatcggcgcaggcgcagctctctgagactgagagcagcgacgtgtacagcttcggggtgttccttctcgagctggtcacaggcagggaggctgcggggctgatgccgccggggtccagcaaggactctctcgctcaatggatggaggcgcgtttcgcctcgaacgagctggtcgacccgagactgggagggagcttcacctcggagggtatggcggaggtggtgggcctggcgtccagctgcctgagcccgtcggcgaggcggcggcccaggatgcggctggtggcggcggagctggaccggatcctggagaaggagatggccctgaccaccgtcatgggcgacggcggcaccgccatcgtcacgctcggcagccagctcttcacgtcctgactgaccgggatccgatggctggcatcgtcggcccaaggaggaagcatggtcgccgacgaagagacccccgcgttgcttccttcgtgtcctgggccgggagctgaacgacgcaacgcgatgcaagcagttcgtggccgccggtgattctccagctcactgctcacctcaggaaatttcaagagacggcgacaggcgcgcgaacctgtgtcctgcattttcttcagtcttccatgttcagagttccgttggatttcatccagcagctcagccaaaatatgtgtatgtgtaaaaattcacatctggaattggaagatggaatttatactagtactagaggcatattttgggctgtggaacctcatcacccagggtcacttatttccatttgtttattctttctctgaaacaacatgcgatgcgatgcgacactgcagctctcccaaaccgaactgtacccaaccgaagcgtgtcagtccagttcaattttaccactagatcgagctgctcctactactagaactacaactgaaacagaaagcattgtgcatgaattatctgcccaactagtgaagagtgacgaataacagaggtaaataaacggcattctcatgaacaggttgaagctctagtgaatttaatgaaactgtctgaaagcttggggtctgattggttgtctgaataagacctggccaggcctgtcagataaattaagttgtagagcccgttaaagccttctcaaatttcaactgtacacatgtttacaatgaaggatggagtaaattaagactgtccccaacacaggactgtaaatgctcatgtatgctaaatttagcgtgtgcagccttgttttcggtctccagcaaagcaaggtcctctaaagaactcggtaaagtagcgaaccgccagcgctcaccgtaaacatggggtgctactgtgcgtccgctatcaagtacattgtctcatggaaagactacgagccgattttggtggccatagccgtgcgtaccgcgacgagcagctcgtcgagcagcagctcccgtaccttgtgtccacggtagaagacgacggtggagcagacacaagctaggatggggtaggtgcagaagacctgcaaggctgcaacgccactctttcacctcccttacttgtaggcttgtcctccacatcgtccccaattcatgcgtgcgagctgctaggtgtggcggatggagcacaacagggaggtgagacgtgccagaaagaaaaacagcactcgagagattgatatagaggacgtggtttaaaggacgttgttgaagtagatgatatagagaatctaatcttctagagtgtatgtataaaatatttctttagaaaatggaatttatgagatgctgctatagacatcctaagtttgttctcgagttgttttagtgagaacaggagcatccgaaattataaccctataccttgtttaattgcatggagatgaaaaacgaatcgaagggaattatatatcttttttctatttaattttaactaacaaaggatttagcctaaccagcccttagtgaaaaccgagaaggtgatacattaaccagtatggttttacatattaacaaaaaaaacattactcaatatttt

SEQ ID NO: 74429 - DNA, 3140 bp, Zea Mays
gtcgtcttgtcttgctccgctccgctcctctcctctcctctcctctatcatatttaccaccaacggcatgccgctgtcgctgcctttaaatagccggcggggggcaaacagctcgtcagtcaggctcgcggccgagccaccgaggagcaaagcaaagctctcgttggtcgtggcggcagcggcggcggtggcggtgtcgagctgcggtgctgaaggcaagagagccgcgcgccgtgaagagtcgtcgtcgatccggccgagctccgtcgcttcattgatgaatgccgaagctatagcggtccttgctcgttccaaggttcgatgccccggtcgccgcccggatgacactgccaaccccggtggtagccggcgttgcggctggcgccgccgcgctgctactggccgccgccctcgccgtggcgtggtggtggctcgtgatcgtgaggcggcgccggcgccgtgaccggagctccgacaccggatcctcgtcggaggctcctcctcccacgctggcggagtggggccggtgcggccgcacctcgtcggcgcccgagttccacggcgccaggcagttctcgctggaggagctggcgcacgccaccaacggcttcgccgaggccaacctggtcggcgcgggggcctttggcctggtgtacaagggcctgctgctagacggcaccgtcgtcgccatcaagcgccgcgcgggcgcgccgcgccaggacttcgcaaacgagatcaggaggctgtcagagatctggcaccgcaacgtcgtgacgttgatcggcttctgccaagaaggcggtctacagatgctggtgttcgaatacctgcccaacgccagtgtcagcggccacttgtacgacaccggcaaggagacgatgaccaggctggagttcaagcagaggctgtcaatagccattggagcagctaaaggtctgagtcacctccacagcctggcgccgccgctgatccacagggacttcaagacgagcaacgtgctggtcgacgagaacttcatcgccaaggtgtccgacgccgggatccacaggctgctgcgagggcctgatggtggcgccgtcgccgctctggcgagtcgcggtgtcttccaagacccggaggtacattcatcggcgcaggcgcagctctctgagactgagagcagcgacgtgtacagcttcggggtgttccttctcgagctggtcacaggcagggaggctgcggggctgatgccgccggggtccagcaaggactctctcgctcaatggatggaggcgcgtttcgcctcgaacgagctggtcgacccgagactgggagggagcttcacctcggagggtatggcggaggtggtgggcctggcgtccagctgcctgagcccgtcggcgaggcggcggcccaggatgcggctggtggcggcggagctggaccggatcctggagaaggagatggccctgaccaccgtcatgggcgacggcggcaccgccatcgtcacgctcggcagccagctcttcacgtcctgactgaccgggatccgatggctggcatcgtcggcccaaggaggaagcatggtcgccgacgaagagacccccgcgttgcttccttcgtgtcctgggccgggagctgaacgacgcaacgcgatgcaagcagttcgtggccgccggtgattctccagctcactgctcacctcaggaaatttcaagagacggcgacaggcgcgcgaacctgtgtcctgcattttcttcagtcttccatgttcagagttccgttggatttcatccagcagctcagccaaaatatgtgtatgtgtaaaaattcacatctggaattggaagatggaatttatactagtactagaggcatattttgggctgtggaacctcatcacccagggtcacttatttccatttgtttattctttctctgaaacaacatgcgatgcgatgcgacactgcagctctcccaaaccgaactgtacccaaccgaagcgtgtcagtccagttcaattttaccactagatcgagctgctcctactactagaactacaactgaaacagaaagcattgtgcatgaattatctgcccaactagtgaagagtgacgaataacagaggtaaataaacggcattctcatgaacaggttgaagctctagtgaatttaatgaaactgtctgaaagcttggggtctgattggttgtctgaataagacctggccaggcctgtcagataaattaagttgtagagcccgttaaagccttctcaaatttcaactgtacacatgtttacaatgaaggatggagtaaattaagactgtccccaacacaggactgtaaatgctcatgtatgctaaatttagcgtgtgcagccttgttttcggtctccagcaaagcaaggtcctctaaagaactcggtaaagtagcgaaccgccagcgctcaccgtaaacatggggtgctactgtgcgtccgctatcaagtacattgtctcatggaaagactacgagccgattttggtggccatagccgtgcgtaccgcgacgagcagctcgtcgagcagcagctcccgtaccttgtgtccacggtagaagacgacggtggagcagacacaagctaggatggggtaggtgcagaagacctgcaaggctgcaacgccactctttcacctcccttacttgtaggcttgtcctccacatcgtccccaattcatgcgtgcgagctgctaggtgtggcggatggagcacaacagggaggtgagacgtgccagaaagaaaaacagcactcgagagattgatatagaggacgtggtttaaaggacgttgttgaagtagatgatatagagaatctaatcttctagagtgtatgtataaaatatttctttagaaaatggaatttatgagatgctgctatagacatcctaagtttgttctcgagttgttttagtgagaacaggagcatccgaaattataaccctataccttgtttaattgcatggagatgaaaaacgaatcgaagggaattatatatcttttttctatttaattttaactaacaaaggatttagcctaaccagcccttagtgaaaaccgagaaggtgatacattaaccagtatggttttacatattaacaaaaaaaacattactcaatatttt

SEQ ID NO: 74430 - DNA, 3056 bp, Zea Mays
ctgcctttaaatagccggcggggggcaaacagctcgtcagtcaggctcgcggccgagccaccgaggagcaaagcaaagctctcgttggtcgtggcggcagcggcggcggtggcggtgtcgagctgcggtgctgaaggcaagagagccgcgcgccgtgaagagtcgtcgtcgatccggccgagctccgtcgcttcattgatgaatgccgaagctatagcggtccttgctcgttccaaggttcgatgccccggtcgccgcccggatgacactgccaaccccggtggtagccggcgttgcggctggcgccgccgcgctgctactggccgccgccctcgccgtggcgtggtggtggctcgtgatcgtgaggcggcgccggcgccgtgaccggagctccgacaccggatcctcgtcggaggctcctcctcccacgctggcggagtggggccggtgcggccgcacctcgtcggcgcccgagttccacggcgccaggcagttctcgctggaggagctggcgcacgccaccaacggcttcgccgaggccaacctggtcggcgcgggggcctttggcctggtgtacaagggcctgctgctagacggcaccgtcgtcgccatcaagcgccgcgcgggcgcgccgcgccaggacttcgcaaacgagatcaggaggctgtcagagatctggcaccgcaacgtcgtgacgttgatcggcttctgccaagaaggcggtctacagatgctggtgttcgaatacctgcccaacgccagtgtcagcggccacttacaccggcaaggagacgatgaccaggctggagttcaagcagaggctgtcaatagccattggagcagctaaaggtctgagtcacctccacagcctggcgccgccgctgatccacagggacttcaagacgagcaacgtgctggtcgacgagaacttcatcgccaaggtgtccgacgccgggatccacaggctgctgcgagggcctgatggtggcgccgtcgccgctctggcgagtcgcggtgtcttccaagacccggaggtacattcatcggcgcaggcgcagctctctgagactgagagcagcgacgtgtacagcttcggggtgttccttctcgagctggtcacaggcagggaggctgcggggctgatgccgccggggtccagcaaggactctctcgctcaatggatggaggcgcgtttcgcctcgaacgagctggtcgacccgagactgggagggagcttcacctcggagggtatggcggaggtggtgggcctggcgtccagctgcctgagcccgtcggcgaggcggcggcccaggatgcggctggtggcggcggagctggaccggatcctggagaaggagatggccctgaccaccgtcatgggcgacggcggcaccgccatcgtcacgctcggcagccagctcttcacgtcctgactgaccgggatccgatggctggcatcgtcggcccaaggaggaagcatggtcgccgacgaagagacccccgcgttgcttccttcgtgtcctgggccgggagctgaacgacgcaacgcgatgcaagcagttcgtggccgccggtgattctccagctcactgctcacctcaggaaatttcaagagacggcgacaggcgcgcgaacctgtgtcctgcattttcttcagtcttccatgttcagagttccgttggatttcatccagcagctcagccaaaatatgtgtatgtgtaaaaattcacatctggaattggaagatggaatttatactagtactagaggcatattttgggctgtggaacctcatcacccagggtcacttatttccatttgtttattctttctctgaaacaacatgcgatgcgatgcgacactgcagctctcccaaaccgaactgtacccaaccgaagcgtgtcagtccagttcaattttaccactagatcgagctgctcctactactagaactacaactgaaacagaaagcattgtgcatgaattatctgcccaactagtgaagagtgacgaataacagaggtaaataaacggcattctcatgaacaggttgaagctctagtgaatttaatgaaactgtctgaaagcttggggtctgattggttgtctgaataagacctggccaggcctgtcagataaattaagttgtagagcccgttaaagccttctcaaatttcaactgtacacatgtttacaatgaaggatggagtaaattaagactgtccccaacacaggactgtaaatgctcatgtatgctaaatttagcgtgtgcagccttgttttcggtctccagcaaagcaaggtcctctaaagaactcggtaaagtagcgaaccgccagcgctcaccgtaaacatggggtgctactgtgcgtccgctatcaagtacattgtctcatggaaagactacgagccgattttggtggccatagccgtgcgtaccgcgacgagcagctcgtcgagcagcagctcccgtaccttgtgtccacggtagaagacgacggtggagcagacacaagctaggatggggtaggtgcagaagacctgcaaggctgcaacgccactctttcacctcccttacttgtaggcttgtcctccacatcgtccccaattcatgcgtgcgagctgctaggtgtggcggatggagcacaacagggaggtgagacgtgccagaaagaaaaacagcactcgagagattgatatagaggacgtggtttaaaggacgttgttgaagtagatgatatagagaatctaatcttctagagtgtatgtataaaatatttctttagaaaatggaatttatgagatgctgctatagacatcctaagtttgttctcgagttgttttagtgagaacaggagcatccgaaattataaccctataccttgtttaattgcatggagatgaaaaacgaatcgaagggaattatatatcttttttctatttaattttaactaacaaaggatttagcctaaccagcccttagtgaaaaccgagaaggtgatacattaaccagtatggttttacatattaacaaaaaaaacattactcaatatttt

SEQ ID NO: 74431 - DNA, 1314 bp, Zea Mays
tcctgtcctccgctgtgccgcaatcctacccttccgccgccccgcagccacacgaatcgtcaggaaggaagcatggtagtgtgcacggagaaggaggaggtctgcatgtctgctcgctttgatgccctcgggctctgatctcgcgggcctggattcgacctacacgcgcgctagcttagattctcttgcgaactgtgacgtctttttgaatggattttaatgagcgacgattcaggcagcccctttgtccgatctcaatgtcaatggaggtgttgcgttgctcggagaagaaaatcttttggtcttcagatcggttgaggtggggaggtcacttccccccgttgaggctggtctagtaaatcttaagaacataccctaacattatcaatgttgctgagccttgttagctgttttgttgttcgctggatccttttgtgctggttttcgttgtggctgaggagagctgtttggattgagattttgtgccgatggatcatgttcttcgttccaattaagctagagtctgtattcatgtttagatgaaaccgtactgatcacaagaaactagttgaacatcctaagtcaattactaatgaactttgtatagcttcggtaaaataatgtgctgatggtgcaaatcttctccatgaacaaaatattgaaggccaaaatgcatatatagaaatagaatttcagttggcaacggaaacctaaagattaaacagaaatcaaatataaatctgaagcttcaaccgagatttctaaattcagctgattttccattcttcaggcgtccaactaaaatttaatgaacaagagttaggcaaggagggttatatcagaagttgccctccacaccaccttccgtcgatcatctggcagtcaccaaaaaaaagaagaaaatgtttagcccttcacaccaccttccatcgtcgccacttgagaagagctcctgcttctcatgtctgtgctgttggcaacagaagtataaaagaaatggaagaaagattgctagtgctgaagtcaaaagagaaacgtgttacatgtatggacaaactgattgcagcatcaggagagtaaccgatatatatgaagaagacgcaaacaacaaactagcatctccaataactatctcagctaacacactctgcaactaaaggcaatatcgcctgtctccatatccgaaggaacacaacaacaatagaagcatgcaagaagagaggaagaaaccttacggcttgtttctattttccttaccccactctctcttttcccaccccatattatattaattggacatatgattgtgtttgt

SEQ ID NO: 74432 - DNA, 1434 bp, Zea Mays
caaaaagttttcgtcatgttatcctgacagctccatgatccaacaagaacttactcaactccagccttgcaccctatcctgcaaataagtatcaggttatattcactgctttgaacgtgaactagcatgcacaaaaaaaacatataacttcaggtttgaagagaaggtaggcctcggtgcatagacatctagaaatgcaaatcttcggcgatcaactcagattgccaatttgtgtaacctctaatggtttgccaaaacccatgagaggagcttacgagcatgaatcatccagttgattttagcaggttcccaaacctcgtatggactgcaggatccaatggaactgcaacctcttccagacacaagtgtacaacagcatgcggaaagaaaacatacattaacaagaaaaaaaagggggataaagtatcgattctaaccagtctgagatgtattcataaaccacaaatgtcactgcaccagcaggggccgatttcactaaagaggggaaaaggcccttataaaggcctccaaatccctcctttacgacaatctcctttaaggcatggtacatgcccttgtatgtactgctctcaattggagcaccataccttggatgtcgttttagtccttcaatctgcattatggcagagaaaacctgatcatcccatggctaacaatctaaagataaatacagctagagtataacaaaagatatgaaatctattatgatccatgactcattctcaagcaattcattgccaaactaaatgggcatttgtgcctagaggcaccaaggtcaactgattcaccaatgaagtggtataccactataccatataccacgtactgccatactggcaagtggcaacaagcaaatacaatgatatggtaataaatgtcttcagtaagtcagcaaaaaaaaactgacacaaaacaatgcccagtgaacaaaacagactactatcattaactcaaaaaggtgcagatattatatacaaataatttcaagtagcgtgtggagcaaccaaagggagtggaggtggagctaaagatacttagccttgaataggaatgtatgaaaaaacagatatccacgtgcctgagccttgacttagctactaatgggttttaattctagcctagcccaacttacttgggactaaaaggttttgttgttgttattgttgtgtgacataaatgattaaatgacttaaggacaaaatcatagtttataaggccaatatcagaggaagtttcatcagagtttaattcacatttaataggctgccgtatacacatttttgatgatgtggcaaggttttaaagaagaaagagatggtgtgacatgagtttcatatagatgaaactctcgactcacttaccacctttagatgagtcatagaattaaaaaaactcggccggaagggaaagaac

SEQ ID NO: 74433 - DNA, 982 bp, Zea Mays
atagctccacttacataagataagtaagggctcaaatccaaatgatcctctgacagagaaaaggaccaatagatcaaataaggttgtaggtatgcatatactcacaatagtgcttcagttttgaacaatatgtgtgatttttttaatatgacaatgaaatgagttacatcagctaatcagctttgaaggtaccatattcaaaaagcatcagttataaagagacaagtttggggaaatgttcaaaccattcaactaacaccaaattgtgtgcaccactgatctgaatcaccatcattaaagttaaaaaaggttatggtcatggcactgccaactataatgaacacaaccacatcaaaacactactcctatggcagtcaacagtttgatacatgagccaacaactccaaagttagttgtgtactacaaaatcatccatgatttgatcataaataaaaaagaccatcaaagattccaaaaggtggaatgtgggacaatccaagagaatgccactagagaactgaataaaaaacagttaaaatggaattgtaagtttgtaactgccattttgtcagagaaaacaaaaaattgaaaataggatcccttagaaaacctaaatgaaaaaatggcacattcattggaacttaagtcatgggagcaacacaatgccaaaggagcaccatggttaagcttaagtgtactctttttctctatggtggcacacgttctggcattagtgatatgatgcccaagtagtaagatttagcaagttttgcacacaatgcagtcactaaaagaaagaaaactattgtgagccttatcgttaggtttgaccgtttgagtaacgactgttacaacttacaaataatacagtataaagcaacaaataacattgtatggttgccttatgcagacaaggtacctgttctagatgaaccagaagcaaatgtttttagtttgtgtagaacagtgaattgtatagctg

SEQ ID NO: 74434 - DNA, 747 bp, Zea Mays
atgcgagtatgcatatctactaccaacctttgtttctcattgatatatttgttcttttaggtaaggagaggtgctgatagagcagaaatatatagcttggctttctcgaataatttgcagtatttggctgtgtccagtgataaaggaacaatacatgtcttcaatctaaagataaatgtgggatcgactgcaaatgataaacctatacctgctccagatcctgaagtttcgcatataagcccccctctttcgttcattaagggtgtgttgccgaaatatttccactctgagtggtcagtagctcagttcaggctccatgagggggagcagtacattgttgcatttggacatgagaagaataccgtgtcagttgttggtatggatggaagcttctacagatgtcaatttgacccagttaatggaggagaaatgctgcagctggagtgctacagttttctaaaaccgtcagatcaaccgtagcgacacacaattatcatctatcaattgatgccctcctccccgtaccaagaactgtacagtatctttgtgcgccctcgttggccggaggtctaagctaaatatgataatattttctttgtgtatatatatttcttgttggctctgggtgatgtatgttctgtctgtggaagggctaaaacacccatctgcagatggacgttatagaacgtgtcgttattatttatgaatggattgaataaaatagcctaacaatgtttctccaatgtt

SEQ ID NO: 74435 - DNA, 2516 bp, Zea Mays
aataggtggtgcttcagtctggacccgcccctgatatttttccggtgactctcttcctctgcacttgggtcccaccacttttccctcccctacctttcttccttcttccccaagaccgcgagtaaaaatttcgcttaaaattcgattccacgaagcagcaatcgcaagctcgaagctctaaaataatctcttcccgacgcctctggaaggtcatcatctgaacccaggtagcctccagcgctggagacgtgccgtactcaaaccctagccaccaatggcagccggcggcggggctccgtgggcggagcgcgcgcgggtggtggggacgcagatccgcaacaggttccgcgtggcgcccgtggaccaccggtcgctgtggctgcgggcggacggtcgtgtcgccactgaggcggtccggcggtggtcggatcgcgttcgggccctgctgcagaggggccggagcgcggatcggaactccacatcgacggatacatcacctgaggcggtggcaaagccttcgtccagcgttttgagattctacagaaagagagtgggcaaagaagttaatgggattgaagactctgttattttccgttcgcttcaagcattggctgttcctcttattggcaatgcatgctatgtttttatgcatggtcttaactcagttcaggtttatggtgtagagaagcttcatcaggcattacatgggagacctaaaggcaaggctcttctaacggtcagcaatcatgtggcagcgatggatgaccctttcgtaattgcttcccttctcccaccatctgttatgctggaagcacaaaagctgagatggacactgtgtgccactgatcggtgctttacaaatccagttttgtctacattcttcaggtctgttaaggtgttacctgtttctcgtggtgatggcatctaccaaaagggaatggacatggcactttcaaagcttaacagtggtggatgggttcatatattccctgaaggaagccgttcaagggatggagggaaaaccattgctcctgccaagagaggtgttggaaggatataatgcctgttggaaaacgaatccccagagcaggaaaaagggtgattgtggtcgtgggtgacccaatcaactttgatgacctgctcatcgacaactgtggtgacacccaagatatccctagagggatcttgtacgacaaagtgacacagagaattgggcagcgattgcaggaactcaaggtcgaagtcgacagactggctgcagagcaggaacctgaactccaaaaccacaacgtgggtgatgatggataccggctgtggcagcaggtcgattgggaaggatttgggatagggagttccatgttgccatcagaaccttcagctgctgcgcaagtgccatcaagggaagccgagcctgaaccgcacgtggaagtggagcaaagcgtgtctccagccccaagtgcagcgacctcatacaatgttgctgttccacactggttccagcgccatgcggacccttctgaactcatggggttcgcttcccgtggcctgatcaagcatggcaagttcttggaggaaggctacagggaattccaacagtcggctactactctgcacaccttttgggtttctcgtgctaacaatgctgcacaccgatggagcactgcttaggctgcccgcagcgcttcccgtggcgcgcccctccgtcggctttagtggctacagtagcgacaaaacggtgcatcagatcactctactagctcctatacacagaacaaggacaaagcagcgcactacgccagattgagggggcactgttctaccccttacctgcgcgctacagtgcgcgtatgagtttgatagttggaaaaaattgatattggataaaaaatagatatagaaaatgatattttatagttgtggggtatatgagaaactttagagggaacattttatctcatacttttttatcttccgcagcggtttccttatattcccccactataccccactacaactataaaatattattacctaacattattcatcttttattactatttttcaactattaaataagagagcattgtgtaaggggtgctacagtgcttcccttgatctagggacgggcgttgcctccccttgcgctgcagcgcgtagggggccatttggagacagtcgctgcccacgtagagacccgtacgcatacacagtgcaaggtgaggggcatatggaggcagccttaagactatccgcagcggttccttctaaatttcttcccctatatcactttttagtcacatcatcaacagttatcctctattttttcatctctcgcagtggttccccctaaatactctccctataccccactacaactataaaatatcattttctatacgtatttttcatctactatcaatttttcatctactaacaattactcgtgtacccacaacatagtgttggaggggatgaacagtgaaccactgaattgagggggagagagaagagggtcg

SEQ ID NO: 74436 - DNA, 3071 bp, Zea Mays
cctgatatttttccggtgactctcttcctctgcacttgggtcccaccacttttccctcccctacctttcttccttcttccccaagaccgcgagtaaaaatttcgcttaaaattcgattccacgaagcagcaatcgcaagctcgaagctctaaaataatctcttcccgacgcctctggaaggtcatcatctgaacccaggtagcctccagcgctggagacgtgccgtactcaaaccctagccaccaatggcagccggcggcggggctccgtgggcggagcgcgcgcgggtggtggggacgcagatccgcaacaggttccgcgtggcgcccgtggaccaccggtcgctgtggctgcgggcggacggtcgtgtcgccactgaggcggtccggcggtggtcggatcgcgttcgggccctgctgcagaggggccggagcgcggatcggaactccacatcgacggatacatcacctgaggcggtggcaaagccttcgtccagcgttttgagattctacagaaagagagtgggcaaagaagttaatgggattgaagactctgttattttccgttcgcttcaagcattggctgttcctcttattggcaatgcatgctatgtttttatgcatggtcttaactcagttcaggtttatggtgtagagaagcttcatcaggcattacatgggagacctaaaggcaaggctcttctaacggtcagcaatcatgtggcagcgatggatgaccctttcgtaattgcttcccttctcccaccatctgttatgctggaagcacaaaagctgagatggacactgtgtgccactgatcggtgctttacaaatccagttttgtctacattcttcaggtctgttaaggtgttacctgtttctcgtggtgatggcatctaccaaaaggtatccatcttatgaaaacatcagtatggcctaaattttttaatgttgatgaaccgatttatccacgcgattcatattgtgaaagcatcatgaataatgggggcaatacataaggaaattgaacaccaggcttcacaatattttgaatagggaagttgcaaccggaggtgtgctattctttaagcaattagcagatgtggatttgagaattattcttatagaattgcttggtttaactttaacgtaagaaattagatgacaaacataacaaagtctctggtagttaaagcactatagtgagtcctaaggtatttatatattggtattccttgctgcatgggtttacagacttccttttgccctcttctcagatatacaattttaatgccttcatgccttgaatatcataagtcatcctttccaatctaaatcgtgaatatgatcgattacatttggactattgaatgaaatgcatcaccagatccactcttcacttgtacccttttttgttttctttgttcagggaatggacatggcactttcaaagcttaacagtggtggatgggttcatatattccctgaaggaagccgttcaagggatggagggaaaaccattgctcctgccaagagaggtgttggaagattggtaatggatgctgacagccttccagttgtaataccctttgtccatactgggatgcaggatataatgcctgttggaaaacgaatccccagagcaggaaaaagggtgattgtggtcgtgggtgacccaatcaactttgatgacctgctcatcgacaactgtggtgacacccaagatatccctagagggatcttgtacgacaaagtgacacagagaattgggcagcgattgcaggaactcaaggtcgaagtcgacagactggctgcagagcaggaacctgaactccaaaaccacaacgtgggtgatgatggataccggctgtggcagcaggtcgattgggaaggatttgggatagggagttccatgttgccatcagaaccttcagctgctgcgcaagtgccatcaagggaagccgagcctgaaccgcacgtggaagtggagcaaagcgtgtctccagccccaagtgcagcgacctcatacaatgttgctgttccacactggttccagcgccatgcggacccttctgaactcatggggttcgcttcccgtggcctgatcaagcatggcaagttcttggaggaaggctacagggaattccaacagtcggctactactctgcacaccttttgggtttctcgtgctaacaatgctgcacaccgatggagcactgcttaggctgcccgcagcgcttcccgtggcgcgcccctccgtcggctttagtggctacagtagcgacaaaacggtgcatcagatcactctactagctcctatacacagaacaaggacaaagcagcgcactacgccagattgagggggcactgttctaccccttacctgcgcgctacagtgcgcgtatgagtttgatagttggaaaaaattgatattggataaaaaatagatatagaaaatgatattttatagttgtggggtatatgagaaactttagagggaacattttatctcatacttttttatcttccgcagcggtttccttatattcccccactataccccactacaactataaaatattattacctaacattattcatcttttattactatttttcaactattaaataagagagcattgtgtaaggggtgctacagtgcttcccttgatctagggacgggcgttgcctccccttgcgctgcagcgcgtagggggccatttggagacagtcgctgcccacgtagagacccgtacgcatacacagtgcaaggtgaggggcatatggaggcagccttaagactatccgcagcggttccttctaaatttcttcccctatatcactttttagtcacatcatcaacagttatcctctattttttcatctctcgcagtggttccccctaaatactctccctataccccactacaactataaaatatcattttctatacgtatttttcatctactatcaatttttcatctactaacaattactcgtgtacccacaacatagtgttggaggggatgaacagtgaaccactgaattgagggggagagagaagagggtcg

SEQ ID NO: 74437 - DNA, 1381 bp, Zea Mays
gtcgcatccatcggaaaacgacgtcataccgcctgtcactgccgcccagtggagtggggctcaatcattcgcagcaacattcctagtcgtaggcgaggagcgaattgcttcaaggaatcggaatcctctctctcattcactcactctctcttatccaaacgcccccgtgccccgtctgcgtcgcgtagggttttggcaacttgcacgtacgagagcgtccatggacgacggcagcagcaacaaggtggttgaggacgtcgcggaggaggaccccggccgccgcggcggtccatggaggacggatgaggccgacgccaacgagaaggcgcctcgcccgagcaggcgggtcgcttccctcgacgtcttccgcggcctcaccgtcgcggtgaggtgtggtacgaggggggcgttggaccctccctgcaacgccgtaggctacatcgaccgcagagtcctgggcatcaaccacatgtaccagaagccggcatggagaaggcacagggcctgcactgatgactccccacacgaggggcctttcagagaggatgccccagcgtggtgtgtcgcgccattcgagcctgaagggatactgagctcactgtctgctgtgctgagtacggtcgtcggtgttcactacgggcatgtgcttgtccacatgaagagccatacggacaggcttaggcagtgggttaccatgggcgtagctcttctcgttctcggaatcattctgcacttctcgcatgcgatcccgctcaacaagcagctctacacgttcagctacatctgcgtcactgccggcgccgctggggtcgtcttctcagcgctctacttcttggtcgacgtcgtgagcctgcgctacgccttcgcgccgctgcggtgggtcggcatgaacgcgatgctggtgtacgtgatggccgcggaaggcgtcttcgagggcttcctcaacgggtggtactacgagagcaccaacaacactctggtttactgggtgaggaagcacgtgttcgtcaaggtgtggcactccaccagggtgggcatcctcctctacgtcctcttcgcgcagatcctcttctgggcgctcgtctccggcgtcctccaccgcgctcgcctctactggaagctctagcgagcgaacggtggcatagcatgcttttgtcttttgaactgcacatgatacacacgacacctcaaactcgaaccccaagttagtttgaagaactcaaatcacgggcaaaatggaattcggcgagcggatcggattcattattatccgtgcgtgtggagtcgtcggcacgtacacgttcagtacaggtactcagtgtagcatgcatagcgcgaaggcctaggcagcaatggtgcggccaccgtcggcgcagatgac

SEQ ID NO: 74438 - DNA, 1887 bp, Zea Mays
caatcattcgcagcaacattcctagtcgtaggcgaggagcgaattgcttcaaggaatcggaatcctctctctcattcactcactctctcttatccaaacgcccccgtgccccgtctgcgtcgcgtagggttttggcaacttgcacgtacgagagcgtccatggacgacggcagcagcaacaaggtggttgaggacgtcgcggaggaggaccccggccgccgcggcggtccatggaggacggatgaggccgacgccaacgagaaggcgcctcgcccgagcaggcgggtcgcttccctcgacgtcttccgcggcctcaccgtcgcgctgatgatactggtggacggcgccggcggcgagtggccggtcatcgggcacgcgccgtggaacggctgcaacctcgcggacttcgtgatgcccttcttcctcttcatcgtcggcatggccgttcccctggccctcaagaggatcccggaccgtggccgagccgtgaggagagtggtcgtaaggacgctgaagctgctcttctggggcatcctgttgcaagtggaatgaatgtgtccaggcggttactcccacgctccggacgaactggcgtatggagtcgacatgaggcacgtgaggtggggcggaatcctccagaggatcgctcttgcgtacctggtggttgcggttctagagatggtgacgaaagacggcgccaaggttcatcaggaccagccgccaggttcttcaggccgcttctcccgtgtattcagaatgtatctctcccagtggatcgtcgcgtgctgcattctggtggtctacctgtcccttgcctacggggtctacgttcctgactgggagttcagagtgcgaaacgctgacagcccagactacggcaaagttctaacggtgaggtgtggtacgaggggggcgttggaccctccctgcaacgccgtaggctacatcgaccgcagagtcctgggcatcaaccacatgtaccagaagccggcatggagaaggcacagggcctgcactgatgactccccacacgaggggcctttcagagaggatgccccagcgtggtgtgtcgcgccattcgagcctgaagggatactgagctcactgtctgctgtgctgagtacggtcgtcggtgttcactacgggcatgtgcttgtccacatgaagagccatacggacaggcttaggcagtgggttaccatgggcgtagctcttctcgttctcggaatcattctgcacttctcgcatgcgatcccgctcaacaagcagctctacacgttcagctacatctgcgtcactgccggcgccgctggggtcgtcttctcagcgctctacttcttggtcgacgtcgtgagcctgcgctacgccttcgcgccgctgcggtgggtcggcatgaacgcgatgctggtgtacgtgatggccgcggaaggcgtcttcgagggcttcctcaacgggtggtactacgagagcaccaacaacactctggtttactgggtgaggaagcacgtgttcgtcaaggtgtggcactccaccagggtgggcatcctcctctacgtcctcttcgcgcagatcctcttctgggcgctcgtctccggcgtcctccaccgcgctcgcctctactggaagctctagcgagcgaacggtggcatagcatgcttttgtcttttgaactgcacatgatacacacgacacctcaaactcgaaccccaagttagtttgaagaactcaaatcacgggcaaaatggaattcggcgagcggatcggattcattattatccgtgcgtgtggagtcgtcggcacgtacacgttcagtacaggtactcagtgtagcatgcatagcgcgaaggcctaggcagcaatggtgcggccaccgtcggcgcagatgac

SEQ ID NO: 74439 - DNA, 1876 bp, Zea Mays
ctctcattcactcactctctcttatccaaacgcccccgtgccccgtctgcgtcgcgtagggttttggcaacttgcacgtacgagagcgtccatggacgacggcagcagcaacaaggtggttgaggacgtcgcggaggaggaccccggccgccgcggcggtccatggaggacggatgaggccgacgccaacgagaaggcgcctcgcccgagcaggcgggtcgcttccctcgacgtcttccgcggcctcaccgtcgcgctgatgatactggtggacggcgccggcggcgagtggccggtcatcgggcacgcgccgtggaacggctgcaacctcgcggacttcgtgatgcccttcttcctcttcatcgtcggcatggccgttcccctggccctcaaggtccgtcgtcgtcgtcggtcttcccgtccatccgtcgttcatgccatgcatgctcacaggatcccggaccgtggccgagccgtgaggagagtggtcgtaaggacgctgaagctgctcttctggggcatcctgttgcaagtggaatgaatgtgtccaggcggttactcccacgctccggacgaactggcgtatggagtcgacatgaggcacgtgaggtggggcggaatcctccagaggatcgctcttgcgtacctggtggttgcggttctagagatggtgacgaaagacggcgccaaggttcatcaggaccagccgccaggttcttcaggccgcttctcccgtgtattcagaatgtatctctcccagtggatcgtcgcgtgctgcattctggtggtctacctgtcccttgcctacggggtctacgttcctgactgggagttcagagtgcgaaacgctgacagcccagactacggcaaagttctaacggtgaggtgtggtacgaggggggcgttggaccctccctgcaacgccgtaggctacatcgaccgcagagtcctgggcatcaaccacatgtaccagaagccggcatggagaaggcacagggcctgcactgatgactccccacacgaggggcctttcagagaggatgccccagcgtggtgtgtcgcgccattcgagcctgaagggatactgagctcactgtctgctgtgctgagtacggtcgtcggtgttcactacgggcatgtgcttgtccacatgaagagccatacggacaggcttaggcagtgggttaccatgggcgtagctcttctcgttctcggaatcattctgcacttctcgcatgcgatcccgctcaacaagcagctctacacgttcagctacatctgcgtcactgccggcgccgctggggtcgtcttctcagcgctctacttcttggtcgacgtcgtgagcctgcgctacgccttcgcgccgctgcggtgggtcggcatgaacgcgatgctggtgtacgtgatggccgcggaaggcgtcttcgagggcttcctcaacgggtggtactacgagagcaccaacaacactctggtttactgggtgaggaagcacgtgttcgtcaaggtgtggcactccaccagggtgggcatcctcctctacgtcctcttcgcgcagatcctcttctgggcgctcgtctccggcgtcctccaccgcgctcgcctctactggaagctctagcgagcgaacggtggcatagcatgcttttgtcttttgaactgcacatgatacacacgacacctcaaactcgaaccccaagttagtttgaagaactcaaatcacgggcaaaatggaattcggcgagcggatcggattcattattatccgtgcgtgtggagtcgtcggcacgtacacgttcagtacaggtactcagtgtagcatgcatagcgcgaaggcctaggcagcaatggtgcggccaccgtcggcgcagatgac

SEQ ID NO: 74440 - DNA, 1815 bp, Zea Mays
ctcttatccaaacgcccccgtgccccgtctgcgtcgcgtagggttttggcaacttgcacgtacgagagcgtccatggacgacggcagcagcaacaaggtggttgaggacgtcgcggaggaggaccccggccgccgcggcggtccatggaggacggatgaggccgacgccaacgagaaggcgcctcgcccgagcaggcgggtcgcttccctcgacgtcttccgcggcctcaccgtcgcgctgatgatactggtggacggcgccggcggcgagtggccggtcatcgggcacgcgccgtggaacggctgcaacctcgcggacttcgtgatgcccttcttcctcttcatcgtcggcatggccgttcccctggccctcaagaggatcccggaccgtggccgagccgtgaggagagtggtcgtaaggacgctgaagctgctcttctggggcatcctgttgcaagtggaatgaatgtgtccaggcggttactcccacgctccggacgaactggcgtatggagtcgacatgaggcacgtgaggtggggcggaatcctccagaggatcgctcttgcgtacctggtggttgcggttctagagatggtgacgaaagacggcgccaaggttcatcaggaccagccgccaggttcttcaggccgcttctcccgtgtattcagaatgtatctctcccagtggatcgtcgcgtgctgcattctggtggtctacctgtcccttgcctacggggtctacgttcctgactgggagttcagagtgcgaaacgctgacagcccagactacggcaaagttctaacggtgaggtgtggtacgaggggggcgttggaccctccctgcaacgccgtaggctacatcgaccgcagagtcctgggcatcaaccacatgtaccagaagccggcatggagaaggcacagggcctgcactgatgactccccacacgaggggcctttcagagaggatgccccagcgtggtgtgtcgcgccattcgagcctgaagggatactgagcatcgcttctgtagctcactgtctgctgtgctgagtacggtcgtcggtgttcactacgggcatgtgcttgtccacatgaagagccatacggacaggcttaggcagtgggttaccatgggcgtagctcttctcgttctcggaatcattctgcacttctcgcatgcgatcccgctcaacaagcagctctacacgttcagctacatctgcgtcactgccggcgccgctggggtcgtcttctcagcgctctacttcttggtcgacgtcgtgagcctgcgctacgccttcgcgccgctgcggtgggtcggcatgaacgcgatgctggtgtacgtgatggccgcggaaggcgtcttcgagggcttcctcaacgggtggtactacgagagcaccaacaacactctggtttactgggtgaggaagcacgtgttcgtcaaggtgtggcactccaccagggtgggcatcctcctctacgtcctcttcgcgcagatcctcttctgggcgctcgtctccggcgtcctccaccgcgctcgcctctactggaagctctagcgagcgaacggtggcatagcatgcttttgtcttttgaactgcacatgatacacacgacacctcaaactcgaaccccaagttagtttgaagaactcaaatcacgggcaaaatggaattcggcgagcggatcggattcattattatccgtgcgtgtggagtcgtcggcacgtacacgttcagtacaggtactcagtgtagcatgcatagcgcgaaggcctaggcagcaatggtgcggccaccgtcggcgcagatgac

SEQ ID NO: 74441 - DNA, 1248 bp, Zea Mays
ctcttatccaaacgcccccgtgccccgtctgcgtcgcgtagggttttggcaacttgcacgtacgagagcgtccatggacgacggcagcagcaacaaggtggttgaggacgtcgcggaggaggaccccggccgccgcggcggtccatggaggacggatgaggccgacgccaacgagaaggcgcctcgcccgagcaggcgggtcgcttccctcgacgtcttccgcggcctcaccgtcgcggtgaggtgtggtacgaggggggcgttggaccctccctgcaacgccgtaggctacatcgaccgcagagtcctgggcatcaaccacatgtaccagaagccggcatggagaaggcacagggcctgcactgatgactccccacacgaggggcctttcagagaggatgccccagcgtggtgtgtcgcgccattcgagcctgaagggatactgagcatcgcttctgtagctcactgtctgctgtgctgagtacggtcgtcggtgttcactacgggcatgtgcttgtccacatgaagagccatacggacaggcttaggcagtgggttaccatgggcgtagctcttctcgttctcggaatcattctgcacttctcgcatgcgatcccgctcaacaagcagctctacacgttcagctacatctgcgtcactgccggcgccgctggggtcgtcttctcagcgctctacttcttggtcgacgtcgtgagcctgcgctacgccttcgcgccgctgcggtgggtcggcatgaacgcgatgctggtgtacgtgatggccgcggaaggcgtcttcgagggcttcctcaacgggtggtactacgagagcaccaacaacactctggtttactgggtgaggaagcacgtgttcgtcaaggtgtggcactccaccagggtgggcatcctcctctacgtcctcttcgcgcagatcctcttctgggcgctcgtctccggcgtcctccaccgcgctcgcctctactggaagctctagcgagcgaacggtggcatagcatgcttttgtcttttgaactgcacatgatacacacgacacctcaaactcgaaccccaagttagtttgaagaactcaaatcacgggcaaaatggaattcggcgagcggatcggattcattattatccgtgcgtgtggagtcgtcggcacgtacacgttcagtacaggtactcagtgtagcatgcatagcgcgaaggcctaggcagcaatggtgcggccaccgtcggcgcagatgac

SEQ ID NO: 74442 - DNA, 1849 bp, Zea Mays
ctcttatccaaacgcccccgtgccccgtctgcgtcgcgtagggttttggcaacttgcacgtacgagagcgtccatggacgacggcagcagcaacaaggtggttgaggacgtcgcggaggaggaccccggccgccgcggcggtccatggaggacggatgaggccgacgccaacgagaaggcgcctcgcccgagcaggcgggtcgcttccctcgacgtcttccgcggcctcaccgtcgcgctgatgatactggtggacggcgccggcggcgagtggccggtcatcgggcacgcgccgtggaacggctgcaacctcgcggacttcgtgatgcccttcttcctcttcatcgtcggcatggccgttcccctggccctcaaggtccgtcgtcgtcgtcggtcttcccgtccatccgtcgttcatgccatgcatgctcacaggatcccggaccgtggccgagccgtgaggagagtggtcgtaaggacgctgaagctgctcttctggggcatcctgttgcaaggttacttactctgtactctgttagacacccgcccttcgattttggcaagtctctactctctacctcgtgctcgtgcggcaaattaaagctgattagcgaatttgggaagtggaatgaatgtgtccaggcggttactcccacgctccggacgaactggcgtatggagtcgacatgaggcacgtgaggtggggcggaatcctccagaggatcgctcttgcgtacctggtggttgcggttctagagatggtgacgaaagacggcgccaaggttcatcaggaccagccgccaggttcttcaggccgcttctcccgtgtattcagaatgtatctctcccagtggtgaggtgtggtacgaggggggcgttggaccctccctgcaacgccgtaggctacatcgaccgcagagtcctgggcatcaaccacatgtaccagaagccggcatggagaaggcacagggcctgcactgatgactccccacacgaggggcctttcagagaggatgccccagcgtggtgtgtcgcgccattcgagcctgaagggatactgagctcactgtctgctgtgctgagtacggtcgtcggtgttcactacgggcatgtgcttgtccacatgaagagccatacggacaggcttaggcagtgggttaccatgggcgtagctcttctcgttctcggaatcattctgcacttctcgcatgcgatcccgctcaacaagcagctctacacgttcagctacatctgcgtcactgccggcgccgctggggtcgtcttctcagcgctctacttcttggtcgacgtcgtgagcctgcgctacgccttcgcgccgctgcggtgggtcggcatgaacgcgatgctggtgtacgtgatggccgcggaaggcgtcttcgagggcttcctcaacgggtggtactacgagagcaccaacaacactctggtttactgggtgaggaagcacgtgttcgtcaaggtgtggcactccaccagggtgggcatcctcctctacgtcctcttcgcgcagatcctcttctgggcgctcgtctccggcgtcctccaccgcgctcgcctctactggaagctctagcgagcgaacggtggcatagcatgcttttgtcttttgaactgcacatgatacacacgacacctcaaactcgaaccccaagttagtttgaagaactcaaatcacgggcaaaatggaattcggcgagcggatcggattcattattatccgtgcgtgtggagtcgtcggcacgtacacgttcagtacaggtactcagtgtagcatgcatagcgcgaaggcctaggcagcaatggtgcggccaccgtcggcgcagatgac

SEQ ID NO: 74443 - DNA, 1898 bp, Zea Mays
ctcttatccaaacgcccccgtgccccgtctgcgtcgcgtagggttttggcaacttgcacgtacgagagcgtccatggacgacggcagcagcaacaaggtggttgaggacgtcgcggaggaggaccccggccgccgcggcggtccatggaggacggatgaggccgacgccaacgagaaggcgcctcgcccgagcaggcgggtcgcttccctcgacgtcttccgcggcctcaccgtcgcgctgatgatactggtggacggcgccggcggcgagtggccggtcatcgggcacgcgccgtggaacggctgcaacctcgcggacttcgtgatgcccttcttcctcttcatcgtcggcatggccgttcccctggccctcaaggtccgtcgtcgtcgtcggtcttcccgtccatccgtcgttcatgccatgcatgctcacaggatcccggaccgtggccgagccgtgaggagagtggtcgtaaggacgctgaagctgctcttctggggcatcctgttgcaaggcggttactcccacgctccggacgaactggcgtatggagtcgacatgaggcacgtgaggtggggcggaatcctccagaggatcgctcttgcgtacctggtggttgcggttctagagatggtgacgaaagacggcgccaaggttcatcaggaccagccgccaggttcttcaggccgcttctcccgtgtattcagaatgtatctctcccagtggatcgtcgcgtgctgcattctggtggtctacctgtcccttgcctacggggtctacgttcctgactgggagttcagagtgcgaaacgctgacagcccagactacggcaaagttctaacggtgaggtgtggtacgaggggggcgttggaccctccctgcaacgccgtaggctacatcgaccgcagagtcctgggcatcaaccacatgtaccagaagccggcatggagaaggcacaggtgcttagttcagtagcgcctgtgtgtgtgtgactgtgtgtgcaggcctgcactgatgactccccacacgaggggcctttcagagaggatgccccagcgtggtgtgtcgcgccattcgagcctgaagggatactgagcatcgcttctgtagctcactgtctgctgtgctgagtacggtcgtcggtgttcactacgggcatgtgcttgtccacatgaagagccatacggacaggcttaggcagtgggttaccatgggcgtagctcttctcgttctcggaatcattctgcacttctcgcatgcgatcccgctcaacaagcagctctacacgttcagctacatctgcgtcactgccggcgccgctggggtcgtcttctcagcgctctacttcttggtcgacgtcgtgagcctgcgctacgccttcgcgccgctgcggtgggtcggcatgaacgcgatgctggtgtacgtgatggccgcggaaggcgtcttcgagggcttcctcaacgggtggtactacgagagcaccaacaacactctggtttactgggtgaggaagcacgtgttcgtcaaggtgtggcactccaccagggtgggcatcctcctctacgtcctcttcgcgcagatcctcttctgggcgctcgtctccggcgtcctccaccgcgctcgcctctactggaagctctagcgagcgaacggtggcatagcatgcttttgtcttttgaactgcacatgatacacacgacacctcaaactcgaaccccaagttagtttgaagaactcaaatcacgggcaaaatggaattcggcgagcggatcggattcattattatccgtgcgtgtggagtcgtcggcacgtacacgttcagtacaggtactcagtgtagcatgcatagcgcgaaggcctaggcagcaatggtgcggccaccgtcggcgcagatgac

SEQ ID NO: 74444 - DNA, 2126 bp, Zea Mays
aaagaaatcagattaggcgtggaattgtggcggcggcggccgtatcctcccgagctgctccctagacggcggccggtcctctacaggcggctccccagcggctacccagtcggcggtcgggactcccaagacgccgctcgtcttcctccccaggcgccaggcggccgcggctcgtgttcgtccccaggcagccacgcctcctgttcctccccaggcgtcaggcggccgtgtcctccccagccgtcggttcttgacttcataggtttcctctggacctcatgtgcatggctgcttgctgatttttagatagcatcacgttctgtcccctagcaaattagtctctatgcctatgtgtcacaaggaggaacaaagggctttaatgggaatcagctttagatttgcttgttcgttgccttcattgtttggtgcctggaaaaaggaagtgtgcctccattattagctagcacttattctgttaagattcgaaatggattcaattgaaaatattggacgcatagcagaaaccgtcactataagaaatcatggaatatggtgcagcaaaaagataaataggaactcgttattctctagctctaagcttggtagatgaatgggagatttgagctcaattaattgatttgtggcctgtaaagctcatcattagctatctgttatttatgatggttgtgacaaccagcttctcagccatttatagcaattagagcagtttgatgtttgtgtggggggtggtggtggggaggggcattgtcttgctttgcagtctacatatgaatcctggtacagcttattaaggaaaaacccaggggcgtctcccccctgtgttctaggttttttatgatgattgtaccagaatatatttatatagcctatatggatgcaaccactaagagtaattaattgctaattttctgcatccatgaagctgtcatctgaattgttctaagccatgtcatattcagagaaatatcaaacccatatgttgttgtttcaaacattaatagtgtaactttcttttttaaagaaaaaacagacactattacgtcatttgttgaacacattataatctagtagggtatttgacactggaccaagattgtttgaggacactattaatgagatatgcaaatgttacatatctcattaatatctgcaaaaaagagatagaagatgacaataagcccatgggagttttcactaggacaggttggaaaaatttggttacaaagtatgaagaaaaaacaggcctaaagctaacaaagaaacaattgaagaataagttggacaacatgaaaaaggagtatacatggttcatggagttcaagaatgcgaccactggtcttggatggaatgaggcaaaacaaactgttgactgctccaaagattggtgggatgaacacctagcaagatgtaacaatccggataaaggtatcaaatgcaaccatgttaggttcagaaaacaaggaccaaaacatcttgatgatctacatatgttgtttgataaaatacatgttagcgggacaagtgcatcatgtcctggagatatttcatctgatgactcaagtgatgatgtgctagagatagaaagaactccagaaaatgatgaagtcaaagtggttgtttcgaaaagatccaaaccagtgaaaaggaaacgcaaggcctcatgtactgctgctgaggagaaggaagagaagagtccattctttcgactatataagaacacatgtttgaagatagaaacaacagcagagaagatatccacaagtgttgaagcatcatcaacacatccaacaagccaagtgcctagcattgcagagactatgaagatggtgaaagattgtggggttaaagagaaaatagctctaatgcacacaactacatttttgattgtgaagcctgaatttagagaggtcttctgcatgctggaaacaaatgaaggaaggtttgacttacttgagagggagcatgcaaaggaaatgatgaggcacatgtagaagattttgaattatttatttatattaatgtgttgtgagaactatttgtttgcttgctatgtaagcaccatttggaatgatgatattgtgtccataatctttgttttctgtgca

SEQ ID NO: 74445 - DNA, 715 bp, Zea Mays
cagagatacttgcacaaaggagagtacagggaaaccccagaaactggaatacaatgggttacgaattgcatgggtcgtccaaggtaagtattatctcgtcgactctggttatccaaatcgacaaggatatctagcccctttcaaaggaagcacataccatatactagaatttcgacttcgtaatggatgtcctcctcaagggaagtatgagatattcaatttcttacattcatctcttcgaaatgttattgagagggcttttggagtcttgaagcagaagtggcgtattttgaaaggcattccaagtttttctacacgtacacagaaacatataataatagcttgcatggcgttgcataattttattcgtgacagcaattcagaagataagttgtttgatagatgtgatgctgatgaggagtacttggtacaacagagtttcacgtcacaagcacaaggagatgacaatccagagggagaaaatgagaatacaatgaataccattcgcattaagatagctgatgctttgagtactgcgagagggagatagttatgttgaagtaggatattctgaatcatcagtttatttatgtgtctcctacaatgtagggtcattacacacattttgtaccaaacctacaatttcacagttgttcgaaccaaacggctttctgcttttttcacagctaatattttacagcagctttttcacagc

SEQ ID NO: 74446 - DNA, 1066 bp, Zea Mays
gtttttgtggatcgttggaggaccacaatcattttcacaagctgaaaatcgttttacccgatcactatggacagtgcacaccaaatttcatgaagtactaaaatgtttgcgcaagttatcgaaagataatattaaaccaagagatcctactttcaaaactgagcatgatagaatcaaagaggaacgtttctggccgtatttccaaggagctatcggagctattgacggttcacatgttcctgtcacagtgccagcagctgaagtgcttaactatacatgtcgacatgggtatacatctcagaatgtgttagcaatttgtgattttgacattagatttatctttgtcgttgctgggtggccgggttctgcacatgacacacggatcctgaatcatgctttagcaaatttcccttcatttccggtgcctccaaaaggtaagtattatctcgtcgactctggttatccaaatcgacaaggatatctagcccctttcaaaggaagcacataccatatactagaatttcgacttcgtaatggatgtcctcctcaagggaagtatgagatattcaatttcttacattcatctcttcgaaatgttattgagagggcttttggagtcttgaagcagaagtggcgtattttgaaaggcattccaagtttttctacacgtacacagaaacatataataatagcttgcatggcgttgcataattttattcgtgacagcaattcagaagataagttgtttgatagatgtgatgctgatgaggagtacttggtacaacagagtttcacgtcacaagcacaaggagatgacaatccagagggagaaaatgagaatacaatgaataccattcgcattaagatagctgatgctttgagtactgcgagagggagatagttatgttgaagtaggatattctgaatcatcagtttatttatgtgtctcctacaatgtagggtcattacacacattttgtaccaaacctacaatttcacagttgttcgaaccaaacggctttctgcttttttcacagctaatattttacagcagctttttcacagc

SEQ ID NO: 74447 - DNA, 3154 bp, Zea Mays
atctccataagatttggctggttttttacgttggtttgccggacctaacacaaccctcctcctttaccgggcctgggaccggctatgttgaaacgactcaaggaagtcttccaatcaacataggcggagttttagctagtttatcaaaaatcatcatgtatataatactacagtatttaaaaatgctgcagtatttttctaaacttgtgaaaaaacttcactactaaacaactcctaaggagtaactgaatgccgatgccgtgctccgccggtgaggtcaccgcggcggcactggcacgggatccatcttcctccctcgtcgtccacgttcaaacccctgccccgattccaattccatcaattccatcgaggtggcagattcgaattgattaatccgttaacaagaaaatatactagtcaccacccctctctcctctttcgtcgccatcaacgaccgcttccactccgcctgccgctcccttcctcggcagcagcccgcccgccaccgcgtgaattcgcgggggctacaaatcccgccccgcccggccctgccaccgcggcatctcacctccatccaccaccgtcgtcggccaaggaaaaggaaaaggaaaagaaaggagcggggaagcggggcactggagcagtgaccatggtgaggctcccgtacgtgaccgcgctcaccacgctcttcagctacggcctcctcttcgccttcggccagctccgcgacttcttccgcaggatcctcgacgcccgcaagcccagcaacctcaagggctacgcgccgatctgcttgggactcgaggatttctacacgcgacgcctctacctccgcatccaggtgaggcgactgacaacgtcgcgttgcatattcctttctaatttgttaggtcgagcaagcaatagagagccattattccctttactccctggtccttatgattagatgacaccataacgaaatattataccatatgtccatatagaaaaccgttccaactgaaaaaaatttggtagagattggtctcttgaattgtttctgaagcacaacattttttaagagcatatttcatctactattgagctggaattttcatcatcgagaaaataaagtagactatcaaagaaaggaaagcttttgattttcaagtgatttccacaggaactgaaagattgcctcatcgcacttgcagcgtgctattcagtattaacaggactgctttggccggccgattgctagtgcaccagatgcttggttcgatgtggttgagcgctactcaaatgactgcaacaagacactccatcgtaccacagcaacaaccaaatgccttaacttgggttcctataactaccttggttttgctgcggctgatgagtactgcacccctcgtgttattgagtcactgaagaaatattcggctagcacgtgcagtgttcgagttgatggaggcaatactaagttgcacacagagctcgaagagcttgttgcaagatttgttggtaagcctgcagctattctttttggcatgggctatgtgacaaactctgctatcattccagcgctggttgggaagggaagcctgattattagtgattcactgaaccataattctatagtcaacggagctaggggttcaggggccactgttcgggtttttcaacataacaatcctgctcacttggaagaggtattgagagagcagattgcaggaggccagcctcgcacacacaggccatggaagaagatcattgtaattgtcgagggaatttatagcatggagggggagctatgcaaactccctgaggttatttctgtctgcaagaaatacaaggcctacacatatctagacgaagcacacagtattggagctgttgggaaaacagggagaggtgtttgtgagctgctcggagtggatccagctgatgttgacattatgatgggtacattcacaaaatcatttggatcatgtggaggttacattgcagcatcaaatgtaagcgtgtatagtcacttagctgttgttgactgaatacattttgaagttgacaaatctgacccaccaaatgttcattttttaggagattattcaccatctaaagcatacatgcccagcccatatttatgcaacatccatgtcacctccagcagtccagcaggtcatttcagctataaaggtcatccttggggaagatggaactaacagaggggccaagaagctcgctcaaattcgagagaacagcaatttcttccgctcggagcttcagaaaatgggttttgaggttcttggagataatgattcacctgtcatgcctatcatgctttacaatcctgctaaaattcctgcattctcaagggagtgcctgaggcaagctgttgctgttgttactgttgcatttcctgccacgccacttctacttgcgagagctaggatatgtatctcagcttcccactccagggaagatctcataaaaggattggaggttatcagcaaagttggtgaccttgtgggtatcaaatacttcccggttgagcaagaaaagaccacggctgttgaaaatctgaagaaaattcaatgaacaatggcaagaactctgaagctgttgtagggtcatcttagtgtgcatcgcatgcctcagtttggcccttctgtgcacctctgggcccttttttgtccttctgtttgtggagaaatttagactttgtacagtatgtatcatccaccatagttgaaaatataacgggcagatagacattgtcatcgaattcggagaagtaatttttccggtcaccactttaaaccatttagactatgtgactgaaaccatgtagatattattatcgatcattctggttgttttgaattggacgtagataggtccatctttgtgaccgagtaataaatctggagtacagaaatggaaaaggcagcagagctgaatccgaatattttggtgagcagtgcttagtgttgatttatttgactgagtgatcttaccagtcacctgtggcccataagttgtagttactcagtatgctttacttcaaggacatgggcatagtggtaaattttcatggtgaatcaaggaagttaaccttttggcagtaacttgtactggaccttgggccttgacttaatgtggatgtgaacttgtg

SEQ ID NO: 74448 - DNA, 2723 bp, Zea Mays
atctccataagatttggctggttttttacgttggtttgccggacctaacacaaccctcctcctttaccgggcctgggaccggctatgttgaaacgactcaaggaagtcttccaatcaacataggcggagttttagctagtttatcaaaaatcatcatgtatataatactacagtatttaaaaatgctgcagtatttttctaaacttgtgaaaaaacttcactactaaacaactcctaaggagtaactgaatgccgatgccgtgctccgccggtgaggtcaccgcggcggcactggcacgggatccatcttcctccctcgtcgtccacgttcaaacccctgccccgattccaattccatcaattccatcgaggtggcagattcgaattgattaatccgttaacaagaaaatatactagtcaccacccctctctcctctttcgtcgccatcaacgaccgcttccactccgcctgccgctcccttcctcggcagcagcccgcccgccaccgcgtgaattcgcgggggctacaaatcccgccccgcccggccctgccaccgcggcatctcacctccatccaccaccgtcgtcggccaaggaaaaggaaaaggaaaagaaaggagcggggaagcggggcactggagcagtgaccatggtgaggctcccgtacgtgaccgcgctcaccacgctcttcagctacggcctcctcttcgccttcggccagctccgcgacttcttccgcaggatcctcgacgcccgcaagcccagcaacctcaagggctacgcgccgatctgcttgggactcgaggatttctacacgcgacgcctctacctccgcatccaggactgctttggccggccgattgctagtgcaccagatgcttggttcgatgtggttgagcgctactcaaatgactgcaacaagacactccatcgtaccacagcaacaaccaaatgccttaacttgggttcctataactaccttggttttgctgcggctgatgagtactgcacccctcgtgttattgagtcactgaagaaatattcggctagcacgtgcagtgttcgagttgatggaggcaatactaagttgcacacagagctcgaagagcttgttgcaagatttgttggtaagcctgcagctattctttttggcatgggctatgtgacaaactctgctatcattccagcgctggttgggaagggaagcctgattattagtgattcactgaaccataattctatagtcaacggagctaggggttcaggggccactgttcgggtttttcaacataacaatcctgctcacttggaagaggtattgagagagcagattgcaggaggccagcctcgcacacacaggccatggaagaagatcattgtaattgtcgagggaatttatagcatggagggggagctatgcaaactccctgaggttatttctgtctgcaagaaatacaagggcctaatatacctcacatatgaacaggcctacacatatctagacgaagcacacagtattggagctgttgggaaaacagggagaggtgtttgtgagctgctcggagtggatccagctgatgttgacattatgatgggtacattcacaaaatcatttggatcatgtggaggttacattgcagcatcaaatgagattattcaccatctaaagcatacatgcccagcccatatttatgcaacatccatgtcacctccagcagtccagcaggtcatttcagctataaaggtcatccttggggaagatggaactaacagaggggccaagaagctcgctcaaattcgagagaacagcaatttcttccgctcggagcttcagaaaatgggttttgaggttcttggagataatgattcacctgtcatgcctatcatgctttacaatcctgctaaaattcctgcattctcaagggagtgcctgaggcaagctgttgctgttgttactgttgcatttcctgccacgccacttctacttgcgagagctaggatatgtatctcagcttcccactccagggaagatctcataaaaggattggaggttatcagcaaagttggtgaccttgtgggtatcaaatacttcccggttgagcaagaaaagaccacggctgttgaaaatctgaagaaaattcaatgaacaatggcaagaactctgaagctgttgtagggtcatcttagtgtgcatcgcatgcctcagtttggcccttctgtgcacctctgggcccttttttgtccttctgtttgtggagaaatttagactttgtacagtatgtatcatccaccatagttgaaaatataacgggcagatagacattgtcatcgaattcggagaagtaatttttccggtcaccactttaaaccatttagactatgtgactgaaaccatgtagatattattatcgatcattctggttgttttgaattggacgtagataggtccatctttgtgaccgagtaataaatctggagtacagaaatggaaaaggcagcagagctgaatccgaatattttggtgagcagtgcttagtgttgatttatttgactgagtgatcttaccagtcacctgtggcccataagttgtagttactcagtatgctttacttcaaggacatgggcatagtggtaaattttcatggtgaatcaaggaagttaaccttttggcagtaacttgtactggaccttgggccttgacttaatgtggatgtgaacttgtg

SEQ ID NO: 74449 - DNA, 1628 bp, Zea Mays
ggacccgccgccgattctccgggaggcgtgggagggctgcagcgccctcgtcgacatcaacgacggcgatcgcctagccttcttccgcctcacccgcggagcctcaggttggtgcgactggtgacgagattgtagaagctttaatagcaaatagctcaacatttggaaagaaaattgtcttctcgcagaagtacaagttaaagaaacaaaagaaatatgcacctaatgttctgataccacacccatctgctcagagcatttgtgagacatacttcaagaaaagtccagctcatatagggtttgtgcgagttgacacactatctctcttgttgcctatggtaaacatcagtgcatattcagatgtgcttgtggttgatatggttggaggtttagttgttggagccgttgctgaacatttaggaggtacagggtatgtttgcagcacatgtcttggttcagcacccagcaccatcgacattataagaatgtacaatttgagcagtgatatggtcagcagatagtagcgctgaagggccgggagacgatagaacctgctggagatgaggatgcccatgcatctttggcacatcaagtgggcacagcagtgtcagatgataaggcacagttatcaacagatcagccaactgatatggaggcctcagagccttctttggatgagcatcatgttcaagatgagaactcttcattaggtggcaaagacagtgatggtactacttcaaatgcttcaaaatctcctaaacctggaaaagcaccatcaccagaaaagatgaaatattggaaggaacatggctttagcagtttgattgttgctgcccctggccacgaagtagagtgtcttgttgctgatctgcttccacttttgtcttattcagctccatttgctatatatcatcagtatcctgagcctcttgcaaagtgcatgtacagcttacagctatcaaagagggccattggattgcagctctctgaaccctgcctacgtgaataccaggtccttgcatcgcgcacccatccacacatgcaaatggatgcgtttggcggttatatcttgagcggcataaggatacaaaatacaaattatatgatgtaaccgccatcaacaaggatacacaagtgagtcatcaatatggttcagtcttccgatcaaaggaggatagcacgccattgtactttaaaaggcggggaaattttttgtattcttatcagacatacgttgccatgcttacatagaatagaataacacctggttggtggttttaggacatgtttggtttgtgactaactgtgtcacactttgcctaaggttagttgttcgaataactaatcttatgctgaaaagttaggcatcaattcaaacatgcccttgaattaaataactaatcttaggctgaaaagttaggcaagttatgcatcaatccaaacatgcccttagtgtttcacgagcgggggcaaatggttggtggtgttttcggtctctcctggggttagaggctctaggacttgtttggttcgtgactaaatgtatcatattttgtctaagattagtcgtcaaaattgaagaactaaacttatatagaaaaagttatataaagtatggtaagttagac

SEQ ID NO: 74450 - DNA, 1633 bp, Zea Mays
cggcgatcgcctagccttcttccgcctcacccgcggagcctcaggttggtgcgactggtgacgagattgtagaagctttaatagcaaatagctcaacatttggaaagaaaattgtcttctcgcagaagtacaagttaaagaaacaaaagaaatatgcacctaatgttctgataccacacccatctgctcagagcatttgtgagacatacttcaagaaaagtccagctcatatagggtttgtgcgagttgacacactatctctcttgttgcctatggtaaacatcagtgcatattcagatgtgcttgtggttgatatggttggaggtttagttgttggagccgttgctgaacatttaggaggtacagggtatgtttgcagcacatgtcttggttcagcacccagcaccatcgacattataagaatgtacaatttgagcagtgatatggtcagcaggattgttctggtgccacttagtgccccatgttcaatgcaaagttctgggaattccccttctgttgtagatagtagcgctgaagggccgggagacgatagaacctgctggagatgaggatgcccatgcatctttggcacatcaagtgggcacagcagtgtcagatgataaggcacagttatcaacagatcagccaactgatatggaggcctcagagccttctttggatgagcatcatgttcaagatgagaactcttcattaggtggcaaagacagtgatggtactacttcaaatgcttcaaaatctcctaaacctggaaaagcaccatcaccagaaaagatgaaatattggaaggaacatggctttagcagtttgattgttgctgcccctggccacgaagtagagtgtcttgttgctgatctgcttccacttttgtcttattcagctccatttgctatatatcatcagtatcctgagcctcttgcaaagtgcatgtacagcttacagctatcaaagagggccattggattgcagctctctgaaccctgcctacgtgaataccaggtccttgcatcgcgcacccatccacacatgcaaatggatgcgtttggcggttatatcttgagcggcataaggatacaaaatacaaattatatgatgtaaccgccatcaacaaggatacacaagtgagtcatcaatatggttcagtcttccgatcaaaggaggatagcacgccattgtactttaaaaggcggggaaattttttgtattcttatcagacatacgttgccatgcttacatagaatagaataacacctggttggtggttttaggacatgtttggtttgtgactaactgtgtcacactttgcctaaggttagttgttcgaataactaatcttatgctgaaaagttaggcatcaattcaaacatgcccttgaattaaataactaatcttaggctgaaaagttaggcaagttatgcatcaatccaaacatgcccttagtgtttcacgagcgggggcaaatggttggtggtgttttcggtctctcctggggttagaggctctaggacttgtttggttcgtgactaaatgtatcatattttgtctaagattagtcgtcaaaattgaagaactaaacttatatagaaaaagttatataaagtatggtaagttagac

SEQ ID NO: 74451 - DNA, 809 bp, Zea Mays
tggtctaggcaagtaactgtcgtgacatgacatttgacatccgtcctttccctctctctctctgtctagactatagaatagcaagtataaaaaggagaagcctcgggcgctgtcgttggacaggaaagggggagctcaggcctcaagaagaaagagcccgcgccacgccacgccacgccgccgtggacatggaggtggagctggagcacggcggggatgaaggcggcgacagagggagcgagtcctcctcctcctcctccaagaggagcttcggcgcttcttcggacgcaaccgtcagcagcacaccaagcaagctgcaagccctgaggtttgcagaggacctctcgctgccgtcggtgcaggtggtggtgatgagcgccaacatggggtgttcgcactgccggcagcgggtcgccaacgtcgtctccaagatgaacggcctgctggactacatggtggacttcgggaagaaggaggtgacggtgcgcgggaaggtggtgcataccaagaagaagaagaagaggcacatgagggcactgctgggtgcagcaggagcaggttgggacgacgcccgatcggcggcgtctttgcccggcggccatgccaggacgctgtcctggttttgggggtgctacagctcatgacggccatagctagtatagtctttatataatactaatatataccgcatatatatagagagactatcatacgtctgtatgttacatttatatgtaactagtaggagctgcgtatatatagttgttgtattaataatctgttagtagtaatatatttcttctcctggt

SEQ ID NO: 74452 - DNA, 757 bp, Zea Mays
cgcacctggacacatagatatgtgatgacacaaacacataatatttccagcatatacaaaactgcaaaattaaatttattcaagagaatacaaatttagaaatagttgtcggagcttgtgcatcgtttaagttccctacagcatcgctatgtcggtgtcgcctaggcgaggcctaggtgtccaggcgcccggccaggctcatcgtgatgcggcacctcgcctgaagatggctaggcggacgcctgaagggatggtggaggcaagcaatcacagcagccccaaaggaggctcgcaaggggctgaattccttaataatcttggtggcctgggagttatggaagcaccgtaatgcttgtgtttttgagaagcataggcttaggattcaagatgttcttagttatgttagtttggagggagacctgtggtgtttggcaggggcctccaaactcaaggagctagtgtttaggtcgtcgacgttcttggcctaaggcataaggccgctctggtcgtgtcttattttcttctgtggcgcttatgtaatggtgtgagtggtgccttcgttaggcacctagggcggtctttctagaccatgtatttttcttctaccttaatgaaatgtcgcgcaattctcctgcgtggttcgggaaaaaaagtatttaagataaataagtttcatgggatgaaattggtttcatggggatgaaaccatgtcaacccgtttccaaggtcttgaaaatcgtgtgaaacctcctttaag

SEQ ID NO: 74453 - DNA, 594 bp, Zea Mays
taggcgtcgtctaggagcacccaatcaagcgcctaggtctaggtaggtgaaaagattacctagagcctgctcgctcgtcgacgccggatggtggaggcaagcaatcacagcagccccaaaggaggctcgcaaggggctgaattccttaataatcttggtggcctgggagttatggaagcaccgtaatgcttgtgtttttgagaagcataggcttaggattcaagatgttcttagttatgttagtttggagggagacctgtggtgtttggcaggggcctccaaactcaaggagctagtgtttaggtcgtcgacgttcttggcctaaggcataaggccgctctggtcgtgtcttattttcttctgtggcgcttatgtaatggtgtgagtggtgccttcgttaggcacctagggcggtctttctagaccatgtatttttcttctaccttaatgaaatgtcgcgcaattctcctgcgtggttcgggaaaaaaagtatttaagataaataagtttcatgggatgaaattggtttcatggggatgaaaccatgtcaacccgtttccaaggtcttgaaaatcgtgtgaaacctcctttaag

SEQ ID NO: 74454 - DNA, 536 bp, Zea Mays
gagcacccaatcaagcgcctaggtctaggatggtggaggcaagcaatcacagcagccccaaaggaggctcgcaaggggctgaattccttaataatcttggtggcctgggagttatggaagcaccgtaatgcttgtgtttttgagaagcataggcttaggattcaagatgttcttagttatgttagtttggagggagacctgtggtgtttggcaggggcctccaaactcaaggagctagtgtttaggtcgtcgacgttcttggcctaaggcataaggccgctctggtcgtgtcttattttcttctgtggcgcttatgtaatggtgtgagtggtgccttcgttaggcacctagggcggtctttctagaccatgtatttttcttctaccttaatgaaatgtcgcgcaattctcctgcgtggttcgggaaaaaaagtatttaagataaataagtttcatgggatgaaattggtttcatggggatgaaaccatgtcaacccgtttccaaggtcttgaaaatcgtgtgaaacctcctttaag

SEQ ID NO: 74455 - DNA, 548 bp, Zea Mays
ctagcaatccttggttgtgtcttggcagcagcagccagaggatggtggaggcaagcaatcacagcagccccaaaggaggctcgcaaggggctgaattccttaataatcttggtggcctgggagttatggaagcaccgtaatgcttgtgtttttgagaagcataggcttaggattcaagatgttcttagttatgttagtttggagggagacctgtggtgtttggcaggggcctccaaactcaaggagctagtgtttaggtcgtcgacgttcttggcctaaggcataaggccgctctggtcgtgtcttattttcttctgtggcgcttatgtaatggtgtgagtggtgccttcgttaggcacctagggcggtctttctagaccatgtatttttcttctaccttaatgaaatgtcgcgcaattctcctgcgtggttcgggaaaaaaagtatttaagataaataagtttcatgggatgaaattggtttcatggggatgaaaccatgtcaacccgtttccaaggtcttgaaaatcgtgtgaaacctcctttaag

SEQ ID NO: 74456 - DNA, 1922 bp, Zea Mays
ctattttatactgttcgtagagtgaaatttggtaaaattagtacaggagaggagtgagggagaaaaagaaaagaaacctaacatctgatgtggagacaaacccctcgccaaacctccattcacggaccacattaacgttagttattattagcctattatagaggaggattacagctcatcattggtgagtggaaaaacgattaggaaagcaggagaaggggagtggcggagtgcatagcaattagcaacatcatccagcggacagcattcctaaccctcctttctatctcacccgtttcttctctgcaagtagtactatttctccgtcatactgaagctctgctgtgtgtgcgcgcgcgcgttggaggaaggaggaagaagtgctggtgacgtgttggaagataaccctgttgggaggctcaaggtttacgtgtatgatctccccagtaaatacaacaagaagctggtgaagaaggatcctaggtgcctgaaccacatgtttgctgctgagatcttcatgcaccggttcctgttgtcaagtgctgtccgaacatttaatcctgaagaagcagattggttctacactcccgtatacgccacatgtgatctgactccttcgggtcttccccttcccttcaaatctccacgcatgatgcgcagcgcaattgagctgattgccacgaactggccttactggaacagatcagagggtgcagatcatttctttgtcacgccacatgactttggtgcttgcttccattatcaggaagagaaagcaatcgggcggggaatccttcccttgcttcagcgtgctacactggttcagacctttggacagaagaaccatgtctgcctgaagggcgggtccatcacaatcccaccatttgcacctccccagaaaatgcaggctcaccttatccccttggacacccctcggtctatcttcgtgtacttccgtggtctgttctacgacaccagcaacgatcctgagggtggttactatgcgagaggtgctcgtgcatcagtctgggagaacttcaagaacaacccgctcttcgacatctcgactgatcacccaccgacttactacgaagacatgcagcgttcagtgttctgcctgtgccccttgggctgggctccatggagccccaggctggtggaagctgtggttttcggctgcatcccggtgatcatcgccgacgacattgtcctgccctttgcggacgccatcccgtgggaggagattggtgtgtttgtcgccgaggaggatgtcccgaagctggacagcatcctgacgtccatcccaacagatgttatactgaggaagcagcgtctcctcgcgaacccggccatgaagcaggccatgctgttcccccagcctgctcaggcgggagatgcattccaccagatcctaaacgggctcgcgcgcaagctcccacatggtgacaacgtcttcttgaagcccggggagagggtcctgaactggaccgccggaccgccaggcgacctgaagccttggtagcatctgcctgcctagaacctttttgtgaaaaaaagcaagaacgagaacatggtgatatacatacatgcgcctttaagttaccatggttgtgtacttgtatagtgctgcattttgccctcctgatcgagctgacaattgccatatatacagcacatggaccgccatctttcatcatctaatgcaaaggtgaaactacttctttttgaagcaagatcattggggaacctgcctgattcgctgatggtttatcagggtagcatgtcgctgcagtctttgtctgaatgttgctgagttctcaaggaactgacgcgagcacataatcaacatcagcacgttcctttttttattttgtggcccaggaggtgtacgagctaacaatttgaaatggccaggttgtagg

SEQ ID NO: 74457 - DNA, 2241 bp, Zea Mays
ctattttatactgttcgtagagtgaaatttggtaaaattagtacaggagaggagtgagggagaaaaagaaaagaaacctaacatctgatgtggagacaaacccctcgccaaacctccattcacggaccacattaacgttagttattattagcctattatagaggaggattacagctcatcattggtgagtggaaaaacgattaggaaagcaggagaaggggagtggcggagtgcatagcaattagcaacatcatccagcggacagcattcctaaccctcctttctatctcacccgtttcttctctgcaagtagtactatttctccgtcatactgaagctctgctgtgtgtgcgcgcgcgcgttggaggaaggaggaagtaagcctaggaaagccatcgcccaccttctcgctacccaccaaacgccgcttggtaggagaagaattgcccgaaaagcttcccgttggccgggatctcttcttctttaattacccctggggattgcctggctcattagaccagacagggggagagagggagcgagctggccggctaggccaggagaggagaggggagacacagacaacgagcgctcgctgggaagaggaagaggttcgtggggacgcagggatccagaggaagatgaggcggtgggtcttagccatcgccattcccattctcgccgctgcttcggcggcggcgctgttccttggggctgaggcccaggcggtccagcagggccaccagacagagaggatctcaggaagtgctggtgacgtgttggaagataaccctgttgggaggctcaaggtttacgtgtatgatctccccagtaaatacaacaagaagctggtgaagaaggatcctaggtgcctgaaccacatgtttgctgctgagatcttcatgcaccggttcctgttgtcaagtgctgtccgaacatttaatcctgaagaagcagattggttctacactcccgtatacgccacatgtgatctgactccttcgggtcttccccttcccttcaaatctccacgcatgatgcgcagcgcaattgagctgattgccacgaactggccttactggaacagatcagagggtgcagatcatttctttgtcacgccacatgactttggtgcttgcttccattatcaggaagagaaagcaatcgggcggggaatccttcccttgcttcagcgtgctacactggttcagacctttggacagaagaaccatgtctgcctgaagggcgggtccatcacaatcccaccatttgcacctccccagaaaatgcaggctcaccttatccccttggacacccctcggtctatcttcgtgtacttccgtggtctgttctacgacaccagcaacgatcctgagggtggttactatgcgagaggtgctcgtgcatcagtctgggagaacttcaagaacaacccgctcttcgacatctcgactgatcacccaccgacttactacgaagacatgcagcgttcagtgttctgcctgtgccccttgggctgggctccatggagccccaggctggtggaagctgtggttttcggctgcatcccggtgatcatcgccgacgacattgtcctgccctttgcggacgccatcccgtgggaggagattggtgtgtttgtcgccgaggaggatgtcccgaagctggacagcatcctgacgtccatcccaacagatgttatactgaggaagcagcgtctcctcgcgaacccggccatgaagcaggccatgctgttcccccagcctgctcaggcgggagatgcattccaccagatcctaaacgggctcgcgcgcaagctcccacatggtgacaacgtcttcttgaagcccggggagagggtcctgaactggaccgccggaccgccaggcgacctgaagccttggtagcatctgcctgcctagaacctttttgtgaaaaaaagcaagaacgagaacatggtgatatacatacatgcgcctttaagttaccatggttgtgtacttgtatagtgctgcattttgccctcctgatcgagctgacaattgccatatatacagcacatggaccgccatctttcatcatctaatgcaaagggtagcatgtcgctgcagtctttgtctgaatgttgctgagttctcaaggaactgacgcgagcacataatcaacatcagcacgttcctttttttattttgtggcccaggaggtgtacgagctaacaatttgaaatggccaggttgtagg

SEQ ID NO: 74458 - DNA, 3196 bp, Zea Mays
ctattttatactgttcgtagagtgaaatttggtaaaattagtacaggagaggagtgagggagaaaaagaaaagaaacctaacatctgatgtggagacaaacccctcgccaaacctccattcacggaccacattaacgttagttattattagcctattatagaggaggattacagctcatcattggtgagtggaaaaacgattaggaaagcaggagaaggggagtggcggagtgcatagcaattagcaacatcatccagcggacagcattcctaaccctcctttctatctcacccgtttcttctctgcaagtagtactatttctccgtcatactgaagctctgctgtgtgtgcgcgcgcgcgttggaggaaggaggaagtaagcctaggaaagccatcgcccaccttctcgctacccaccaaacgccgcttggtaggagaagaattgcccgaaaagcttcccgttggccgggatctcttcttctttaattacccctggggattgcctggctcattagaccagacagggggagagagggagcgagctggccggctaggccaggagaggagaggggagacacagacaacgagcgctcgctgggaagaggaagaggttcgtggggacgcagggatccagaggaagatgaggcggtgggtcttagccatcgccattcccattctcgccgctgcttcggcggcggcgctgttccttggggctgaggcccaggcggtccagcagggccaccagacagagaggatctcaggtgagaccgtgagagagagagagagagagagagagagagagaaagagatgatgggcctcttttccttgcgtttgttcccgtcttgtttctcatcttgataggcacatccttgtcagtttgtagaactcaagctgcttggtctgtctagttgggtgtcatttgctttttgctagtagtattaattgtgtaaagctagagttttggcatcggttaatgtggcagtgcacctgtcgggacctctgaatcctaaattcatagaactttaatcctgatttcgtatgctaataagttacagagaaactggatgcaggtttatcctgtggtgttctgttcgtagcagtttgatccggttctcgtgaaatttagcagaaaccacttttttacatgctgctccatgaatctgttgtgaaaaatgtagaatgcaatatggtacttgttccctatgttctatcaccaacgcctacaatttatgtacctctttcacggtgtgttttgttgctagttcttcaagcttggacaagtagaatcctatgtgccgtttggttcacgaaagtaatgattcacactctgattgccagtgataacaagtttgaataagacaatgtcagtttctagtgtactatctgactacggttagacttaaccaaacatggtttaacgttatcggttatcattcacgttacaaacatgtgaactaaaaagtaccctactgtcagttcaacataggtgcaaaaatcactttacacctataaggcttctacctggcacactttcattctatcattgtacttttatgatcttgtgatccctagcatggttctaaggcccaagtatattcttttccctacctttgtgcaaagcctgtaatgatgtggccgataaaattcaggaagtgctggtgacgtgttggaagataaccctgttgggaggctcaaggtttacgtgtatgatctccccagtaaatacaacaagaagctggtgaagaaggatcctaggtgcctgaaccacatgtttgctgctgagatcttcatgcaccggttcctgttgtcaagtgctgtccgaacatttaatcctgaagaagcagattggttctacactcccgtatacgccacatgtgatctgactccttcgggtcttccccttcccttcaaatctccacgcatgatgcgcagcgcaattgagctgattgccacgaactggccttactggaacagatcagagggtgcagatcatttctttgtcacgccacatgactttggtgcttgcttccattatcaggaagagaaagcaatcgggcggggaatccttcccttgcttcagcgtgctacactggttcagacctttggacagaagaaccatgtctgcctgaagggcgggtccatcacaatcccaccatttgcacctccccagaaaatgcaggctcaccttatccccttggacacccctcggtctatcttcgtgtacttccgtggtctgttctacgacaccagcaacgatcctgagggtggttactatgcgagaggtgctcgtgcatcagtctgggagaacttcaagaacaacccgctcttcgacatctcgactgatcacccaccgacttactacgaagacatgcagcgttcagtgttctgcctgtgccccttgggctgggctccatggagccccaggctggtggaagctgtggttttcggctgcatcccggtgatcatcgccgacgacattgtcctgccctttgcggacgccatcccgtgggaggagattggtgtgtttgtcgccgaggaggatgtcccgaagctggacagcatcctgacgtccatcccaacagatgttatactgaggaagcagcgtctcctcgcgaacccggccatgaagcaggccatgctgttcccccagcctgctcaggcgggagatgcattccaccagatcctaaacgggctcgcgcgcaagctcccacatggtgacaacgtcttcttgaagcccggggagagggtcctgaactggaccgccggaccgccaggcgacctgaagccttggtagcatctgcctgcctagaacctttttgtgaaaaaaagcaagaacgagaacatggtgatatacatacatgcgcctttaagttaccatggttgtgtacttgtatagtgctgcattttgccctcctgatcgagctgacaattgccatatatacagcacatggaccgccatctttcatcatctaatgcaaaggtgaaactacttctttttgaagcaagatcattggggaacctgcctgattcgctgatggtttatcagggtagcatgtcgctgcagtctttgtctgaatgttgctgagttctcaaggaactgacgcgagcacataatcaacatcagcacgttcctttttttattttgtggcccaggaggtgtacgagctaacaatttgaaatggccaggttgtagg

SEQ ID NO: 74459 - DNA, 1804 bp, Zea Mays
gtttgatccggttctcgtgaaatttagcagaaaccacttttttacatgctgctccatgaatctgttgtgaaaaatgtagaatgcaatatggaagtgctggtgacgtgttggaagataaccctgttgggaggctcaaggtttacgtgtatgatctccccagtaaatacaacaagaagctggtgaagaaggatcctaggtgcctgaaccacatgtttgctgctgagatcttcatgcaccggttcctgttgtcaagtgctgtccgaacatttaatcctgaagaagcagattggttctacactcccgtatacgccacatgtgatctgactccttcgggtcttccccttcccttcaaatctccacgcatgatgcgcagcgcaattgagctgattgccacgaactggccttactggaacagatcagagggtgcagatcatttctttgtcacgccacatgactttggtgcttgcttccattatcaggaagagaaagcaatcgggcggggaatccttcccttgcttcagcgtgctacactggttcagacctttggacagaagaaccatgtctgcctgaagggcgggtccatcacaatcccaccatttgcacctccccagaaaatgcaggctcaccttatccccttggacacccctcggtctatcttcgtgtacttccgtggtctgttctacgacaccagcaacgatcctgagggtggttactatgcgagaggtgctcgtgcatcagtctgggagaacttcaagaacaacccgctcttcgacatctcgactgatcacccaccgacttactacgaagacatgcagcgttcagtgttctgcctgtgccccttgggctgggctccatggagccccaggctggtggaagctgtggttttcggctgcatcccggtgatcatcgccgacgacattgtcctgccctttgcggacgccatcccgtgggaggagattggtgtgtttgtcgccgaggaggatgtcccgaagctggacagcatcctgacgtccatcccaacagatgttatactgaggaagcagcgtctcctcgcgaacccggccatgaagcaggccatgctgttcccccagcctgctcaggcgggagatgcattccaccagatcctaaacgggctcgcgcgcaagctcccacatggtgacaacgtcttcttgaagcccggggagagggtcctgaactggaccgccggaccgccaggcgacctgaagccttggtagcatctgcctgcctagaacctttttgtgaaaaaaagcaagaacgagaacatggtgatatacatacatgcgcctttaagttaccatggttgtgtacttgtatagtgctgcattttggtatgttcttctttccctgtagttgttataccatatatcttcatttatccctctcttcttttctgccctttctcactagggtatgagaatgtcagccttgtcaatcatgcggataccatagtcgaaatctacaccattttactcactctgaatgttcactgccggacagccctcctgatcgagctgacaattgccatatatacagcacatggaccgccatctttcatcatctaatgcaaaggtgaaactacttctttttgaagcaagatcattggggaacctgcctgattcgctgatggtttatcagggtagcatgtcgctgcagtctttgtctgaatgttgctgagttctcaaggaactgacgcgagcacataatcaacatcagcacgttcctttttttattttgtggcccaggaggtgtacgagctaacaatttgaaatggccaggttgtagg

SEQ ID NO: 74460 - DNA, 1915 bp, Zea Mays
ggagatccggtctgctacttatggatgccgacgagcaacagaactagtacaggtcgcaacaaccccaacgagcaaaccccccatttgccaccaaccccgacgagcggcgatgaccggcacggtgtctaagctggcggcgccccgtccggcggcaccgccgctccggccggcgtccctccgcaccgccgccctcgccttcgccccctccgcgcgccgggtccgcgtctccgtcgccgggcgagccaggagccccatcattgcgatggcttcggccaaggaaggaaatggtgcaccgaccaagaggactgcgcttcatgatctctacgagctccagggcctgtccccgtggtacgacaacctatgccgccctgtcacagacttgctgcccattatcgccagcggcgtccgtggagtcaccagcaacccaacgattttccaaaaggccatttcatcgtccagcgcatatgatgatcagttcaagcagctcatttcggctggaaaggacgcggagagcgcttactgggaactcgttataaaggatatccaagatgcgtgcaaactttttgagcccatctacgatgagactgatggggctgatgggtatgtctccgtagaggtgtctcctaggttggcaaatgacactcaaggaactgttgaagcggcaaagtggttacacaaagtggtcaaccgccccaatgtctacataaagatcccagctactgcagaatgtgttccttccatccaggaagttatcgctaatggcattagcgtcaacgtcacgcttattttctcaattgcaagatatgaggctgtgattgatgcttacctcgatgggctagaggcttctggcttgagtgacttatcccgagttactagcgttgcatccttctttgtcagccgagtggacacccttattgacaaaatgcttgacaagattggaacacctgaggcccttgccttgagaggaaagtagcacaggccaaactagcaaatcggctctaccagaagaaattctctggcccaaggtgggaggcgttggccaagaaaggtgccaagaaacaaaggttgttgtgggcatccaccggtgtcaagaacccagcttatcctgacactctttatgtggacagtctcatcggacctgacacggtcaacacgatgcccgaccaagctttgcaagcattcatagaccacggcaccgtttcaaggacagttgatgcgaacgtgtctgaggcggaaggtgtatacagtgccttggagaagcttggcatcgactgggaagaggttggaaagcagcttgagctggaaggcgtggactccttcaagaagagctttgacagcctactcgtgagcctgcaggagaagggcaacagcctcaagatggcgagtgtgtaaagctgagaagattgggtacctgcgagtgaacgattttactaaataaaatgctagcttgctggctctcctcttagtttttacgctgtacctttgctctcaattttctgagtcggctttgtatcccaggcttgccagaacgtcattgtgtagccactgttcatggcttgtaattgctacggggtatccgataacgtcattgtggatgaggcctgtttgccctgactcttgaactcaatgtcgccatggtttgctatgcatttacgtgtgctctgcaataatctgtcattggtggcttgcaataggatgttcatagcacttctgcggcacttaggttttgagattcatcatgacataggctacaaccaccaccagacaatcactattgatcaggttgatctgtgtttccatccatgagctaccatttgcaaatataataaagattgagcaagcacattctagcatgaattgtattaagaaactgatctcgataaagagatctatctggacatcgcataaggaataa

SEQ ID NO: 74461 - DNA, 1171 bp, Zea Mays
actgtcttgagaatgccctataaggtcatcgcagaccggacccacgcgtcagtgagacggaagtaactgccgcatctcaagtctcaaccctcgcctccaatcgcaacgctcccgaggagagccaggaggaggtgacggcggcgccgcgaggaaggagggatcgatcgaggatggtggacgtctcgcgcgtgcagaaggagctcaccgagtgcaaccgcgaccgggaggtatcgggcgtctccatcgcgctccacgacggcgccaacatctcccacctcaccggcaccatcgccgggcccgccgacagcccctacgagggcggcacgttcgtcatcgatatccgcctgcccggtggatatccctttgagccgccgaagatgcagttcatcaccaaagcaccctaacatcagcagccaaaatggagcaatttgcttggacattctgaaagatcagtggagcccagcccttaccttgaagactgcgctcctttcccttcaagctctgctttcttctcctgcacctgatgatcctcaggatgctgttgttgcacaacagtacctgcgtgactatccaacatttgccgctacggctcgctactggacagaggccttcgcgaagagtgcatcaacgggcatggaagagaaggtgcagaagctggttgagatgggcttcccagaggatcaggtgagaagtgccctgaagagcgtggatggcgacgagaacatggctctcgaaaagctctgctctggctctgggtgaaccattctcttggggccaatacatgagcagctgtacatttcacagtgcctgctaatgctcctgctcagccatttcatataggggccgtgccatggcccatgggactggagtgagactctcctaggacaacatgagagttcgttcgtttctttaaactattttgctgttgtgtctggtaggctgaatcgactctttgcccatggaaccctggtaatatctgatgcaaaggaaacatgaggttgacataaacccccctgcagctgcaacctgtatgtcaatgccacgcttcgcttcctttgtttttttttcttttttagattacgtgataaattacttccctgcgttatcatggaagtaggattagttgccaatgactgatccgagactgagttcagcatccgaggagcatcat

SEQ ID NO: 74462 - DNA, 1170 bp, Zea Mays
actgtcttgagaatgccctataaggtcatcgcagaccggacccacgcgtcagtgagacggaagtaactgccgcatctcaagtctcaaccctcgcctccaatcgcaacgctcccgaggagagccaggaggaggtgacggcggcgccgcgaggaaggagggatcgatcgaggatggtggacgtctcgcgcgtgcagaaggagctcaccgagtgcaaccgcgaccgggaggtatcgggcgtctccatcgcgctccacgacggcgccaacatctcccacctcaccggcaccatcgccgggcccgccgacagcccctacgagggcggcacgttcgtcatcgatatccgcctgcccggtggatatccctttgagccgccgaagatgcagttcatcaccaaagtatggcaccctaacatcagcagccaaaatggagcaatttgcttggacattctgaaagatcagtggagcccagcccttaccttgaagactgcgctcctttcccttcaagctctgctttcttctcctgcacctgatgatcctcaggatgctgttgttgcacaacagtacctgcgtgactatccaacatttgccgctacggctcgctactggacagaggccttcgcgaagagtgcatcaacgggcatggaagagaagaagctggttgagatgggcttcccagaggatcaggtgagaagtgccctgaagagcgtggatggcgacgagaacatggctctcgaaaagctctgctctggctctgggtgaaccattctcttggggccaatacatgagcagctgtacatttcacagtgcctgctaatgctcctgctcagccatttcatataggggccgtgccatggcccatgggactggagtgagactctcctaggacaacatgagagttcgttcgtttctttaaactattttgctgttgtgtctggtaggctgaatcgactctttgcccatggaaccctggtaatatctgatgcaaaggaaacatgaggttgacataaacccccctgcagctgcaacctgtatgtcaatgccacgcttcgcttcctttgtttttttttcttttttagattacgtgataaattacttccctgcgttatcatggaagtaggattagttgccaatgactgatccgagactgagttcagcatccgaggagcatcat

SEQ ID NO: 74463 - DNA, 1368 bp, Zea Mays
gtggtggcgctgaagaaggtgcgggtggacggcgtcggcgaggccgagagcgcgcggttcatggcgcgggagatcgcgctgctccgccgcctcggcgaccaccccaacgtcgtccgcctcgacggcctcgtcacctcccgcctcaacacggcgccgtccctctacctcgtcttcgagtacatggagcacgacctgactggcctcaccgcctgcgcagctgcctccgcccgccgcttgtccttgcctcaggtgaagtgctacatgaaacagctactctccgggatcgaacactgtcacaacaacggcgttctgcaccgggacatcaagacgtcgaacttgcttgtcagcagcgacggaatcctcaagatagccgacttcgggctcgccacctcttacgaccctgaggacgcgcggcccatgacgagccaagtgatcacgctctggtaccgtccgcctgagctcttgctagggtccactcactacggcgtcggtgtggatctctggagcgtgggctgcgtactggcagagctgctcctcggcgagccagtgttccccggaagaacagagctgcacaaggttttcaagctgtgtgggactccgtcggaggattactgggagaagatgaagctcgctcatcctacgttcgggccgtacgaacggtgcctggctgagaaattcaaagatgtggcaccatctaccctgtcacttctcgagactctcctgtcgattgacccggacatgagaggcactgcgactgatgctctaaacagcgagttcttcaggacagaaccatatgcctgcgagccatctagccttccgcgctatccaccgtgcaaagaaagagacgtgaagctcaagtacgagaagcacaagaggaaatccagggttaatgggtcagtagaacgtcacagaaaccgacagcacgcatcacagaatcctgggcgcagggttttcactccggatgccaataacaagccgcaagcaaatccaaaggtaccaaggctggtgacaagcacgagcacgaccaagctcgagaggtttcctccgcctcacctggacgcgtcgatcggctacagtctagacgcatcggttgacgacggggccacggaagagttcttctcgtcgtcggccgctgagctgaagaaaatgccgagcctaatcttcggccacgtgaaatcttacctggcgagtagcccgaggaagggcgtgcacaaggcaaagccaagcctcaacatggcgatggcgcctcccacccttctcatcggtgcgttccggccttactcctttgggcggtcaatggaggtgaggaggaagaacagggagcagttcagaagcaaagggagaaacgcagtaggtgcagtcaagtga

SEQ ID NO: 74464 - DNA, 1400 bp, Zea Mays
gtggtggcgctgaagaaggtgcgggtggacggcgtcggcgaggccgagagcgcgcggttcatggcgcgggagatcgcgctgctccgccgcctcggcgaccaccccaacgtcgtccgcctcgacggcctcgtcacctcccgcctcaacacggcgccgtccctctacctcgtcttcgagtacatggagcacgacctgactggcctcaccgcctgcgcagctgcctccgcccgccgcttgtccttgcctcaggtgaagtgctacatgaaacagctactctccgggatcgaacactgtcacaacaacggcgttctgcaccgggacatcaagacgtcgaacttgcttgtcagcagcgacggaatcctcaagatagccgacttcgggctcgccacctcttacgaccctgaggacgcgcggcccatgacgagccaagtgatcacgctctggtaccgtccgcctgagctcttgctagggtccactcactacggcgtcggtgtggatctctggagcgtgggctgcgtactggcagagctgctcctcggcgagccagtgttccccggaagaacagaggtggaacagctgcacaaggttttcaagctgtgtgggactccgtcggaggattactgggagaagatgaagctcgctcatcctacgttcgggccgtacgaacggtgcctggctgagaaattcaaagatgtggcaccatctaccctgtcacttctcgagactctcctgtcgattgacccggacatgagaggcactgcgactgatgctctaaacagcgagttcttcaggacagaaccatatgcctgcgagccatctagccttccgcgctatccaccgtgcaaagaaagagacgtgaagctcaagtacgagaagcacaagaggaaatccagggttaatgggtcagtagaacgtcacagaaaccgacagcacgcatcacagaatcctgggcgcagggttttcactccggatgccaataacaagccgcaagcaaatccaaaggtaccaaggctggtgacaagcacgagcacgaccaagctcgagaggtttcctccgcctcacctggacgcgtcgatcggctacagtctagacgcatcggttgacgacggggccacggaagagttcttctcgtcgtcggccgctgagctgaagaaaatgccgagcctaatcttcggccacgtgaaatcttacctggcgagtagcccgaggaagggcgtgcacaaggcaaagccaagcctcaacatggcgatggcgcctcccacccttctcatcggtgcgttccggccttactcctttgggcggtcaatggaggtgaggaggaagaacagggagcagttcagaagcaaagggagaaacgcagattagcttatcggatgcggggttagcttacaagaactaac

SEQ ID NO: 74465 - DNA, 1188 bp, Zea Mays
gtgaaaagattgtcagccactctcttttcttgaaaggaaggatccaagtccaactatgaggtgaagtgctacatgaaacagctactctccgggatcgaacactgtcacaacaacggcgttctgcaccgggacatcaagacgtcgaacttgcttgtcagcagcgacggaatcctcaagatagccgacttcgggctcgccacctcttacgaccctgaggacgcgcggcccatgacgagccaagtgatcacgctctggtaccgtccgcctgagctcttgctagggtccactcactacggcgtcggtgtggatctctggagcgtgggctgcgtactggcagagctgctcctcggcgagccagtgttccccggaagaacagaggtggaacagctgcacaaggttttcaagctgtgtgggactccgtcggaggattactgggagaagatgaagctcgctcatcctacgttcgggccgtacgaacggtgcctggctgagaaattcaaagatgtggcaccatctaccctgtcacttctcgagactctcctgtcgattgacccggacatgagaggcactgcgactgatgctctaaacagcgagttcttcaggacagaaccatatgcctgcgagccatctagccttccgcgctatccaccgtgcaaagaaagagacgtgaagctcaagtacgagaagcacaagaggaaatccagggttaatgggtcagtagaacgtcacagaaaccgacagcacgcatcacagaatcctgggcgcagggttttcactccggatgccaataacaagccgcaagcaaatccaaaggtaccaaggctggtgacaagcacgagcacgaccaagctcgagaggtttcctccgcctcacctggacgcgtcgatcggctacagtctagacgcatcggttgacgacggggccacggaagagttcttctcgtcgtcggccgctgagctgaagaaaatgccgagcctaatcttcggccacgtgaaatcttacctggcgagtagcccgaggaagggcgtgcacaaggcaaagccaagcctcaacatggcgatggcgcctcccacccttctcatcggtgcgttccggccttactcctttgggcggtcaatggaggtgaggaggaagaacagggagcagttcagaagcaaagggagaaacgcagtaggtgcagtcaagtga

SEQ ID NO: 74466 - DNA, 1629 bp, Zea Mays
ccatttggtctcatatcttcttctcgtccgtctcgcttctctctctctctcctgaggcgcagcggtggggtggggtggggtagggggcggcattgcgagctcacaccacctgcggcgcggcgatcccgggccaccggctatcgggctatgtgatgatccgggccgtgatctcgacggctattcgcggctgaacgggcggcggcgatgaacggagcgagcgccggcgccggcggggaggcgccgctggtgtacaaggcctggaaggggaacaatgtgtttctactgaaggggaggttcatatttggccctgatgcaagatccctgtttatcaccatgttccttattgtcgcgccggtatcaattttctgcgcgttcgttgccaaggaattgatggataagttctcttatggtctgggattgccggttatgattgcagcagttctattcacagcatatgatctgagtcttctgcttctaacttctgggagagatccagggatcatacctcgcaatgcacatcctccagaacccgaagggtttgatggcaatgcagaggttggggctaaccagactccacccgtgcgtttgccccgagtgaaggatgttgttgtcaacggaatcactgtgaagacaaaatactgtgacacttgcatgttgtacaggcctcctcgttgctcccattgctctatctgcaacaactgcgtagaacgttttgaccatcactgcccctgggttggacaatgcataggacttaggaattacaggttcttctatatgtttgtattctcaacaactttgctctgcctgtatgtctttgggttctgctgggtgttcattattaagatcagaaatgccgagcagataacaatttggaaggcaatgacaaagacccctgcatctattgccttaatcatctacacattcattgcagtttggtttgttggtggcctctctgtgttccatctgtatctcatgagcacaaatcagacaacatatgagaacttcaggtatcgctatgatcagcgagacaacccatacaacaagggagtcatggaaaacatcaaagagatcttctttacaacgatccctccttccaagaacaacttctgtggtagggtcgaacaggagcatggtctgaggccccgtccaacgaatggtttcatgagtccaaacatggggagagctgttggcgacattgagatgggtagaaaaccagtggcttgggatgagcctaggatggcggctgaaattggtgatttaggagcaggtctgagcaacctgttggaggacaaggatggcaggtttcgtaccacatctccagatctcagccgcgacgcccttgcggttggaggaggcttagaagagcacggatcctcggcgatgaaccctgggcgctcaagctggggagttgaagcagtcggtttgtgacgtctccagcttggtagtgtcaggttttgtctgtatataatcggagcagtaagcctaaaataggtttcggttgcttgggtttggatggtaatggttgtgaacaatgtcgaaccttcgctttggagtaaatgaacatcgtttgatcggagtgcttatgttgagattcatttcttccttatctataagtgtcagtttatcacc

SEQ ID NO: 74467 - DNA, 1711 bp, Zea Mays
ccatttggtctcatatcttcttctcgtccgtctcgcttctctctctctctcctgaggcgcagcggtggggtggggtggggtagggggcggcattgcgagctcacaccacctgcggcgcggcgatcccgggccaccggctatcgggctatgtgatgatccgggccgtgatctcgacggctattcgcggctgaacgggcggcggcgatgaacggagcgagcgccggcgccggcggggaggcgccgctggtgtacaaggcctggaaggggaacaatgtgtttctactgaaggggaggttcatatttggccctgatgcaagatccctgtttatcaccatgttccttattgtcgcgccggtatcaattttctgcgcgttcgttgccaaggaattgatggataagttctcttatggtctgggattgccggttatgattgcagcagttctattcacagcatatgatctgagtcttctgcttctaacttctgggagagatccagggatcatacctcgcaatgcacatcctccagaacccgaagggtttgatggcaatgcagaggttggggctaaccagactccacccgtgcgtttgccccgagtgaaggatgttgttgtcaacggaatcactgtgaagacaaaatactgtgacacttgcatgttgtacaggcctcctcgttgctcccattgctctatctgcaacaactgcgtagaacgttttgaccatcactgcccctgggttggacaatgcataggacttaggaattacaggttcttctatatgtttgtattctcaacaactttgctctgccttttggtttgttggtggcctctctgtgttccatctgtatctcatgagcacaaatcagacaacatatgagaacttcaggtatcgctatgatcagcgagacaacccatacaacaagggagtcatggaaaacatcaaagagatcttctttacaacgatccctccttccaagaacaacttctgtggtagggtcgaacaggagcatggtctgaggccccgtccaacgaatggtttcatgagtccaaacatggggagagctgttggcgacattgagatgggtagaaaaccagtggcttgggatgagcctaggatggcggctgaaattggtgatttaggagcaggtctgagcaacctgttggaggacaaggatggcaggtttcgtaccacatctccagatctcagccgcgacgcccttgcggttggaggaggcttagaagagcacggatcctcggcgatgaaccctgggcgctcaagctggggagttgaagcaggtcgatgatggcaatggcattgaccatgtaaggcggatgtagtgagatgctcagggttgttagtgccagttcgtcgctaatttgttgttttgttggagatttgaggtcactaatgttattagactttgacctgtatggttgtttctgaactttcttttcttcttcctcttaatttggggcgtcttccatgtccattgtttgaagcagtcggtttgtgacgtctccagcttggtagtgtcaggttttgtctgtatataatcggagcagtaagcctaaaataggtttcggttgcttgggtttggatggtaatggttgtgaacaatgtcgaaccttcgctttggagtaaatgaacatcgtttgatcggagtgcttatgttgagattcatttcttccttatctataagtgtcagtttatcacc

SEQ ID NO: 74468 - DNA, 1518 bp, Zea Mays
ccatttggtctcatatcttcttctcgtccgtctcgcttctctctctctctcctgaggcgcagcggtggggtggggtggggtagggggcggcattgcgagctcacaccacctgcggcgcggcgatcccgggccaccggctatcgggctatgtgatgatccgggccgtgatctcgacggctattcgcggctgaacgggcggcggcgatgaacggagcgagcgccggcgccggcggggaggcgccgctggtgtacaaggcctggaaggggaacaatgtgtttctactgaaggggaggttcatatttggccctgatgcaagatccctgtttatcaccatgttccttattgtcgcgccggtatcaattttctgcgcgttcgttgccaaggaattgatggataagttctcttatggtctgggattgccggttatgattgcagcagttctattcacagcatatgatctgagtcttctgcttctaacttctgggagagatccagggatcatacctcgcaatgcacatcctccagaacccgaagggtttgatggcaatgcagaggttggggctaaccagactccacccgtgcgtttgccccgagtgaaggatgttgttgtcaacggaatcactgtgaagacaaaatactgtgacacttgcatgttgtacaggcctcctcgttgctcccattgctctatctgcaacaactgcgtagaacgttttgaccatcactgcccctgggttggacaatgcataggacttaggaattacaggttcttctatatgtttgtattctcaacaactttgctctgcctgtatgtctttgggttctgctgggtgttcattattaagatcagaaatgccgagcagataacaatttggaaggcaatgacaaagacccctgcatctattgccttaatcatctacacattcattgcagtttggtttgttggtggcctctctgtgttccatctgtatctcatgagcacaaatcagacaacatatgagaacttcaggtatcgctatgatcagcgagacaacccatacaacaagggagtcatggaaaacatcaaagagatcttctttacaacgatccctccttccaagaacaacttctgtggtagggtcgaacaggagcatggtctgaggccccgtccaacgaatggtttcatgagtccaaacatggggagagctgttggcgacattgagatgggtagaaaaccagtggcttgggatgagcctaggatggcggctgaaattggtgatttaggagcaggtctgagcaacctgttggaggacaaggatggcaggtttcgtaccacatctccagatctcagccgcgacgcccttgcggttggaggaggcttagaagagcacggatcctcggcgatgaaccctgggcgctcaagctggggagttgaagcaggtcgatgatggcaatggcattgaccatcttggagaacacaggcttccgcttctccaggaaggctctgatggcctccttcagatcgttcgacctcatcatac

SEQ ID NO: 74469 - DNA, 3488 bp, Zea Mays
ctggtgtctggtgtagacgaagacggccacggcgacccgttgccgttgcacgccgacgccgcattgacttttgagccaccaagtctcgagcgatgcgccacactgcccgctgccactgaccactgattagcttcgcctcgctatacctatacatatccggcgggcggcggctcgacaggagcacctagcagccagcagcggacgcgcggacaagggcagcggcatggcggagacggcgatcacgacggtgctggccaaagtggcggagctggtggcgtgggaggcggctgtgctgctggaggtgggcgacgacgtgcgcctcctccgggacaagctcgagtggctccacaccttcatccgcgacgccgaccgccgccgccgccgccgcgacgacgagttcgtcgccgtctgggtgcgccagacccgcgacgtcgccttcgaggccgaggacgcgctggacgacttcctacaccgcgctgggcggaggaaggccgcgctgggctcccggtgcgcgctcgggtgctggtggcccggcgggtgcgccggccaggtcgcgctccgccacgacctctcggggcgtatccgccagatcaggaagcggctcgataagatctccgagaaccgcgccgactacaacatcgagcacacgcccgcgccggcctgggccgcttgctcctcctccgccaccaccctcgctgcctgggacgatctagaggagtacacggtcggcctggacaagtacagcgacatgcttaaggagcagctcctcgacgactccgtccccgcgcgcgcgctcgtggccatcgccggcgagagcagcattggcaagacgacgctcgcgcggaaggtgtaccagagcctcgaggtccgcaaccacttcgagatccgcacgtggacggtgctcccgcacaagtgccgcgccgccgacgttctccgcgacatccacgagcagatgacctcccagctgcggcggaccccgtccgcgtccaactccaagcaggccgtggaagacgcctgcgatgacaaagccttcgggccgggaaaggacatcagcaaccagctgtacaggagcatgacggggaggcggtacctcgtggtcatcgacggcagcgttgccgtcacggactggaacagcctacgagcttccctccccgacgagggcaacggcagcagggtgcttctgatcacggacttggaaggcctggaggtggtcggccacgctcaggctggccacacgtacgacccgatcgagctgacccggctgagcccggagagcacgtacgaggtgttccgacgccgggtgttcggcgcccgcggcgactgccccggccggtacaagtcgaggtactaccaagacgtgttccggatcacgcgtggcctgccgctgtcgatcgtcgtcctcgccggtatcctgcggtccaaggagctgcccgcagagtgggacgaggtgatggcgcagctggccccgccggcgcgcgagcagcaaaggggcggcagcggcggcagcagcaacagctggccccggatcatgtcgcgggccttcgacgacctgccgcaccacctcaagtcgtgcttcctatacctggcggcgatgcgggagagcaccccggtggacgcgcagcgcctggtgcgcctgtgggtggccgaggggttcgtgcgcccgcgccgcgggagcaccatggaggaggtcgggcaggggtacctcaaggagctcatctcccggtgcatggtgcagctggtggacaaggacgacttcggcgccgtgctgacggtggtggtgcacgaccggctgcacgcattcgcgcaggacgaggcacaggaggccagcttcatcgagagccacgacagcacagacgtgctcgcgccggccaccgtgcggcgcctcgccgtcctcaactccaccacggacaggtacgtccagctcagcaacgcgctccccaagctgcgctccatcatctgcgacctggtggagggtcgccgagtcaggtccagcaacttcatccgcaccagcgacctgagcttcctccatgcttccaagttcctccgtgtcatcgacatccagggactcgagctcaagaggctcccaaacgagatcggctccatgatccatttgaggtacctgggtctccgctgcggccacctagagaagctcccaagcaccattggcaaccttgtcaacctgcagtcgctcatcctcggcggccgccacgttctggaggtgcccgccgcgttctggaggatcgccacgctgcggcacgtcgtcgcgcggttcgctctgccgagcagggccctgggcaacctgcacagcctccagacgctacatggcgtgcagccccgcgggtggggcggcgactacaacccgctggggaaggccgccaacctccggtcgctggagctgggcgagctgacctccgagcacgccgatgcgctcgaggccgcgttggagaacctcgacctcctggagcacctggcgctgcggggcgacccgctgccgtcgagcgtgttcagcgtcccgagcctccgccggctgcagagcctgaggctgatgggcgccatggatgagccggaggggcccagctgcgcggaggacgtccggtacatccggccgaacctgaccaggctatcgatgtggaataccgaggtggggcagaagttcgtggacatgctggccgagctgccgagcctggccgagctgacgatgatgtacgactcatacgacggcgatcggctggcgttcgtggagactgggttcccgagcctgcagaagctaaagctcggtctaccggagctggaggagtggacggtggccccggggtccatgccggggctcggcacgctgacgctgtgccggtgcgccaggatgcagatgctcccggaggcgctcgccgggatgagggagctggaggaggtggtgctgtacagcatgcccgacatcgtgagcaggatcaaggaggacgaaggccaggattaccacaaagtcaagcacgtacccgtcatccagactatatactgatcatccccatctggtgaatggtgattgacccgttgtcaacactggctgcttcaactcatgagcgactatgggtttaaatttggttcatgccaaactccgaaaaaacaatatgaactttgtgttgtggaccaattggtgaacccgagtagcagagtgagcgatgtgtttgggctttatattttcatgtgatggtgtacttattagaagtgaaacatatgtttggacttgtattcttgcaagacttttatgtttggacatatatatttttaaatttgaactcgttgttagtgtttgatttctacatgtaaactgttgttatgtctgttctgggcttattggtttgaacttgttggtttatgcctattctgaaggctttccatatggggaaggagtcaaaatagacattacattttttaaaaagaattaagtatgtgggttaaccgatgaacttaagccacatatgataagtatgttg

SEQ ID NO: 74470 - DNA, 3096 bp, Zea Mays
ccgcattgacttttgagccaccaagtctcgagcgatgcgccacactgcccgctgccactgaccactgattagcttcgcctcgctatacctatacatatccggcgggcggcggctcgacaggagcacctagcagccagcagcggacgcgcggacaagggcagcggcatggcggagacggcgatcacgacggtgctggccaaagtggcggagctggtggcgtgggaggcggctgtgctgctggaggtgggcgacgacgtgcgcctcctccgggacaagctcgagtggctccacaccttcatccgcgacgccgaccgccgccgccgccgccgcgacgacgagttcgtcgccgtctgggtgcgccagacccgcgacgtcgccttcgaggccgaggacgcgctggacgacttcctacaccgcgctgggcggaggaaggccgcgctgggctcccggtgcgcgctcgggtgctggtggcccggcgggtgcgccggccaggtcgcgctccgccacgacctctcggggcgtatccgccagatcaggaagcggctcgataagatctccgagaaccgcgccgactacaacatcgagcacacgcccgcgccggcctgggccgcttgctcctcctccgccaccaccctcgctgcctgaggagtacacggtcggcctggacaagtacagcgacatgcttaaggagcagctcctcgacgactccgtccccgcgcgcgcgctcgtggccatcgccggcgagagcagcattggcaagacgacgctcgcgcggaaggtgtaccagagcctcgaggtccgcaaccacttcgagatccgcacgtggacggtgctcccgcacaagtgccgcgccgccgacgttctccgcgacatccacgagcagatgacctcccagctgcggcggaccccgtccgcgtccaactccaagcaggccgtggaagacgcctgcgatgacaaagccttcgggccgggaaaggacatcagcaaccagctgtacaggagcatgacggggaggcggtacctcgtggtcatcgacggcagcgttgccgtcacggactggaacagcctacgagcttccctccccgacgagggcaacggcagcagggtgcttctgatcacggacttggaaggcctggaggtggtcggccacgctcaggctggccacacgtacgacccgatcgagctgacccggctgagcccggagagcacgtacgaggtgttccgacgccgggtgttcggcgcccgcggcgactgccccggccggtacaagtcgaggtactaccaagacgtgttccggatcacgcgtggcctgccgctgtcgatcgtcgtcctcgccggtatcctgcggtccaaggagctgcccgcagagtgggacgaggtgatggcgcagctggccccgccggcgcgcgagcagcaaaggggcggcagcggcggcagcagcaacagctggccccggatcatgtcgcgggccttcgacgacctgccgcaccacctcaagtcgtgcttcctatacctggcggcgatgcgggagagcaccccggtggacgcgcagcgcctggtgcgcctgtgggtggccgaggggttcgtgcgcccgcgccgcgggagcaccatggaggaggtcgggcaggggtacctcaaggagctcatctcccggtgcatggtgcagctggtggacaaggacgacttcggcgccgtgctgacggtggtggtgcacgaccggctgcacgcattcgcgcaggacgaggcacaggaggccagcttcatcgagagccacgacagcacagacgtgctcgcgccggccaccgtgcggcgcctcgccgtcctcaactccaccacggacaggtacgtccagctcagcaacgcgctccccaagctgcgctccatcatctgcgacctggtggagggtcgccgagtcaggtccagcaacttcatccgcaccagcgacctgagcttcctccatgcttccaagttcctccgtgtcatcgacatccagggactcgagctcaagaggctcccaaacgagatcggctccatgatccatttgaggtactgatcgattccgaaacactgtagctgcagaggtgagaatagaggctagattaatgtctggtcatgcattttcgtatgagcaggtacctgggtctccgctgcggccacctagagaagctcccaagcaccattggcaaccttgtcaacctgcagtcgctcatcctcggcggccgccacgttctggaggtgcccgccgcgttctggaggatcgccacgctgcggcacgtcgtcgcgcggttcgctctgccgagcagggccctgggcaacctgcacagcctccagacgctacatggcgtgcagccccgcgggtggggcggcgactacaacccgctggggaaggccgccaacctccggtcgctggagctgggcgagctgacctccgagcacgccgatgcgctcgaggccgcgttggagaacctcgacctcctggagcacctggcgctgcggggcgacccgctgccgtcgagcgtgttcagcgtcccgagcctccgccggctgcagagcctgaggctgatgggcgccatggatgagccggaggggcccagctgcgcggaggacgtccggtacatccggccgaacctgaccaggctatcgatgtggaataccgaggtggggcagaagttcgtggacatgctggccgagctgccgagcctggccgagctgacgatgatgtacgactcatacgacggcgatcggctggcgttcgtggagactgggttcccgagcctgcagaagctaaagctcggtctaccggagctggaggagtggacggtggccccggggtccatgccggggctcggcacgctgacgctgtgccggtgcgccaggatgcagatgctcccggaggcgctcgccgggatgagggagctggaggaggtggtgctgtacagcatgcccgacatcgtgagcaggatcaaggaggacgaaggccaggattaccacaaagtcaagcacgtacccgtcatccagactatatactgatcatccccatctggtgaatggtgattgacccgttgtcaacactggctgcttcaactcatgagcgac

SEQ ID NO: 74471 - DNA, 1455 bp, Zea Mays
cgcggtctgctagatacagtgacagaaacgatccgcaacgcaggcaggcccgccgcgcagcccaggatccatccatccacctcacaccgcgtcgtcgtccagctcacactccccggccgcgcccccgctgctcctcgccgcggggtcacgcgcgcaggcaggcgagcgaccagtaactgacgtctctccttcctcccccccctgctccggcccctctacaaatccccgattaaaccctagacttccctccccacccaaatgcgcgccccctcctaggcggcgcccctcgaattcggcaccggctccgccgaagccagggtgcgtataatgagtgcgggtttcgacaagcagatattggctcagaagctttcgaagcttaatagctcacagcagaccatagagactttatcacattggtgtgtctttcatcatcgttgctgccaacaagttgtagaaacatgggattctgagttccatgcagctcctgtagagaggagggtatctttgctgtaccttgcgaatgatattatgcagaatagcagaaaagaaggtaatggatatatagctgaattcatgagggtcatccctgctgccttgaatggagtgttgactgtaagagatgattttgggcggaatgtcccaaaaagactggccgactacagtatcaagcatgcttgttgttttgcttcaaaccaacacagaagcatggaagctgaaaactcattgacaacgaatgtatgaggcacttagggagtcaggcatcttctgcagtggggtgtctgcgccgacggggctataggctaccgtcggcacacatcaagatcgtgaagcattccatgggggagatcgtggacaacaacaacaagatgatctcaagtgaggtacccttggtgttctccaaggcatcgtcgagtttatgtcgtcatagcagacaacactggtttagacatgctgtctagactgtgcacgacaccgacctcttcaacttactcatccatgtcgtcatagcggacaacgcgtgacaagctaagtgaggtgagaaaaacttcgatgttgatagtgtgcaaattgtcgtgaagtttgcaaagtaccagcggttccatgcgtatttgtcaccaatctctcaaggattctagcggcttgtgtggacagccgtggatgagcctgtcgacaatgcaattgttcggtgagatccaattgaggcatgttttcctatgtaatcctctatttttttgaacctcattgaggattgatcatcaaacgattgtccaaaaaaatcattcatgtgccatgcaacatgttacaaatagtagtttggatttccattttgaccttgtagatgtagcgacgtgtaataggtaagctctcatggactgctataattggatgccaagtggcacaacttgtctattcttcaaatgatttattgttttgcaaatcctttgaaggaatcat

SEQ ID NO: 74472 - DNA, 2533 bp, Zea Mays
cgcggtctgctagatacagtgacagaaacgatccgcaacgcaggcaggcccgccgcgcagcccaggatccatccatccacctcacaccgcgtcgtcgtccagctcacactccccggccgcgcccccgctgctcctcgccgcggggtcacgcgcgcaggcaggcgagcgaccagtaactgacgtctctccttcctcccccccctgctccggcccctctacaaatccccgattaaaccctagacttccctccccacccaaatgcgcgccccctcctaggcggcgcccctcgaattcggcaccggctccgccgaagccagggtgcgtataatgagtgcgggtttcgacaagcagatattggctcagaagctttcgaagcttaatagctcacagcagaccatagagactttatcacattggtgtgtctttcatcatcgttgctgccaacaagttgtagaaacatgggattctgagttccatgcagctcctgtagagaggagggtatctttgctgtaccttgcgaatgatattatgcagaatagcagaaaagaaggtaatggatatatagctgaattcatgagggtcatccctgctgccttgaatggagtgttgactgtaagagatgattttgggcggaatgtcccaaaaagactgattgacatatgggaagaccgtaaaatatttgatacccaggcacaaagcctgaaagatgattttttcaggaggttaaaggacattagaaaccagttgaaaaatacaggcagtgagcagctggagaaggttgtctctagctacaaacatgtcctgaatgctcctatggatgaggatactctgatgcgaaaatgccaagcagctcttatcaattttgatgaactcaataaaacatatggaaataactccattttaggtagtagcaatcgttcgggctttatgcaggagctgcaggaacaacatagcattctcagaaactccatcgaacaacttaaagtgtcagaatcactcagggccaccctgatttttcatttgaaggaagcgttgaatgagcaggagctcaaagtggaacacctcagaagccagcttcaggcagctcagccccgattcaagagagcttctgagctctgcgtggggcttggaagcaacatggaaaggcgtcagccatcaaatcaagggcttaagaggtccagtctctccgatccacttagcactgttgctccagaagctgtgaaatctcttcaaaagggacaatcaagtgcagtgctgtattcacaggagggaaatggtgttgagcacagcgtgacagagacaaagcttgctgcaggtgctgcttcagatgatatacgtggtggtgctttgtcttcacgagtcaatgggggcaacactatgctgaaaatagaagagcacacttctggtaacaagaggcagaagctagaggatgacgcacatatttctcagcctcggtcagagtcaccgccgccgccgccacccccattccctcatcctgatacatttcaaccgcctccgccaccacctgagtatcctcgatcgccagatcctagcccaccaccgccacggacttcactgccaccccatataatccccccaccgccgccgccaccacccgcaatgccactccatatgttctcacatctaccacctccagctggtacatttgtaccttttcctgctggaccacctggcccaatgtattgcacttatccatcttttactcctgttgtcaactttcccatgaccagcccacctggtttccgtaatctaaccccgcctccatcttttcgaggattagctggtacattctatggccctcggttccccaccgcgcccccaccagcagacaggaaataagagtagtaacttacctgcagacttacagtgccagcagctttggcaagtatcataccagtttttttctgtttcaacagaggatacaaactcgtggggatgcgtcaccatgtgttgtagagctcaggaaactgttctattgttgtacattcagccagtcagcgtgcaacagtcaattttctgaactagttctggtcttggtcccagagtagaaagtgtagagcctgtacatgtcggctgctagagggaatttggaattccgagagcccggacccggagcaaatggctgcgtcagtttaatgatcgactgatccagtagttcctggtctaggcggtggagtaaaaactgtagattccgacagcttagggagaagatatggaacccaatagccgaagacagatgttgtagcatgacatgttgtaactcatcacagttgtgctcttcgctagatcatccgagaacacgtagatgttcttgtgatgtcttgagcgtgtaatcctgctgtttggtgtaagatatggcttcagctgctgtcgatggtcgaatctcttgctctgtttttaattacccttttttgctctcggctattctagcgccaataccttttgcgtctactttcgcatgtgttcccaaggaatttagtggtctgtcttggtttccatgtgtacaggaaag

SEQ ID NO: 74473 - DNA, 2500 bp, Zea Mays
cgcggtctgctagatacagtgacagaaacgatccgcaacgcaggcaggcccgccgcgcagcccaggatccatccatccacctcacaccgcgtcgtcgtccagctcacactccccggccgcgcccccgctgctcctcgccgcggggtcacgcgcgcaggcaggcgagcgaccagtaactgacgtctctccttcctcccccccctgctccggcccctctacaaatccccgattaaaccctagacttccctccccacccaaatgcgcgccccctcctaggcggcgcccctcgaattcggcaccggctccgccgaagggtgcgtataatgagtgcgggtttcgacaagcagatattggctcagaagctttcgaagcttaatagctcacagcagaccatagagactttatcacattggtgtgtctttcatcatcgttgctgccaacaagttgtagaaacatgggattctgagttccatgcagctcctgtagagaggagggtatctttgctgtaccttgcgaatgatattatgcagaatagcagaaaagaaggtaatggatatatagctgaattcatgagggtcatccctgctgccttgaatggagtgttgactgtaagagatgattttgggcggaatgtcccaaaaagactgattgacatatgggaagaccgtaaaatatttgatacccaggcacaaagcctgaaagatgattttttcaggaggttaaaggacattagaaaccagttgaaaaatacaggcagtgagcagctggagaaggttgtctctagctacaaacatgtcctgaatgctcctatggatgaggatactctgatgcgaaaatgccaagcagctcttatcaattttgatgaactcaataaaacatatggaaataactccattttaggagctgcaggaacaacatagcattctcagaaactccatcgaacaacttaaagtgtcagaatcactcagggccaccctgatttttcatttgaaggaagcgttgaatgagcaggagctcaaagtggaacacctcagaagccagcttcaggcagctcagccccgattcaagagagcttctgagctctgcgtggggcttggaagcaacatggaaaggcgtcagccatcaaatcaagggcttaagaggtccagtctctccgatccacttagcactgttgctccagaagctgtgaaatctcttcaaaagggacaatcaagtgcagtgctgtattcacaggagggaaatggtgttgagcacagcgtgacagagacaaagcttgctgcaggtgctgcttcagatgatatacgtggtggtgctttgtcttcacgagtcaatgggggcaacactatgctgaaaatagaagagcacacttctggtaacaagaggcagaagctagaggatgacgcacatatttctcagcctcggtcagagtcaccgccgccgccgccacccccattccctcatcctgatacatttcaaccgcctccgccaccacctgagtatcctcgatcgccagatcctagcccaccaccgccacggacttcactgccaccccatataatccccccaccgccgccgccaccacccgcaatgccactccatatgttctcacatctaccacctccagctggtacatttgtaccttttcctgctggaccacctggcccaatgtattgcacttatccatcttttactcctgttgtcaactttcccatgaccagcccacctggtttccgtaatctaaccccgcctccatcttttcgaggattagctggtacattctatggccctcggttccccaccgcgcccccaccagcagacaggaaataagagtagtaacttacctgcagacttacagtgccagcagctttggcaagtatcataccagtttttttctgtttcaacagaggatacaaactcgtggggatgcgtcaccatgtgttgtagagctcaggaaactgttctattgttgtacattcagccagtcagcgtgcaacagtcaattttctgaactagttctggtcttggtcccagagtagaaagtgtagagcctgtacatgtcggctgctagagggaatttggaattccgagagcccggacccggagcaaatggctgcgtcagtttaatgatcgactgatccagtagttcctggtctaggcggtggagtaaaaactgtagattccgacagcttagggagaagatatggaacccaatagccgaagacagatgttgtagcatgacatgttgtaactcatcacagttgtgctcttcgctagatcatccgagaacacgtagatgttcttgtgatgtcttgagcgtgtaatcctgctgtttggtgtaagatatggcttcagctgctgtcgatggtcgaatctcttgctctgtttttaattacccttttttgctctcggctattctagcgccaataccttttgcgtctactttcgcatgtgttcccaaggaatttagtggtctgtcttggtttccatgtgtacaggaaag

SEQ ID NO: 74474 - DNA, 2452 bp, Zea Mays
cgcggtctgctagatacagtgacagaaacgatccgcaacgcaggcaggcccgccgcgcagcccaggatccatccatccacctcacaccgcgtcgtcgtccagctcacactccccggccgcgcccccgctgctcctcgccgcggggtcacgcgcgcaggcaggcgagcgaccagtaactgacgtctctccttcctcccccccctgctccggcccctctacaaatccccgattaaaccctagacttccctccccacccaaatgcgcgccccctcctaggcggcgcccctcgaattcggcaccggctccgccgaagggtgcgtataatgagtgcgggtttcgacaagcagatattggctcagaagctttcgaagcttaatagctcacagcagaccatagagactttatcacattggtgtgtctttcatcatcgttgctgccaacaagttgtagaaacatgggattctgagttccatgcagctcctgtagagaggagggtatctttgctgtaccttgcgaatgatattatgcagaatagcagaaaagaaggtaatggatatatagctgaattcatgagggtcatccctgctgccttgaatggagtgttgactgtaagagatgattttgggcggaatgtcccaaaaagactgattgacatatgggaagaccgtaaaatatttgatacccaggcacaaagcctgaaagatgattttttcaggaggttaaaggacattagaaaccagttgaaaaatacaggcagtgagcagctggagaaggttgtctctagctacaaacatgtcctgaatgctcctatggatgaggatactctgatgcgaaaatgccaagcagctcttatcaattttgatgaactcaataaaacatatggaaataactccattttaggtagtagcaatcgttcgggctttatgcaggagctgcaggaacaacatagcattctcagaaactccatcgaacaacttaaagtgtcagaatcactcagggccaccctgatttttcatttgaaggaagcgttgaatgagcaggagctcaaagtggaacacctcagaagccagcttcaggcagctcagccccgattcaagagagcttctgagctctgcgtggggcttggaagcaacatggaaaggcgtcagccatcaaatcaagggcttaagagtgctgtattcacaggagggaaatggtgttgagcacagcgtgacagagacaaagcttgctgcaggtgctgcttcagatgatatacgtggtggtgctttgtcttcacgagtcaatgggggcaacactatgctgaaaatagaagagcacacttctggtaacaagaggcagaagctagaggatgacgcacatatttctcagcctcggtcagagtcaccgccgccgccgccacccccattccctcatcctgatacatttcaaccgcctccgccaccacctgagtatcctcgatcgccagatcctagcccaccaccgccacggacttcactgccaccccatataatccccccaccgccgccgccaccacccgcaatgccactccatatgttctcacatctaccacctccagctggtacatttgtaccttttcctgctggaccacctggcccaatgtattgcacttatccatcttttactcctgttgtcaactttcccatgaccagcccacctggtttccgtaatctaaccccgcctccatcttttcgaggattagctggtacattctatggccctcggttccccaccgcgcccccaccagcagacaggaaataagagtagtaacttacctgcagacttacagtgccagcagctttggcaagtatcataccagtttttttctgtttcaacagaggatacaaactcgtggggatgcgtcaccatgtgttgtagagctcaggaaactgttctattgttgtacattcagccagtcagcgtgcaacagtcaattttctgaactagttctggtcttggtcccagagtagaaagtgtagagcctgtacatgtcggctgctagagggaatttggaattccgagagcccggacccggagcaaatggctgcgtcagtttaatgatcgactgatccagtagttcctggtctaggcggtggagtaaaaactgtagattccgacagcttagggagaagatatggaacccaatagccgaagacagatgttgtagcatgacatgttgtaactcatcacagttgtgctcttcgctagatcatccgagaacacgtagatgttcttgtgatgtcttgagcgtgtaatcctgctgtttggtgtaagatatggcttcagctgctgtcgatggtcgaatctcttgctctgtttttaattacccttttttgctctcggctattctagcgccaataccttttgcgtctactttcgcatgtgttcccaaggaatttagtggtctgtcttggtttccatgtgtacaggaaag

SEQ ID NO: 74475 - DNA, 2622 bp, Zea Mays
cgcggtctgctagatacagtgacagaaacgatccgcaacgcaggcaggcccgccgcgcagcccaggatccatccatccacctcacaccgcgtcgtcgtccagctcacactccccggccgcgcccccgctgctcctcgccgcggggtcacgcgcgcaggcaggcgagcgaccagtaactgacgtctctccttcctcccccccctgctccggcccctctacaaatccccgattaaaccctagacttccctccccacccaaatgcgcgccccctcctaggcggcgcccctcgaattcggcaccggctccgccgaagggtgcgtataatgagtgcgggtttcgacaagcagatattggctcagaagctttcgaagcttaatagctcacagcagaccatagagactttatcacattggtgtgtctttcatcatcgttgctgccaacaagttgtagaaacatgggattctgagttccatgcagctcctgtagagaggagggtatctttgctgtaccttgcgaatgatattatgcagaatagcagaaaagaaggtaatggatatatagctgaattcatgagggtcatccctgctgccttgaatggagtgttgactgtaagagatgattttgggcggaatgtcccaaaaagactgattgacatatgggaagaccgtaaaatatttgatacccaggcacaaagcctgaaagatgattttttcaggaggttaaaggacattagaaaccagttgaaaaatacaggcagtgagcagctggagaaggttgtctctagctacaaacatgtcctgaatgctcctatggatgaggatactctgatgcgaaaatgccaagcagctcttatcaattttgatgaactcaataaaacatatggaaataactccattttaggtggatgtagctattgtgcaaatggtttgcatcatacctttgttgcaactgagatatccttgagcctagatggtttgtataaagagatgcactgtagtagcaatcgttcgggctttatgcaggagctgcaggaacaacatagcattctcagaaactccatcgaacaacttaaagtgtcagaatcactcagggccaccctgatttttcatttgaaggaagcgttgaatgagcaggagctcaaagtggaacacctcagaagccagcttcaggcagctcagccccgattcaagagagcttctgagctctgcgtggggcttggaagcaacatggaaaggcgtcagccatcaaatcaagggcttaagaggtccagtctctccgatccacttagcactgttgctccagaagctgtgaaatctcttcaaaagggacaatcaagtgcagtgctgtattcacaggagggaaatggtgttgagcacagcgtgacagagacaaagcttgctgcaggtgctgcttcagatgatatacgtggtggtgctttgtcttcacgagtcaatgggggcaacactatgctgaaaatagaagagcacacttctggtaacaagaggcagaagctagaggatgacgcacatatttctcagcctcggtcagagtcaccgccgccgccgccacccccattccctcatcctgatacatttcaaccgcctccgccaccacctgagtatcctcgatcgccagatcctagcccaccaccgccacggacttcactgccaccccatataatccccccaccgccgccgccaccacccgcaatgccactccatatgttctcacatctaccacctccagctggtacatttgtaccttttcctgctggaccacctggcccaatgtattgcacttatccatcttttactcctgttgtcaactttcccatgaccagcccacctggtttccgtaatctaaccccgcctccatcttttcgaggattagctggtacattctatggccctcggttccccaccgcgcccccaccagcagacaggaaataagagtagtaacttacctgcagacttacagtgccagcagctttggcaagtatcataccagtttttttctgtttcaacagaggatacaaactcgtggggatgcgtcaccatgtgttgtagagctcaggaaactgttctattgttgtacattcagccagtcagcgtgcaacagtcaattttctgaactagttctggtcttggtcccagagtagaaagtgtagagcctgtacatgtcggctgctagagggaatttggaattccgagagcccggacccggagcaaatggctgcgtcagtttaatgatcgactgatccagtagttcctggtctaggcggtggagtaaaaactgtagattccgacagcttagggagaagatatggaacccaatagccgaagacagatgttgtagcatgacatgttgtaactcatcacagttgtgctcttcgctagatcatccgagaacacgtagatgttcttgtgatgtcttgagcgtgtaatcctgctgtttggtgtaagatatggcttcagctgctgtcgatggtcgaatctcttgctctgtttttaattacccttttttgctctcggctattctagcgccaataccttttgcgtctactttcgcatgtgttcccaaggaatttagtggtctgtcttggtttccatgtgtacaggaaag

SEQ ID NO: 74476 - DNA, 2670 bp, Zea Mays
gctggtggaggcggcgcggtactgttcacgcgtcaatgaacagtagttgcgtcgcggttactgttcacagggtgggtctgcgcgggttagagagaaagaggagggtttctcccttctaattcttgcttcctttatttctcatccattgattacataaataggtcgactagttgcccctatctagctacagatccttatcttcttaaaattctcctaaaaacactcaacaaattactaactgataaccttcctagataatctcaactaatctcctagataatcttatccttttgactcgcgctccttgctgttgcttcttgccgccgcccccttgggccctgacaggtcctgacaacgaccaagctcgattgaatgctagtgcagctgaccatgatgaacgtccgtcttgacagccatgatcatcaaaacgcacacatcgaaaagttaaagatcggcaacgatggcaaggtggaaaatggtgtgccaataagactccaccagtgttccgacgaccccccctcagggtggcagtgacggtcatggcggcggccggtcactgctactaccatgacgactatggcgacgatgaccacaacccatggtcaccattcatgcaatccgaagctcaaatttccccgctacgacagcaagtccaatcccttgcattgattgacatatgggaagaccgtaaaatatttgatacccaggcacaaagcctgaaagatgattttttcaggaggttaaaggacattagaaaccagttgaaaaatacaggcagtgagcagctggagaaggttgtctctagctacaaacatgtcctgaatgctcctatggatgaggatactctgatgcgaaaatgccaagcagctcttatcaattttgatgaactcaataaaacatatggaaataactccattttaggtagtagcaatcgttcgggctttatgcaggagctgcaggaacaacatagcattctcagaaactccatcgaacaacttaaagtgtcagaatcactcagggccaccctgatttttcatttgaaggaagcgttgaatgagcaggagctcaaagtggaacacctcagaagccagcttcaggcagctcagccccgattcaagagagcttctgagctctgcgtggggcttggaagcaacatggaaaggcgtcagccatcaaatcaagggcttaagaggtccagtctctccgatccacttagcactgttgctccagaagctgtgaaatctcttcaaaagggacaatcaagtgcagtgctgtattcacaggagggaaatggtgttgagcacagcgtgacagagacaaagcttgctgcaggtgctgcttcagatgatatacgtggtggtgctttgtcttcacgagtcaatgggggcaacactatgctgaaaatagaagagcacacttctggtaacaagaggcagaagctagaggatgacgcacatatttctcagcctcggtcagagtcaccgccgccgccgccacccccattccctcatcctgatacatttcaaccgcctccgccaccacctgagtatcctcgatcgccagatcctagcccaccaccgccacggacttcactgccaccccatataatccccccaccgccgccgccaccacccgcaatgccactccatatgttctcacatctaccacctccagctggtacatttgtaccttttcctgctggaccacctggcccaatgtattgcacttatccatcttttactcctgttgtcaactttcccatgaccagcccacctggtttccgtaatctaaccccgcctccatcttttcgaggattagctggtacattctatggccctcggttccccaccgcgcccccaccagcagacaggaaataagagtagtaacttacctgcagacttacagtgccagcagctttggcaagtatcataccagtttttttctgtttcaacagaggatacaaactcgtggggatgcgtcaccatgtgttgtagagctcaggaaactgttctattgttgtacattcagccagtcagcgtgcaacagtcaattttctgaactagttctggtcttggtcccagagtagaaagtgtagagcctgtacatgtcggctgctagagggaatttggaattccgagagcccggacccggagcaaatggctgcgtcagtttaatgatcgactgatccagtagttcctggtctaggcggtggagtaaaaactgtagattccgacagcttagggagaagatatggaacccaatagccgaagacagatgttgtagcatgacatgttgtaactcatcacagttgtgctcttcgctagatcatccgagaacacgtagatgttcttgtgatgtcttgagcgtgtaatcctgctgtttggtgtaagatatggcttcagctgctgtcgatggtcgaatctcttgctctgtttttaattacccttttttgctctcggctattctagcgccaataccttttgcgtctactttcgcatgtgttcccaaggaatttagtggtctgtcttggtttccatgtgtacaggaaagatatatcctgtcatggtgcttcggcatcgtttctctcctgctggctgctgcattcagtagaggccgtatgcttccagcggcagcaaccacatcggaaagaggctgatacttggaatagat

SEQ ID NO: 74477 - DNA, 2007 bp, Zea Mays
atggcggcggccggtcactgctactaccatgacgactatggcgacgatgaccacaacccatggtcaccattcatgcaatccgaagctcaaatttccccgctacgacagcaagtccaatcccttgcattgattgacatatgggaagaccgtaaaatatttgatacccaggcacaaagcctgaaagatgattttttcaggaggttaaaggacattagaaaccagttgaaaaatacaggcagtgagcagctggagaaggttgtctctagctacaaacatgtcctgaatgctcctatggatgaggatactctgatgcgaaaatgccaagcagctcttatcaattttgatgaactcaataaaacatatggaaataactccattttaggtagtagcaatcgttcgggctttatgcaggagctgcaggaacaacatagcattctcagaaactccatcgaacaacttaaagtgtcagaatcactcagggccaccctgatttttcatttgaaggaagcgttgaatgagcaggagctcaaagtggaacacctcagaagccagcttcagctcagccccgattcaagagagcttctgagctctgcgtggggcttggaagcaacatggaaaggcgtcagccatcaaatcaagggcttaagaggtccagtctctccgatccacttagcactgttgctccagaagctgtgaaatctcttcaaaagggacaatcaagtgcagtgctgtattcacaggagggaaatggtgttgagcacagcgtgacagagacaaagcttgctgcaggtgctgcttcagatgatatacgtggtggtgctttgtcttcacgagtcaatgggggcaacactatgctgaaaatagaagagcacacttctggtaacaagaggcagaagctagaggatgacgcacatatttctcagcctcggtcagagtcaccgccgccgccgccacccccattccctcatcctgatacatttcaaccgcctccgccaccacctgagtatcctcgatcgccagatcctagcccaccaccgccacggacttcactgccaccccatataatccccccaccgccgccgccaccacccgcaatgccactccatatgttctcacatctaccacctccagctggtacatttgtaccttttcctgctggaccacctggcccaatgtattgcacttatccatcttttactcctgttgtcaactttcccatgaccagcccacctggtttccgtaatctaaccccgcctccatcttttcgaggattagctggtacattctatggccctcggttccccaccgcgcccccaccagcagacaggaaataagagtagtaacttacctgcagacttacagtgccagcagctttggcaagtatcataccagtttttttctgtttcaacagaggatacaaactcgtggggatgcgtcaccatgtgttgtagagctcaggaaactgttctattgttgtacattcagccagtcagcgtgcaacagtcaattttctgaactagttctggtcttggtcccagagtagaaagtgtagagcctgtacatgtcggctgctagagggaatttggaattccgagagcccggacccggagcaaatggctgcgtcagtttaatgatcgactgatccagtagttcctggtctaggcggtggagtaaaaactgtagattccgacagcttagggagaagatatggaacccaatagccgaagacagatgttgtagcatgacatgttgtaactcatcacagttgtgctcttcgctagatcatccgagaacacgtagatgttcttgtgatgtcttgagcgtgtaatcctgctgtttggtgtaagatatggcttcagctgctgtcgatggtcgaatctcttgctctgtttttaattacccttttttgctctcggctattctagcgccaataccttttgcgtctactttcgcatgtgttcccaaggaatttagtggtctgtcttggtttccatgtgtacaggaaag

SEQ ID NO: 74478 - DNA, 5357 bp, Zea Mays
ccacgcccccatcgaaacacagccaaaaagccaccccgtgcaaaacacatagagctcccagtcccaacccggtcaccctccctctcctgctcctcgcatcgccggtgtcctcgacggctcgcgccgtcgcgctctcgcaaaaccctagctctgcttccctccgtcgtctcgcccgttcgattgaatcgcgccgcagaagctgttgcctctcatctctctccccgccctcctccggaaaccctagcccactccgcgaggccgcgatggcggagaggaagctggatcgaccctcggcgctcggcaaaggtgggctgtcgcttgggatcgaggaggacagggttgccgccgccatggggttcgtcgaccactcgaaagatcagcaccacctggataacagcattcccctctctcctcagtggctctacgccaaacctgctgatggaaagatctcgctgcctcatgggtcctcccttgaacttgctgaaaaggaagtgaggatgttggaaggaactgttgacaggaaagaacgaaggagaaatgcatttgatgctgacagtggtcttcgttggcttgaagaggagagggagacaagcctgcttgggagaagggagcgcaagaaggatgtggaccgggatgtggataatcgcaagattgatcgccgatctgacaatgtttctgcaagggatatcactgatccgcgtgcagctcctgcatctgaaaggtggcatgatggttccacccgtggcctggggaacgagggtcgccgggatggaaaatggtcatcaagatggggacccgatgacaaggagaaggactctaggtcagacaagaaggttgatgcagagaaggatgaaacccatgctgataaactgacattcacaggaaggctgctgtctgagtctgattcccgtgataaatggaggcctcgtcaccggcaggaaagtcattctgtcggaacagctacgcaccgtgctgctccaggctttggatccgagaaaggacgtgttaaggactcaacaaatgttggttttgccgctggaagaggaaggggaaacccgaactcagttgcatccttcaaccggccatcatctgcaggatcaatcggtgctccagctgtgcatgggaaatttgcaaaaactgctgttagtttctgctacccaagagggaagcttcttgatatatacaggcagaaaaatatgatgtcgtcgtttgatgatgtccacatgaaactggacgaaattccttctgtgacactctctactgctgcaaaacctctagcatttgttgcaccagatactgttgaagaggctctcctggaagatattagaaagggtaaagtcattagcagtgaaggaatcaatgggattggaaacaaaaaggagagggcaaaagagctcgaagaacctgcttctggcattgatgatgacatgggcaaagccagttttgcaattgctgggttgggtcaagaagggtcgtcaggtttaatctcagtgaatgatgcctcctatgttgaagggacacttcctagtggtgtcagtacatctctgctgaagataagtctggaggaaaatgccatcagcaatcaacatgggattactgacacccaggaaggtttgaaaactgctgaaatcaaggaaaatgctgatcatgctcttggcactaagttacctgatgattcgaacaccctgtttgaggtaccatcctttgagcatcttcaagaacccactaggccataccaaagcaacaacatggatataaaagtgggtggccatgctaattatccagaagagttgacattatattatctggatccccaaggaggtgtgcagggtccatttctgggtgctgacataatctcttggtatgaagatggatacttcggtttggagttaccagtacgtctgtctcagtttccagatgatgttcctttccgtccacttgtcgaagtcatgccccaccttgcgcaaaagacgcaatcgcgtatacctctgccttgtgatggaaattctgagtctctggaatcatctcaaagtaaatttgaatccagtgtcccttctacttcctctgggaggactgaccaattttctatttgggattctgaaagcaatgctgttgatcctaaaagaggtgatcatgaagcatcaataccttctcgtagtggttggctgtcttcaccggaaacaggaaaggatatatcaaatactagtaatcgccagcaacacattcctgaatcagtgaatcaggatgctgaagaagtgttgtacactggtaggcctaacagcagcatgggtcaatccctacgagaccttgagaatgaccgtgcagatttccaatcgacaccacatgaccctcattctgtggctggagaagctaatttgctgcaacataatgtcccaagggacagtgatctgagtcctcttggcttactttggtctgagctggaaggacgtccaaaacaacctctctcatctaatgtacttagtgtaaatgaacgtagaaatcccaagcctacaacacccaaggacattccacctgtaaacatgagacaagggccacttagcagaatgaatgaagtttctagtgtgcgcgatgagtggcctgcaaactttggtcggctggacaacatgaatgatgcaaacatttctggcagaatccatcaggttgaagcggagcatcatttgaattttgatgggcacctgctgcttcaacagatccgacgggagcaacagcaacagcggcaggagcaattgatggcccataataatttagagttttctggtgcatttcccgggcaggtgtttgatcctttgaaccaacaccgacagcctatgaatcaacagattcctgatgtggagcatcttttgagaatccagtttgaacttgagcaacagcagcaacgccaactccaacaagagcagcaccaacggcagctacagcagcaacggcaagcccagcttttgcaacggcagcagcagcagcagcagcaacagcaacaacaaatgatccttgagcaattgttgcagcaacagctgcagggttcaaattttggcccaacaagtatggttgatcaagtcttacttcgtgaacatgtattaaatgaactgcaccagcagcctcaccatttgcaaaggcagcatgatgcagctattgaacagctcattcaagcaaaatttggtcatgggcttcatagggagcaccataatgatatgttggatgttctctcgcgttcaaatcagagacagatgcttcctttagagcagcaacttcttttaggccttcaacacgagcagcaacttaagtctcaacaattggcaaatgctctgcggcaacattcaggccaggaagaagaaaggcacttaagtggggtctggccaatggatgctgctgcccagtttatccgctcaggaaccagtccaaatcagatacacagtcgtttcgatctccttgagaaccttcagagatcgtcatcgtttgatcatcatgaacatctagaccgcagcttatccttacacgaacagttgcatatgggaggtcaaggtattcgctccctagagcggactggttctttgcctggtggtggtcctggaccaaacccagatgtcataaatgccctaacacgtcatcatggacttagtcagttggaaacacatggtgatgtataccctttagttcaaatgcctatgcttccttcaggtgttcatccccagcaacttaggcatcaggatcagcttcctggttctcacataggaaggcttgaaaggcactggtcggatgccaatggacagttacaaaacagtctaatggaatcttcacacatcaaccagttgcagattgaagcggagaaggagaggaggaatgtggaaatgaacctttctgttgacaatccacatgcatggggagcccttatgaataaagataggaatacagagcaagatttgactgatatgattcataaaaaacttgtccttcaatcacagcagtcccggggttttcctgatgtttctgttccggcatcatttcgacgtaaagatcactttgtgcaacctgttgtggagagccctctgagatcagtggacatgtcgtttgaggagtctctttctgaaaggtcactttatgcaaaatcagggcagttggcacaagaaggatcatctaatcttggtactttacccaacagtattgagaacactggaaaatttaaccttagatcaggatctggatcaatgcttgagcagaagcattttcttggaattgacgatgttcaaagtgactttctagagaccacaggtggtagaacatcagctaatcaactggttgggagtgtcaatgaattaacaaggggtaaaaggcagggttctagtgcgagtttggctggggatgatcctaatttggctgatgaaggtgttagtaaatgatgtccatgtgcaggtctgattctggcatgtccaaaggaagctctcactccttactaaagcgctctacaaaccaacatactactacatctcagtctgttcccacagatctgtcagcaatcaggctgaagaaagcaggacttgcgtcctctgatgagaataagatggaagcaggatttgcctcagtagcccagggtatggaaggctgcgttcctagcaacaaagagacgggggcgtatggcatgccatcagccaccaacaatccagatgcctctggtcagtccttcagcgaagcgttgaagagctcgaggaagcctccgttgcagtacgatgcctccgaatctgcagactgtggcccaggtggtaagggcgcgaaaaagaaaacgaagaaaggaaagcagattgacccttctcttcttgggttcaaggtccacagtaaccggatcatgatgggcgagattgttcgagatgattagagtgtacatacgcggtaggaggtggccttagaagaatcaagattggctccaagccaaaccctaacctctgtacatgcccagccctggtgcccgctcacctcggcagaaattttgtgactgcatcttctcttagcctcttgctagctgtagtattgcccgatttctcagatttagaaaaaggagcctttcttatcggtgccccacagaagtgtcatagttttgttgatctgtgaagatatcgtagcactggagcatggaacgtttggtgtgctgttgtttcgctctgttttaataggggtaagggtctcacatgtaggagaggcctcctgctgctttggttggcattggacattgttcaactatcagatgtagaatgtcatcgcgatgtacaaacgtaataaacaaacttaggacgatcagtatcaactatatacaggcaaagagaaaaaaaacagtatcaactcttgttctt

SEQ ID NO: 74479 - DNA, 5337 bp, Zea Mays
cgcccccatcgaaacacagccaaaaagccaccccgtgcaaaacacatagagctcccagtcccaacccggtcaccctccctctcctgctcctcgcatcgccggtgtcctcgacggctcgcgccgtcgcgctctcgcaaaaccctagctctgcttccctccgtcgtctcgcccgttcgattgaatcgcgccgcagaagctgttgcctctcatctctctccccgccctcctccggaaaccctagcccactccgcgaggccgcgatggcggagaggaagctggatcgaccctcggcgctcggcaaaggtgggctgtcgcttgggatcgaggaggacagggttgccgccgccatggggttcgtcgaccactcgaaagatcagcaccacctggataacagcattcccctctctcctcagtggctctacgccaaacctgctgatggaaagatctcgctgcctcatgggtcctcccttgaacttgctgaaaaggaagtgaggatgttggaaggaactgttgacaggaaagaacgaaggagaaatgcatttgatgctgacagtggtcttcgttggcttgaagaggagagggagacaagcctgcttgggagaagggagcgcaagaaggatgtggaccgggatgtggataatcgcaagattgatcgccgatctgacaatgtttctgcaagggatatcactgatccgcgtgcagctcctgcatctgaaaggtggcatgatggttccacccgtggcctggggaacgagggtcgccgggatggaaaatggtcatcaagatggggacccgatgacaaggagaaggactctaggtcagacaagaaggttgatgcagagaaggatgaaacccatgctgataaactgacattcacaggaaggctgctgtctgagtctgattcccgtgataaatggaggcctcgtcaccggcaggaaagtcattctgtcggaacagctacgcaccgtgctgctccaggctttggatccgagaaaggacgtgttaaggactcaacaaatgttggttttgccgctggaagaggaaggggaaacccgaactcagttgcatccttcaaccggccatcatctgcaggatcaatcggtgctccagctgtgcatgggaaatttgcaaaaactgctgttagtttctgctacccaagagggaagcttcttgatatatacaggcagaaaaatatgatgtcgtcgtttgatgatgtccacatgaaactggacgaaattccttctgtgacactctctactgctgcaaaacctctagcatttgttgcaccagatactgttgaagaggctctcctggaagatattagaaagggtaaagtcattagcagtgaaggaatcaatgggattggaaacaaaaaggagagggcaaaagagctcgaagaacctgcttctggcattgatgatgacatgggcaaagccagttttgcaattgctgggttgggtcaagaagggtcgtcaggtttaatctcagtgaatgatgcctcctatgttgaagggacacttcctagtggtgtcagtacatctctgctgaagataagtctggaggaaaatgccatcagcaatcaacatgggattactgacacccaggaaggtttgaaaactgctgaaatcaaggaaaatgctgatcatgctcttggcactaagttacctgatgattcgaacaccctgtttgaggtaccatcctttgagcatcttcaagaacccactaggccataccaaagcaacaacatggatataaaagtgggtggccatgctaattatccagaagagttgacattatattatctggatccccaaggaggtgtgcagggtccatttctgggtgctgacataatctcttggtatgaagatggatacttcggtttggagttaccagtacgtctgtctcagtttccagatgatgttcctttccgtccacttgtcgaagtcatgccccaccttgcgcaaaagacgcaatcgcgtatacctctgccttgtgatggaaattctgagtctctggaatcatctcaaagtaaatttgaatccagtgtcccttctacttcctctgggaggactgaccaattttctatttgggattctgaaagcaatgctgttgatcctaaaagaggtgatcatgaagcatcaataccttctcgtagtggttggctgtcttcaccggaaacaggaaaggatatatcaaatactagtaatcgccagcaacacattcctgaatcagtgaatcaggatgctgaagtgttgtacactggtaggcctaacagcagcatgggtcaatccctacgagaccttgagaatgaccgtgcagatttccaatcgacaccacatgaccctcattctgtggctggagaagctaatttgctgcaacataatgtcccaagggacagtgatctgagtcctcttggcttactttggtctgagctggaaggacgtccaaaacaacctctctcatctaatgtacttagtgtaaatgaacgtagaaatcccaagcctacaacacccaaggacattccacctgtaaacatgagacaagggccacttagcagaatgaatgaagtttctagtgtgcgcgatgagtggcctgcaaactttggtcggctggacaacatgaatgatgcaaacatttctggcagaatccatcaggttgaagcggagcatcatttgaattttgatgggcacctgctgcttcaacagatccgacgggagcaacagcaacagcggcaggagcaattgatggcccataataatttagagttttctggtgcatttcccgggcaggtgtttgatcctttgaaccaacaccgacagcctatgaatcaacagattcctgatgtggagcatcttttgagaatccagtttgaacttgagcaacagcagcaacgccaactccaacaagagcagcaccaacggcagctacagcagcaacggcaagcccagcttttgcaacggcagcagcagcagcagcagcaacagcaacaacaaatgatccttgagcaattgttgcagcaacagctgcagggttcaaattttggcccaacaagtatggttgatcaagtcttacttcgtgaacatgtattaaatgaactgcaccagcagcctcaccatttgcaaaggcagcatgatgcagctattgaacagctcattcaagcaaaatttggtcatgggcttcatagggagcaccataatgatatgttggatgttctctcgcgttcaaatcagagacagatgcttcctttagagcagcaacttcttttaggccttcaacacgagcagcaacttaagtctcaacaattggcaaatgctctgcggcaacattcaggccaggaagaagaaaggcacttaagtggggtctggccaatggatgctgctgcccagtttatccgctcaggaaccagtccaaatcagatacacagtcgtttcgatctccttgagaaccttcagagatcgtcatcgtttgatcatcatgaacatctagaccgcagcttatccttacacgaacagttgcatatgggaggtcaaggtattcgctccctagagcggactggttctttgcctggtggtggtcctggaccaaacccagatgtcataaatgccctaacacgtcatcatggacttagtcagttggaaacacatggtgatgtataccctttagttcaaatgcctatgcttccttcaggtgttcatccccagcaacttaggcatcaggatcagcttcctggttctcacataggaaggcttgaaaggcactggtcggatgccaatggacagttacaaaacagtctaatggaatcttcacacatcaaccagttgcagattgaagcggagaaggagaggaggaatgtggaaatgaacctttctgttgacaatccacatgcatggggagcccttatgaataaagataggaatacagagcaagatttgactgatatgattcataaaaaacttgtccttcaatcacagcagtcccggggttttcctgatgtttctgttccggcatcatttcgacgtaaagatcactttgtgcaacctgttgtggagagccctctgagatcagtggacatgtcgtttgaggagtctctttctgaaaggtcactttatgcaaaatcagggcagttggcacaagaaggatcatctaatcttggtactttacccaacagtattgagaacactggaaaatttaaccttagatcaggatctggatcaatgcttgagcagaagcattttcttggaattgacgatgttcaaagtgactttctagagaccacaggtggtagaacatcagctaatcaactggttgggagtgtcaatgaattaacaaggggtaaaaggcagggttctagtgcgagtttggctggggatgatcctaatttggctgatgaaggtgttagtaaatggtctgattctggcatgtccaaaggaagctctcactccttactaaagcgctctacaaaccaacatactactacatctcagtctgttcccacagatctgtcagcaatcaggctgaagaaagcaggacttgcgtcctctgatgagaataagatggaagcaggatttgcctcagtagcccagggtatggaaggctgcgttcctagcaacaaagagacgggggcgtatggcatgccatcagccaccaacaatccagatgcctctggtcagtccttcagcgaagcgttgaagagctcgaggaagcctccgttgcagtacgatgcctccgaatctgcagactgtggcccaggtggtaagggcgcgaaaaagaaaacgaagaaaggaaagcagattgacccttctcttcttgggttcaaggtccacagtaaccggatcatgatgggcgagattgttcgagatgattagagtgtacatacgcggtaggaggtggccttagaagaatcaagattggctccaagccaaaccctaacctctgtacatgcccagccctggtgcccgctcacctcggcagaaattttgtgactgcatcttctcttagcctcttgctagctgtagtattgcccgatttctcagatttagaaaaaggagcctttcttatcggtgccccacagaagtgtcatagttttgttgatctgtgaagatatcgtagcactggagcatggaacgtttggtgtgctgttgtttcgctctgttttaataggggtaagggtctcacatgtaggagaggcctcctgctgctttggttggcattggacattgttcaactatcagatgtagaatgtcatcgcgatgtacaaacgtaataaacaaacttaggacgatcagtatcaactatatacaggcaaagagaaaaaaaacagtatcaactcttgttctt

SEQ ID NO: 74480 - DNA, 5335 bp, Zea Mays
cgcccccatcgaaacacagccaaaaagccaccccgtgcaaaacacatagagctcccagtcccaacccggtcaccctccctctcctgctcctcgcatcgccggtgtcctcgacggctcgcgccgtcgcgctctcgcaaaaccctagctctgcttccctccgtcgtctcgcccgttcgattgaatcgcgccgcagaagctgttgcctctcatctctctccccgccctcctccggaaaccctagcccactccgcgaggccgcgatggcggagaggaagctggatcgaccctcggcgctcggcaaaggtgggctgtcgcttgggatcgaggaggacagggttgccgccgccatggggttcgtcgaccactcgaaagatcagcaccacctggataacagcattcccctctctcctcagtggctctacgccaaacctgctgatggaaagatctcgctgcctcatgggtcctcccttgaacttgctgaaaaggaagtgaggatgttggaaggaactgttgacaggaaagaacgaaggagaaatgcatttgatgctgacagtggtcttcgttggcttgaagaggagagggagacaagcctgcttgggagaagggagcgcaagaaggatgtggaccgggatgtggataatcgcaagattgatcgccgatctgacaatgtttctgcaagggatatcactgatccgcgtgcagctcctgcatctgaaaggtggcatgatggttccacccgtggcctggggaacgagggtcgccgggatggaaaatggtcatcaagatggggacccgatgacaaggagaaggactctaggtcagacaagaaggttgatgcagagaaggatgaaacccatgctgataaactgacattcacaggaaggctgctgtctgagtctgattcccgtgataaatggaggcctcgtcaccggcaggaaagtcattctgtcggaacagctacgcaccgtgctgctccaggctttggatccgagaaaggacgtgttaaggactcaacaaatgttggttttgccgctggaagaggaaggggaaacccgaactcagttgcatccttcaaccggccatcatctgcaggatcaatcggtgctccagctgtgcatgggaaatttgcaaaaactgctgttagtttctgctacccaagagggaagcttcttgatatatacaggcagaaaaatatgatgtcgtcgtttgatgatgtccacatgaaactggacgaaattccttctgtgacactctctactgctgcaaaacctctagcatttgttgcaccagatactgttgaagaggctctcctggaagatattagaaagggtaaagtcattagcagtgaaggaatcaatgggattggaaacaaaaaggagagggcaaaagagctcgaagaacctgcttctggcattgatgatgacatgggcaaagccagttttgcaattgctgggttgggtcaagaagggtcgtcaggtttaatctcagtgaatgatgcctcctatgttgaagggacacttcctagtggtgtcagtacatctctgctgaagataagtctggaggaaaatgccatcagcaatcaacatgggattactgacacccaggaaggtttgaaaactgctgaaatcaaggaaaatgctgatcatgctcttggcactaagttacctgatgattcgaacaccctgtttgaggtaccatcctttgagcatcttcaagaacccactaggccataccaaagcaacaacatggatataaaagtgggtggccatgctaattatccagaagagttgacattatattatctggatccccaaggaggtgtgcagggtccatttctgggtgctgacataatctcttggtatgaagatggatacttcggtttggagttaccagtacgtctgtctcagtttccagatgatgttcctttccgtccacttgtcgaagtcatgccccaccttgcgcaaaagacgcaatcgcgtatacctctgccttgtgatggaaattctgagtctctggaatcatctcaaagtaaatttgaatccagtgtcccttctacttcctctgggaggactgaccaattttctatttgggattctgaaagcaatgctgttgatcctaaaagaggtgatcatgaagcatcaataccttctcgtagtggttggctgtcttcaccggaaacaggaaaggatatatcaaatactagtaatcgccagcaacacattcctgaatcagtgaatcaggatgctgaaggcctaacagcagcatgggtcaatccctacgagaccttgagaatgaccgtgcagatttccaatcgacaccacatgaccctcattctgtggctggagaagctaatttgctgcaacataatgtcccaagggacagtgatctgagtcctcttggcttactttggtctgagctggaaggacgtccaaaacaacctctctcatctaatgtacttagtgtaaatgaacgtagaaatcccaagcctacaacacccaaggacattccacctgtaaacatgagacaagggccacttagcagaatgaatgaagtttctagtgtgcgcgatgagtggcctgcaaactttggtcggctggacaacatgaatgatgcaaacatttctggcagaatccatcaggttgaagcggagcatcatttgaattttgatgggcacctgctgcttcaacagatccgacgggagcaacagcaacagcggcaggagcaattgatggcccataataatttagagttttctggtgcatttcccgggcaggtgtttgatcctttgaaccaacaccgacagcctatgaatcaacagattcctgatgtggagcatcttttgagaatccagtttgaacttgagcaacagcagcaacgccaactccaacaagagcagcaccaacggcagctacagcagcaacggcaagcccagcttttgcaacggcagcagcagcagcagcagcaacagcaacaacaaatgatccttgagcaattgttgcagcaacagctgcagggttcaaattttggcccaacaagtatggttgatcaagtcttacttcgtgaacatgtattaaatgaactgcaccagcagcctcaccatttgcaaaggcagcatgatgcagctattgaacagctcattcaagcaaaatttggtcatgggcttcatagggagcaccataatgatatgttggatgttctctcgcgttcaaatcagagacagatgcttcctttagagcagcaacttcttttaggccttcaacacgagcagcaacttaagtctcaacaattggcaaatgctctgcggcaacattcaggccaggaagaagaaaggcacttaagtggggtctggccaatggatgctgctgcccagtttatccgctcaggaaccagtccaaatcagatacacagtcgtttcgatctccttgagaaccttcagagatcgtcatcgtttgatcatcatgaacatctagaccgcagcttatccttacacgaacagttgcatatgggaggtcaaggtattcgctccctagagcggactggttctttgcctggtggtggtcctggaccaaacccagatgtcataaatgccctaacacgtcatcatggacttagtcagttggaaacacatggtgatgtataccctttagttcaaatgcctatgcttccttcaggtgttcatccccagcaacttaggcatcaggatcagcttcctggttctcacataggaaggcttgaaaggcactggtcggatgccaatggacagttacaaaacagtctaatggaatcttcacacatcaaccagttgcagattgaagcggagaaggagaggaggaatgtggaaatgaacctttctgttgacaatccacatgcatggggagcccttatgaataaagataggaatacagagcaagatttgactgatatgattcataaaaaacttgtccttcaatcacagcagtcccggggttttcctgatgtttctgttccggcatcatttcgacgtaaagatcactttgtgcaacctgttgtggagagccctctgagatcagtggacatgtcgtttgaggagtctctttctgaaaggtcactttatgcaaaatcagggcagttggcacaagaaggatcatctaatcttggtactttacccaacagtattgagaacactggaaaatttaaccttagatcaggatctggatcaatgcttgagcagaagcattttcttggaattgacgatgttcaaagtgactttctagagaccacaggtggtagaacatcagctaatcaactggttgggagtgtcaatgaattaacaaggggtaaaaggcagggttctagtgcgagtttggctggggatgatcctaatttggctgatgaaggtgttagtaaatgatgtccatgtgcaggtctgattctggcatgtccaaaggaagctctcactccttactaaagcgctctacaaaccaacatactactacatctcagtctgttcccacagatctgtcagcaatcaggctgaagaaagcaggacttgcgtcctctgatgagaataagatggaagcaggatttgcctcagtagcccagggtatggaaggctgcgttcctagcaacaaagagacgggggcgtatggcatgccatcagccaccaacaatccagatgcctctggtcagtccttcagcgaagcgttgaagagctcgaggaagcctccgttgcagtacgatgcctccgaatctgcagactgtggcccaggtggtaagggcgcgaaaaagaaaacgaagaaaggaaagcagattgacccttctcttcttgggttcaaggtccacagtaaccggatcatgatgggcgagattgttcgagatgattagagtgtacatacgcggtaggaggtggccttagaagaatcaagattggctccaagccaaaccctaacctctgtacatgcccagccctggtgcccgctcacctcggcagaaattttgtgactgcatcttctcttagcctcttgctagctgtagtattgcccgatttctcagatttagaaaaaggagcctttcttatcggtgccccacagaagtgtcatagttttgttgatctgtgaagatatcgtagcactggagcatggaacgtttggtgtgctgttgtttcgctctgttttaataggggtaagggtctcacatgtaggagaggcctcctgctgctttggttggcattggacattgttcaactatcagatgtagaatgtcatcgcgatgtacaaacgtaataaacaaacttaggacgatcagtatcaactatatacaggcaaagagaaaaaaaacagtatcaactcttgttctt

SEQ ID NO: 74481 - DNA, 5321 bp, Zea Mays
cgcccccatcgaaacacagccaaaaagccaccccgtgcaaaacacatagagctcccagtcccaacccggtcaccctccctctcctgctcctcgcatcgccggtgtcctcgacggctcgcgccgtcgcgctctcgcaaaaccctagctctgcttccctccgtcgtctcgcccgttcgattgaatcgcgccgcagaagctgttgcctctcatctctctccccgccctcctccggaaaccctagcccactccgcgaggccgcgatggcggagaggaagctggatcgaccctcggcgctcggcaaaggtgggctgtcgcttgggatcgaggaggacagggttgccgccgccatggggttcgtcgaccactcgaaagatcagcaccacctggataacagcattcccctctctcctcagtggctctacgccaaacctgctgatggaaagatctcgctgcctcatgggtcctcccttgaacttgctgaaaaggaagtgaggatgttggaaggaactgttgacaggaaagaacgaaggagaaatgcatttgatgctgacagtggtcttcgttggcttgaagaggagagggagacaagcctgcttgggagaagggagcgcaagaaggatgtggaccgggatgtggataatcgcaagattgatcgccgatctgacaatgtttctgcaagggatatcactgatccgcgtgcagctcctgcatctgaaaggtggcatgatggttccacccgtggcctggggaacgagggtcgccgggatggaaaatggtcatcaagatggggacccgatgacaaggagaaggactctaggtcagacaagaaggttgatgcagagaaggatgaaacccatgctgataaactgacattcacaggaaggctgctgtctgagtctgattcccgtgataaatggaggcctcgtcaccggcaggaaagtcattctgtcggaacagctacgcaccgtgctgctccaggctttggatccgagaaaggacgtgttaaggactcaacaaatgttggttttgccgctggaagaggaaggggaaacccgaactcagttgcatccttcaaccggccatcatctgcaggatcaatcggtgctccagctgtgcatgggaaatttgcaaaaactgctgttagtttctgctacccaagagggaagcttcttgatatatacaggcagaaaaatatgatgtcgtcgtttgatgatgtccacatgaaactggacgaaattccttctgtgacactctctactgctgcaaaacctctagcatttgttgcaccagatactgttgaagaggctctcctggaagatattagaaagggtaaagtcattagcagtgaaggaatcaatgggattggaaacaaaaaggagagggcaaaagagctcgaagaacctgcttctggcattgatgatgacatgggcaaagccagttttgcaattgctgggttgggtcaagaagggtcgtcaggtttaatctcagtgaatgatgcctcctatgttgaagggacacttcctagtggtgtcagtacatctctgctgaagataagtctggaggaaaatgccatcagcaatcaacatgggattactgacacccaggaaggtttgaaaactgctgaaatcaaggaaaatgctgatcatgctcttggcactaagttacctgatgattcgaacaccctgtttgaggtaccatcctttgagcatcttcaagaacccactaggccataccaaagcaacaacatggatataaaagtgggtggccatgctaattatccagaagagttgacattatattatctggatccccaaggaggtgtgcagggtccatttctgggtgctgacataatctcttggtatgaagatggatacttcggtttggagttaccagtacgtctgtctcagtttccagatgatgttcctttccgtccacttgtcgaagtcatgccccaccttgcgcaaaagacgcaatcgcgtatacctctgccttgtgatggaaattctgagtctctggaatcatctcaaagtaaatttgaatccagtgtcccttctacttcctctgggaggactgaccaattttctatttgggattctgaaagcaatgctgttgatcctaaaagaggtgatcatgaagcatcaataccttctcgtagtggttggctgtcttcaccggaaacaggaaaggatatatcaaatactagtaatcgccagcaacacattcctgaatcagtgaatcaggatgctgaaggcctaacagcagcatgggtcaatccctacgagaccttgagaatgaccgtgcagatttccaatcgacaccacatgaccctcattctgtggctggagaagctaatttgctgcaacataatgtcccaagggacagtgatctgagtcctcttggcttactttggtctgagctggaaggacgtccaaaacaacctctctcatctaatgtacttagtgtaaatgaacgtagaaatcccaagcctacaacacccaaggacattccacctgtaaacatgagacaagggccacttagcagaatgaatgaagtttctagtgtgcgcgatgagtggcctgcaaactttggtcggctggacaacatgaatgatgcaaacatttctggcagaatccatcaggttgaagcggagcatcatttgaattttgatgggcacctgctgcttcaacagatccgacgggagcaacagcaacagcggcaggagcaattgatggcccataataatttagagttttctggtgcatttcccgggcaggtgtttgatcctttgaaccaacaccgacagcctatgaatcaacagattcctgatgtggagcatcttttgagaatccagtttgaacttgagcaacagcagcaacgccaactccaacaagagcagcaccaacggcagctacagcagcaacggcaagcccagcttttgcaacggcagcagcagcagcagcagcaacagcaacaacaaatgatccttgagcaattgttgcagcaacagctgcagggttcaaattttggcccaacaagtatggttgatcaagtcttacttcgtgaacatgtattaaatgaactgcaccagcagcctcaccatttgcaaaggcagcatgatgcagctattgaacagctcattcaagcaaaatttggtcatgggcttcatagggagcaccataatgatatgttggatgttctctcgcgttcaaatcagagacagatgcttcctttagagcagcaacttcttttaggccttcaacacgagcagcaacttaagtctcaacaattggcaaatgctctgcggcaacattcaggccaggaagaagaaaggcacttaagtggggtctggccaatggatgctgctgcccagtttatccgctcaggaaccagtccaaatcagatacacagtcgtttcgatctccttgagaaccttcagagatcgtcatcgtttgatcatcatgaacatctagaccgcagcttatccttacacgaacagttgcatatgggaggtcaaggtattcgctccctagagcggactggttctttgcctggtggtggtcctggaccaaacccagatgtcataaatgccctaacacgtcatcatggacttagtcagttggaaacacatggtgatgtataccctttagttcaaatgcctatgcttccttcaggtgttcatccccagcaacttaggcatcaggatcagcttcctggttctcacataggaaggcttgaaaggcactggtcggatgccaatggacagttacaaaacagtctaatggaatcttcacacatcaaccagttgcagattgaagcggagaaggagaggaggaatgtggaaatgaacctttctgttgacaatccacatgcatggggagcccttatgaataaagataggaatacagagcaagatttgactgatatgattcataaaaaacttgtccttcaatcacagcagtcccggggttttcctgatgtttctgttccggcatcatttcgacgtaaagatcactttgtgcaacctgttgtggagagccctctgagatcagtggacatgtcgtttgaggagtctctttctgaaaggtcactttatgcaaaatcagggcagttggcacaagaaggatcatctaatcttggtactttacccaacagtattgagaacactggaaaatttaaccttagatcaggatctggatcaatgcttgagcagaagcattttcttggaattgacgatgttcaaagtgactttctagagaccacaggtggtagaacatcagctaatcaactggttgggagtgtcaatgaattaacaaggggtaaaaggcagggttctagtgcgagtttggctggggatgatcctaatttggctgatgaaggtgttagtaaatggtctgattctggcatgtccaaaggaagctctcactccttactaaagcgctctacaaaccaacatactactacatctcagtctgttcccacagatctgtcagcaatcaggctgaagaaagcaggacttgcgtcctctgatgagaataagatggaagcaggatttgcctcagtagcccagggtatggaaggctgcgttcctagcaacaaagagacgggggcgtatggcatgccatcagccaccaacaatccagatgcctctggtcagtccttcagcgaagcgttgaagagctcgaggaagcctccgttgcagtacgatgcctccgaatctgcagactgtggcccaggtggtaagggcgcgaaaaagaaaacgaagaaaggaaagcagattgacccttctcttcttgggttcaaggtccacagtaaccggatcatgatgggcgagattgttcgagatgattagagtgtacatacgcggtaggaggtggccttagaagaatcaagattggctccaagccaaaccctaacctctgtacatgcccagccctggtgcccgctcacctcggcagaaattttgtgactgcatcttctcttagcctcttgctagctgtagtattgcccgatttctcagatttagaaaaaggagcctttcttatcggtgccccacagaagtgtcatagttttgttgatctgtgaagatatcgtagcactggagcatggaacgtttggtgtgctgttgtttcgctctgttttaataggggtaagggtctcacatgtaggagaggcctcctgctgctttggttggcattggacattgttcaactatcagatgtagaatgtcatcgcgatgtacaaacgtaataaacaaacttaggacgatcagtatcaactatatacaggcaaagagaaaaaaaacagtatcaactcttgttctt

SEQ ID NO: 74482 - DNA, 4988 bp, Zea Mays
gcgtgggtgcatgtgttcctatcagcaccacctggataacagcattcccctctctcctcagtggctctacgccaaacctgctgatggaaagatctcgctgcctcatgggtcctcccttgaacttgctgaaaaggaagtgaggatgttggaaggaactgttgacaggaaagaacgaaggagaaatgcatttgatgctgacagtggtcttcgttggcttgaagaggagagggagacaagcctgcttgggagaagggagcgcaagaaggatgtggaccgggatgtggataatcgcaagattgatcgccgatctgacaatgtttctgcaagggatatcactgatccgcgtgcagctcctgcatctgaaaggtggcatgatggttccacccgtggcctggggaacgagggtcgccgggatggaaaatggtcatcaagatggggacccgatgacaaggagaaggactctaggtcagacaagaaggttgatgcagagaaggatgaaacccatgctgataaactgacattcacaggaaggctgctgtctgagtctgattcccgtgataaatggaggcctcgtcaccggcaggaaagtcattctgtcggaacagctacgcaccgtgctgctccaggctttggatccgagaaaggacgtgttaaggactcaacaaatgttggttttgccgctggaagaggaaggggaaacccgaactcagttgcatccttcaaccggccatcatctgcaggatcaatcggtgctccagctgtgcatgggaaatttgcaaaaactgctgttagtttctgctacccaagagggaagcttcttgatatatacaggcagaaaaatatgatgtcgtcgtttgatgatgtccacatgaaactggacgaaattccttctgtgacactctctactgctgcaaaacctctagcatttgttgcaccagatactgttgaagaggctctcctggaagatattagaaagggtaaagtcattagcagtgaaggaatcaatgggattggaaacaaaaaggagagggcaaaagagctcgaagaacctgcttctggcattgatgatgacatgggcaaagccagttttgcaattgctgggttgggtcaagaagggtcgtcaggtttaatctcagtgaatgatgcctcctatgttgaagggacacttcctagtggtgtcagtacatctctgctgaagataagtctggaggaaaatgccatcagcaatcaacatgggattactgacacccaggaaggtttgaaaactgctgaaatcaaggaaaatgctgatcatgctcttggcactaagttacctgatgattcgaacaccctgtttgaggtaccatcctttgagcatcttcaagaacccactaggccataccaaagcaacaacatggatataaaagtgggtggccatgctaattatccagaagagttgacattatattatctggatccccaaggaggtgtgcagggtccatttctgggtgctgacataatctcttggtatgaagatggatacttcggtttggagttaccagtacgtctgtctcagtttccagatgatgttcctttccgtccacttgtcgaagtcatgccccaccttgcgcaaaagacgcaatcgcgtatacctctgccttgtgatggaaattctgagtctctggaatcatctcaaagtaaatttgaatccagtgtcccttctacttcctctgggaggactgaccaattttctatttgggattctgaaagcaatgctgttgatcctaaaagaggtgatcatgaagcatcaataccttctcgtagtggttggctgtcttcaccggaaacaggaaaggatatatcaaatactagtaatcgccagcaacacattcctgaatcagtgaatcaggatgctgaagaagtgttgtacactggtaggcctaacagcagcatgggtcaatccctacgagaccttgagaatgaccgtgcagatttccaatcgacaccacatgaccctcattctgtggctggagaagctaatttgctgcaacataatgtcccaagggacagtgatctgagtcctcttggcttactttggtctgagctggaaggacgtccaaaacaacctctctcatctaatgtacttagtgtaaatgaacgtagaaatcccaagcctacaacacccaaggacattccacctgtaaacatgagacaagggccacttagcagaatgaatgaagtttctagtgtgcgcgatgagtggcctgcaaactttggtcggctggacaacatgaatgatgcaaacatttctggcagaatccatcaggttgaagcggagcatcatttgaattttgatgggcacctgctgcttcaacagatccgacgggagcaacagcaacagcggcaggagcaattgatggcccataataatttagagttttctggtgcatttcccgggcaggtgtttgatcctttgaaccaacaccgacagcctatgaatcaacagattcctgatgtggagcatcttttgagaatccagtttgaacttgagcaacagcagcaacgccaactccaacaagagcagcaccaacggcagctacagcagcaacggcaagcccagcttttgcaacggcagcagcagcagcagcagcaacagcaacaacaaatgatccttgagcaattgttgcagcaacagctgcagggttcaaattttggcccaacaagtatggttgatcaagtcttacttcgtgaacatgtattaaatgaactgcaccagcagcctcaccatttgcaaaggcagcatgatgcagctattgaacagctcattcaagcaaaatttggtcatgggcttcatagggagcaccataatgatatgttggatgttctctcgcgttcaaatcagagacagatgcttcctttagagcagcaacttcttttaggccttcaacacgagcagcaacttaagtctcaacaattggcaaatgctctgcggcaacattcaggccaggaagaagaaaggcacttaagtggggtctggccaatggatgctgctgcccagtttatccgctcaggaaccagtccaaatcagatacacagtcgtttcgatctccttgagaaccttcagagatcgtcatcgtttgatcatcatgaacatctagaccgcagcttatccttacacgaacagttgcatatgggaggtcaaggtattcgctccctagagcggactggttctttgcctggtggtggtcctggaccaaacccagatgtcataaatgccctaacacgtcatcatggacttagtcagttggaaacacatggtgatgtataccctttagttcaaatgcctatgcttccttcaggtgttcatccccagcaacttaggcatcaggatcagcttcctggttctcacataggaaggcttgaaaggcactggtcggatgccaatggacagttacaaaacagtctaatggaatcttcacacatcaaccagttgcagattgaagcggagaaggagaggaggaatgtggaaatgaacctttctgttgacaatccacatgcatggggagcccttatgaataaagataggaatacagagcaagatttgactgatatgattcataaaaaacttgtccttcaatcacagcagtcccggggttttcctgatgtttctgttccggcatcatttcgacgtaaagatcactttgtgcaacctgttgtggagagccctctgagatcagtggacatgtcgtttgaggagtctctttctgaaaggtcactttatgcaaaatcagggcagttggcacaagaaggatcatctaatcttggtactttacccaacagtattgagaacactggaaaatttaaccttagatcaggatctggatcaatgcttgagcagaagcattttcttggaattgacgatgttcaaagtgactttctagagaccacaggtggtagaacatcagctaatcaactggttgggagtgtcaatgaattaacaaggggtaaaaggcagggttctagtgcgagtttggctggggatgatcctaatttggctgatgaaggtgttagtaaatggtctgattctggcatgtccaaaggaagctctcactccttactaaagcgctctacaaaccaacatactactacatctcagtctgttcccacagatctgtcagcaatcaggctgaagaaagcaggacttgcgtcctctgatgagaataagatggaagcaggatttgcctcagtagcccagggtatggaaggctgcgttcctagcaacaaagagacgggggcgtatggcatgccatcagccaccaacaatccagatgcctctggtcagtccttcagcgaagcgttgaagagctcgaggaagcctccgttgcagtacgatgcctccgaatctgcagactgtggcccaggtggtaagggcgcgaaaaagaaaacgaagaaaggaaagcagattgacccttctcttcttgggttcaaggtccacagtaaccggatcatgatgggcgagattgttcgagatgattagagtgtacatacgcggtaggaggtggccttagaagaatcaagattggctccaagccaaaccctaacctctgtacatgcccagccctggtgcccgctcacctcggcagaaattttgtgactgcatcttctcttagcctcttgctagctgtagtattgcccgatttctcagatttagaaaaaggagcctttcttatcggtgccccacagaagtgtcatagttttgttgatctgtgaagatatcgtagcactggagcatggaacgtttggtgtgctgttgtttcgctctgttttaataggggtaagggtctcacatgtaggagaggcctcctgctgctttggttggcattggacattgttcaactatcagatgtagaatgtcatcgcgatgtacaaacgtaataaacaaacttaggacgatcagtatcaactatatacaggcaaagagaaaaaaaacagtatcaactcttgttctt

SEQ ID NO: 74483 - DNA, 5695 bp, Zea Mays
ccacgcccccatcgaaacacagccaaaaagccaccccgtccaaaacacacacacatagctcccaatcccaacccccggccaccctccatctcctgctcctcgcatcgccggtgacctcgccgcctcgctctgtctcaaaaccctagccccggttctctccgccgcctcgccccgttcgctcggatcgcgccgcgggagccgctgcctctcctctctctccgccctccaccggaaaccctagctcactcccccgctcgctccttcggatcccgcgaggctccgatggcggagaggaagctggatcgaccctcggcactcggcaaaggtgggctgtcgcttgggatcgaggaggacagggccgccgccgccatggggttcgtcgaccactccaaagatcagcaccacctggataacagcattcccctttctcctcagtggctctacgccaaacctgctgatggaaagatctcgctgcctcatgggtcctcccttgaacctgctgaaaaggaagcgaggatgttggaaggaactgctgataggaaagaacgaaggaggaatgtatttgatgctgacagtggtcttcgttggcttgaagaggagagggagacaagccttcttgggaggagggagcgcaagaaggatgtagaccgggatgtggataaccgcaagatcgatcgccgatctgacaatgtttctgcaagggacaacactgatccgcgcacagctccttcatctgaaaggtggaatgatggttccacccgtagcctggggaatgagggtcgacgtgatgcaaaatggtcatcaagatggggccccgatgacaaggagaaggactccaggtcagacaagaaggttgatgcagagaaggatgaaactcatgctgataaacaggccttcacaggaaggctgctgtctgagtccgattcccgtgataaatggaggcctcgtcaccggcaggaaagtcattctgttggaacagctacgtaccgtgctgctccaggctttggatccgagaaaggacgtgttaaggactcgtctaatgttggttttgccgctggaagaggcaggggaaacccaaactcagttgcatccttcaaccggccatcatctgcaggatcaatcggtgctccagctgtgcatgggaaatttgcaaaaactgcagttagtttccgctacccaagagggaagcttcttgatatatacaggcagaaaaatatgatgtcgtcgtttgatgatgcccacatgaaactggacgaaattccttctatcacactctctattgctgcaaaacctctagcatttgttgcaccagatactgttgaagaggctctcctggaagatattagaaagggtaaagtcattagcagtgaaggaatcaatgggactggaaacaaggagagggcaaaagagctcgaagaacctgcttctggtattgatgatgacaagggcaaagccagttttgcaattgctgggttgggtcaagaagggtcttcaggtttaatctcagtgaatgatgccttctatgttgaagggacacttcctagtggtgtcagtacatctctgccgaagaaaagtctggagggaaatgccttcagcaatcaacataggattactgacactcaggaaggtttgaaaactgctgagatcaaggaaaatgttgatcatgatcttggcactaagctacctgatgattcgaacactctgtttgatgtaccatcctttgagcatcttcaagaaccccctaagccataccaaagcaacaacatggatacaaaagtgggtggccatgctatttatccagaagagttgacattatattatctggatccccaaggaggtgtgcagggtccatttctgggtgctgacataatctcttggtatgaagatggatacttcggtttggagttacctgtacgtctgtctcagttttcagatgatgttccttttcgcccacttgttgaagtcatgccccaccttgtgcaaaagccgcaatcgcgtatacctgtaccttgtgatggaaattctgaatctcttgaatcatctcaaagtaaatttgaatccagtgtccgttctgcttcctctgtgaggggtgaccaattgtctaactgggatactgaaagcaatgctgttgatcctaaaagaggtgatcatgaagaatcaataccttctcgtagtggttggctatcttcaccggaaacaggaaaggatatatcaaatactagtaatcgccagcagcacattcctgaatcagtgaatcaggatgccgaagaagtgttgtacactgggaggcctaacagtagcatgggtcaatctttacgagaccttgagaacgaccatgcagatttccagttgacaccacatgatccccattctgtggttggagaagctaatttgccgcagcataatgtcccaagggacagcgatctgagtcctcttggcttactttggtctgagctggaagggcatccaaaacaacctctctcatcaaatgtacttggtgtaaatgaacgtagaaactccaagcctacaacacccaaggacattctacctgtaaacatgagacaagggccacttagcaggatgaatgaagtttctagtgtgcgtgatgagtggcctgcaaactttggacggctggacaatatgaatggccctaacatttctggcagaatccctcaggttgaagctgagcatcatttgaattttgatgggcacctcctgcttcagcagatcagacgggagcaacagcaacatcaacagcgacaggagcaattgatggcccgtagtaatttagagttttctggtgcatttcccgggcaggtgtttgattctttgcaccaacaccgacagcctatgaatcaacagcttcctgatgtagagcatcttttgagagtccagtttgaacttgagcaacagcagcaacaccaactccaacaagagcagcaccaacggcagctacagcagcaacgacaagcccagtttttgcaacgacagcaacagcagcagcagcaacagatgattcttgagcaattgttgcagcagcagctgcagggttctaattttggaccaacaaatatggttgatcaagtcttacttcgtgaacatgtatttaatgaactgcaccagcagcctcaccatttgcaaaggcagcatgatgcagctattgaacaacttattcaagccaaatttggtcacgggcttcatagggagcaccataatgatatgttggatgttctctcacgttcaaatcagagacaaatgcttcctttagagcagcaaattcttttaggccttcagcatgagcatgaacaacaacttcagtcccaacaattggcaaatgctctgcggcaacattcaggcagggaagaagaaatgcacttaagtggggtctggccaatggatgatgctgcccagtttatccgctcaggaaccagtccaaatcagagacacggttgtttcgatctcctggagaaccttcagagatcgtcatcgtttgatcatcatgaccatctagaccgcagcttatcgttacaggaacgattgcatatgggtggtctaggtattcactccctagaacgatctgattctttgcctggtggtggtcctggaccaaacacagatgtcataaatgccctatcacgccatcatggacttgggcagttggaaacacatggtgatgtataccctttgggtcaaatgcctatgcttccttcaggtgttcatcctcagcaacataggcatcaggaacagcttcctggttctcacataggaaggcgtgaaaggcactggtcagatgccaatggtcagttgcaaaatagtctaatgcaatcttcacacatcaaccagttgcagatggaagtggagaagcagaggaggaatgtggaaatgaacctttctgttgacaatccacatgcatgggcagccctaatgaataaagagaggaatgcagaacaagatttgagtgatatgattcacaagaaacttgcccttcaatcgcagcagtcccttggttttcctgatgtttctgttgcggcatcatttgggcataaagatcactttgtgcaacctgttgcggagaaccctctgaaatcagtggacatgttgtcgtttgaggagtctctttcagaaaggtcactttatgcaaagtcagggcagttggcacaagagggatcagctaatctgggtactttacccaacagtattgagaacactggaaattttaaccttagaccaggatctggatcaatgtttgagcagaagcatttccttggaattgacgatgttcaaagtgacttttcagagaccacaggtggtagaacatcagctaatcaactggttgggagtgtcaatgaattaacaaggggtaaaaggcagggttctagtgcaagtttggctggggatgatactaatttttctgaagaagctgttagtaaatggtattcttctaaacttgtagatgtgttgctccattatttgctatctttctcaaaaggatattcactgatcctcctcattccaccaaattaccgttctaatatttttttgcgtgttactcaatcagtttattctgatgatctcacattaggtcactggataattctaatatgcactttgatccttgagagcttcctttgctcataagcgtatcttaatgcaaaggcttgtttgtggacaagagttgcgactacattatacttgttattaaggtctgattctggcatgtcaaaaggaagctcacactccttactaaagcgctctacaagccaacatagtactacatctcagtctgtttctgcagatctgtcagtgatcaggctgaagaaagcaggacttgcatcctctgatgagaataagatggaatcaggattggcctcagtagcccagggtatggaaggctgcgttattagcaacaaagagacgggggcgtatggcatgccatcagccaccaacaatccagatgcctctggtcagtccttcagcgaagcgttgaagagttcgaggaagcctcagttgcagtacgatgcctccgaatctgcagatggtggcccaggtggtaagggcgcaaagaagaaaacgaagaaagggaagcagattgacccttctcttcttggcttcaaggtccacagtaaccggatcatgatgggcgagattgttcgagatgattagcacgcatgagtgtacatacccggtaggagttggccttagaatcatgattggcttcaagctctacagtaaaccctaaactctgtacatgccagaaattttgtgccatggcttcacttctgcttagatcttctcttagcctctgttagttatagacttgcccgatttctcaggtttacagaagtgtcatttgtacagaacagccaagatcatcatgtatttagtggcaaagttttattgatctgtgttaaactgtgaagatgtcgtagtgacggaacttggaacgtttgtgctgttgtttctttctgtttaggccttgttcgctctcaatccatatagatttagtgggtttaaattctaagcatgtcaaacttcttaattttttcaatctcatctaatccatgtgtcatagaaataaccgaataaggtaggtatttcatagtgaggttaaatctatcatttaatctatttatttcgtaaagctgattattcttttgatctatgtatctctaaaagctagttattcttttgtttc

SEQ ID NO: 74484 - DNA, 93 bp, Zea Mays
aaacatatgtacatcaaacatgtcgtcattgtcactacggttacatccaacggctagctagggtcaagtatataaactatgtacagtcacgac

SEQ ID NO: 74485 - DNA, 1289 bp, Zea Mays
ctttagcatagaaatcattattgtgcatgttatgtgtgcctgcactttccaccttaacattaacctcaaccacctgcacgagaaatgatcaaacaatcaatcatagtgactttaatataatggatttacagagatagtccactggataaaggcacaatgattttacttttacagacttaaggcctcagaagtttatacttctattaaaattgcatggttgaataaacacttttttggtagcctgaagtagatttcatctaagtagtttatgtaacattagcaggtataacatcattttgatttattttatttgatttgatgtaaagatcataccctttgctggaagctcccacacaatggggtataagaaagggatcaacctgaaattcgctcctataggcaatcaaactcaaaacttgagtgctactcgaaccacctaataaacccagttagaattcgtttcgttgtggtcccatttagattgcaaacaaattttagtgggcaatctgatcaattaaaaaaggtgcaaatagatggcaacccccacctggttatgaacctcattcaatttgcaatcaacagccatgtccatacgagcaacaaagaaatgtagatgaactggtgcatacagaccagggacaatagttgtgccatatttccttgattccccgagcatcagggcccctaagctgagatttccagtcagctttaagacaaagaattctaccaaaactaagaacatggtgcacggtgtggacgcctacacaccgtgcttatagagtagtagggataagcaggaaagctgaaaacaatgaacaacaatttacgaattaggaaaagaaaggtgatcaactctgaaattcttctgtgtttgtagcgataggataggtttttgacttaccctggagatgatgtatccagaggcttcttcgacagtgtcacggtgatcatcaacatatggcgaactgtctctagtctgactaaattaagctctagtagatctaaacaacctaggtaaaatatcagacgcaaacaacccattttttccacagaggacaacgagaatcgaaaggtttcagggcaagtagcatcactaaacacctgaaatgaaaaggtttccttgggcggctttctccttgggtggtggggccttctccttcggtggctcctcgtcagcgtgggtgggatggcctcctccttccatgatgacgatggggcttgcttcttcgttggctcctacttgaactttgaaaagtggaccatttcgatgattacgaaagagaaaaaac

SEQ ID NO: 74486 - DNA, 50 bp, Zea Mays
ggtttcttattcttgtgaatttaatgtcgtcgggtgcccatggaagtgca

SEQ ID NO: 74487 - DNA, 1627 bp, Zea Mays
agcagccactcagtcatgataccacttgtcatgagtgttactgctaacaagatatacaacataggaacatcacatctaaggaccaaacaattcatcaagacattcagaggatgacatgcaatcgatcaatcacacatcattcaacaccaacaaacagatccagcatacaccacccatcattcatccatcacagtacaaaggatgcgatgtggcggtgatggtggtatacctgttggcgtggagcagcgcggccaggccgaggtactcctccgggttccaccagtaggacgggcaggaggtggagcagcaggcgcagaggatgcactcgtacgtcgagcttggcccggtcggccttggtctgcgacgcggtggacgtggatccgaggacgctacgacaacggacttcatcttggcgtggacctcgaggtcgacatcgatgcagaagaggatgtcctctccggggaggtgggtcgatggcagcgagtacgccatcatcaccgccgtgcagggcaccttcggctacctggacccggagtattaccatacggggcagctgactgacaagagcgacgtctacagcttcgaagtgatactcgctgagctcctgacgaggaacaagccgatcatcgagaaggggaacggcgagaaggagaacctgtccaactacctgtgggaggccaaggagaaacctctcgaggagatagtggacggtcaggtctgggaggaagcgagcaaggaagcggtcgtgtgctttgctcgcctggcgctggagtgtctggatctgaggcgagaggcgaggccaaccatgaaagacgtggagttgaggctgcagctcctcaaggccaaggcacgcgctgctgcttcgggaccgagagcggacggcgagttccatcctcccggtgaaacagggcgacgcactaggcgctacggcgtggttccggtgactgctcaggatgggacgcgtcagtacagcctagagcaggagatcgcgtcgtccctgtggataccacgctgaagttggaagccataccatcattagcgcggtgccgacggcggtgcggggtccgacaccatcgggcggtcatcgtgagctcagcaacgaccatccccgcgacacggctgctcctgatccggtgatggggttcccggttcctggacagctccttcaactgggaatgggggcggctggaagtgagcgaggatggaaggggagtgtggttaggggcggggatgggaggcgccgcgaccgccgccgccatggcgaggtgggtctgcggcggctccggtcggtgcaggcggccgcccttcatcgacggcgagcggggaactgggtggacaccgggacacgtaatcgtggattcgatgggagaggggatgggaggaagcagcggagggtgaggaggcgtcattggatccgctgcgggacggtgtgcgagaccggcgccaaggcggacgccgccgcggacgcgtgcggtgtggcggtgctacgggaggactgcgcggcgaggcatgagcggcctgggtcggacccaacacgggcgatggtggggacggcggggatccggcgtgcagggagaggtgggcgagggggcacaggggggcggatgtgcgagggagggaatggggg

SEQ ID NO: 74488 - DNA, 1393 bp, Zea Mays
accgtgcccccgcctccctctcccgtcgccgcgcatgcacaccccgcctcccaggtcccagcaaaatctccggcgcatggggaccgccgccgccggccgccccacccgacacctctctgattctctccctctatataacctgacctgatctcaaggtgctgctcgaagctaccctaaaccgccgccgccgccgccgccgattgctcgagctcgcttctttacggcgggattggttcgtagctcgggctgatgatgatttggatccgaaaggatcttagcggatttcggtgaggcagattcgtccgccgctgatcgccttatgttgttacacacactgaagccctttcgacgcgtctctcagattggttcttttcccctttcgtctctttgtctaatttctcactggatgttgctgcaatgcgatgatgattcataacatggttttggcagtggttaccccttgtggtcaccgtgagccgtcaaacctgaaaacgacttctctttccactgagcattgcgaataaaatgcagcgtattatcatcgggcaattgaatttatcatcaaatccatactggttctagcaaaaaaaaacagataatttcacgtgagcctgaagtttctgaaaactcaatgcagctttcatggaagtgactttatggcacctgccaattaccagtcgccccattttttaggaacgaacgcacctttcctcaacacggcctgaatcgcatagccaaggccaaacaaattattggataaaacctgcatgcaatatcgtctgacagcagggagcttcagcgccacctgttgcttcaccttgccgcctgaaaccacaacggcgtcgtccctggccagagcgttatccaccggccgatctgaatgtagcctgtctagcagttccgagtttctgtggcggggttgatcattgtttgatcaagtcgtccttggccattatcagattcgggcatcattgcgagttccatgttggctaccttcatgtttgtgctgatgcctttgtagcaagtggctacctggtcgcatttccatgaaataacgatgagggaattgtttgttctaggtttggtaatgtattttccaggttctgaaaaatgattaatgagttcatagccttaataacatttactactcaatgttatactaaaaaatgtattgacattgtgctcaaccacaatatgaaaagtagatccttcctgcccctttgttggttagtgagcaatatcgcctccagacataatcagggatcatgttaaatgcatcaacattatgtcttacctcaataattccaaaagggataactcttactccataccgttatttctcaacaaagggggcatatgttcaaatattaggctcaagcatggctcatttttt

SEQ ID NO: 74489 - DNA, 1213 bp, Zea Mays
accgtgcccccgcctccctctcccgtcgccgcgcatgcacaccccgcctcccaggtcccagcaaaatctccggcgcatggggaccgccgccgccggccgccccacccgacacctctctgattctctccctctatataacctgacctgatctcaaggtgctgctcgaagctaccctaaaccgccgccgccgccgccgccgattgctcgagctcgcttctttacggcggttctgcatctgcgtgctgatatcttcttgtcatgttctctcgttctgtgcttctgtgattttttcctattttctctcaactgtaccagggattggttcgtagctcgggctgatgatgatttggatccgaaaggatcttagcggatttcggtgaggcagattcgtccgccgctgatcgccttatgttgttacacacactgaagccctttcgacgcgtctctcagattggttcttttcccctttcgtctctttgtctaatttctcactggatgttgctgcaatgcgatgatgattcataacatggttttggcagtggttaccccttgtggtcaccgtgagccgtcaaacctgaaaacgacttctctttccactgagcattgcgaataaaatgcagcgtattatcatcgggcaattgaatttatcatcaaatccatactggttctagcaaaaaaaaacagataatttcacgtgagcctgaagtttctgaaaactcaatgcagctttcatggaagtgactttatggcacctgccaattaccagtcgccccattttttaggaacgaacgcacctttcctcaacacggcctgaatcgcatagccaaggccaaacaaattattggataaaacctggtcgcatttccatgaaataacgatgagggaattgtttgttctaggtttggtaatgtattttccaggttctgaaaaatgattaatgagttcatagccttaataacatttactactcaatgttatactaaaaaatgtattgacattgtgctcaaccacaatatgaaaagtagatccttcctgcccctttgttggttagtgagcaatatcgcctccagacataatcagggatcatgttaaatgcatcaacattatgtcttacctcaataattccaaaagggataactcttactccataccgttatttctcaacaaagggggcatatgttcaaatattaggctcaagcatggctcatttttt

SEQ ID NO: 74490 - DNA, 1322 bp, Zea Mays
accgtgcccccgcctccctctcccgtcgccgcgcatgcacaccccgcctcccaggtcccagcaaaatctccggcgcatggggaccgccgccgccggccgccccacccgacacctctctgattctctccctctatataacctgacctgatctcaagggattggttcgtagctcgggctgatgatgatttggatccgaaaggatcttagcggatttcggtgaggcagattcgtccgccgctgatcgccttatgttgttacacacactgaagccctttcgacgcgtctctcagattggttcttttcccctttcgtctctttgtctaatttctcactggatgttgctgcaatgcgatgatgattcataacatggttttggcagtggttaccccttgtggtcaccgtgagccgtcaaacctgaaaacgacttctctttccactgagcattgcgaataaaatgcagcgtattatcatcgggcaattgaatttatcatcaaatccatactggttctagcaaaaaaaaacagataatttcacgtgagcctgaagtttctgaaaactcaatgcagctttcatggaagtgactttatggcacctgccaattaccagtcgccccattttttaggaacgaacgcacctttcctcaacacggcctgaatcgcatagccaaggccaaacaaattattggataaaacctgcatgcaatatcgtctgacagcagggagcttcagcgccacctgttgcttcaccttgccgcctgaaaccacaacggcgtcgtccctggccagagcgttatccaccggccgatctgaatgtagcctgtctagcagttccgagtttctgtggcggggttgatcattgtttgatcaagtcgtccttggccattatcagattcgggcatcattgcgagttccatgttggctaccttcatgtttgtgctgatgcctttgtagcaagtggctacctggtcgcatttccatgaaataacgatgagggaattgtttgttctaggtttggtaatgtattttccaggttctgaaaaatgattaatgagttcatagccttaataacatttactactcaatgttatactaaaaaatgtattgacattgtgctcaaccacaatatgaaaagtagatccttcctgcccctttgttggttagtgagcaatatcgcctccagacataatcagggatcatgttaaatgcatcaacattatgtcttacctcaataattccaaaagggataactcttactccataccgttatttctcaacaaagggggcatatgttcaaatattaggctcaagcatggctcatttttt

SEQ ID NO: 74491 - DNA, 4713 bp, Zea Mays
ggaggagccacttgcgtgctggcctctcccactggcgccacctcccctccttttctcttcttcctccgtccgcccgtcccccaatccctccgctcctctctaccagccgagaccgagagagagcgcccgaccctaccacagctgctgcctgctgctgctctgttctgctctcccccttttccaccgtttctctctcttctcacctcacctgtttggccgcttttctccactcccctcttccaatcagaccaatctccccgtctccctaaacacgaataccatccctctgctccggtgttccggctctcccacgcaccccaccccaccccactagtttttgcttcctgttcacttgtgcctgctctcgctcgctgttggcctgttgctgttgctattcccgtcccgtgcttcccttcctctcactggtcgtctagtatcctctctcccacctgccgctgccgccgccgccgccgccgccgccctgctcccacctgccgtcctctggtcaaagccagcggctcccgagatttgccgctgcttccttgcttgaggaatcaagcctgagcggtgagagatcaagagggagggacggagcgagagacgcaagaggaaagggagccagcccctcgcgcccggcattcaattggagccaacagtaggcgggtggggcggctgctacagcacgtcggactccataaattagctccccgctttccggcccccttttcgccccgtgtctcccccgatcggcccgtcgacgacgcggacgcccgccggagcatgcgcgccgcgggcctcggccgccgcagcgccgccgccggcgtccggaagatgtagctccgcgacccgcgaggagagggcgagggggatgaccgttacggcgcgcgggaggagcggcggggccgggatggaggagaagggcgacgcgcccgggctcggcttcctgggcctcgaccggatgcgcgtcctcctgccgccgctccgcctgccggagaagctgtcggccagggcgctgcggacgcacctcttcaccaactaccggatgcgcaaggtgcgggacagctccagctggctcatcccgctctgggtcctcttctgggtgctcctcgcctccgtcatctgcctctggatgagcaaccaggccgtcgccaagcgccgggagtcgctcgccagcatgtgcgacgagcgcgcgcgcatgctccaggaccagttcaacgtcagcgtgaaccacctccaggcgctcgctatcctcgtctccaccttccaccactccaagacaccctccgccatcgaccagaccacgttcgcaaggtacgcggagaggacggcgttcgagcggccgctcacgagcggggtcgcgtacggggtgcgggtcacgcacgccgagcgggagcagttcgagcgccagcagggatggagcatcaagaagatgtactcctccaagaccaagaagcagtcgcagggaccagggaacgctgaggacgccgaggtgcgggagccggcggaggagtatgctcccgtaatcttcgcgcaggacgcatacaagcatgtcatctccttcgacttgctatccggcgccgatgaccgcgacaacgtactccgagctagagaatctgggaagggtgttcttactgctccttttaagctgctcaataatcgccttggagtgatctccacctacgctgtgtacaagtatgagcttcccccaaatgccaggccacaggagcgcattcaggctgctataggctacttaggtggcatatttgacattgaagcgcttgttgacaagttgcttcaccagctcgcgggcaagcaatccatcatggtgaacgtttacgatactactaatgatagacggatcagtatgtatggttcgaatgatacaggcagtggcatgtgccaagtcagcacactgaactttggtgacccgtcaaggaagcatgaaatgcactgcaggttcattcagagtccaccttggccttggatggcaataacgacatcaattggaactcttgtgattgctttactgattggatacataatttatgctactgcaaaacggattgccagagttgaagatgactttcaggagatgagtgtgctcaaaaagcgtgcagaggatgcagatattgccaagtcacagttcttggctactgtttctcatgagatcagaactccaatgaatggtgttctaggtgaggttctagtccatctaaactgtacaataatcttaattgttaattagagtgaaaggagatatgatgtttccgattttgcagggatgctccaaatgctcatggatactgatttggacacaacacaacaagactatgttagaaccgcacaagccagtggcaaagctttggtatctctcatcaatgaagtacttgatcaggccaagatcgagtctggtaaacttgagcttgaagcggtgccctttgaccttagaacagtttgtgatgacattttgtctctcttctgtgggaaagctcaggagaaaggactggagctggcagtgtttgtttctgaccaagttccacaagcactaattggcgatcctggcagaataaggcaaatcattacaaatcttgtcgggaactctataaaattcacagagaagggtcatatctacttgacagttcatgttgttgaagagattatgaattgtcttgaggttgagacgggaactcagtccgccaataccttaagtggctacccagtggcgaacagaaagcgcagttgggaaaactttcgagtctttagcagggaactgaactcatctgagatgccttttgcacccatcgcatcagactcaataagcttgataatatcagttgaagatacgggtgttggaatcccgttcgatgctcagtcccgtgtcttcacccctttcatgcaagtaggtccatccattgctcgcatccatgggggcactggcattggattaagcatcagcaaatgcttggttggactcatgaggggagagattggatttgcaagtaaaccccaagttggttctactttcaccttcactgcggttcttacgagggcccattccagcagaaatgagaataaatcgtcagaatttaaagggatcaatgcattggtggtagatcataggccggtccgtgccaaggttactaggtaccatttacagagactgggagttcagaccgaattgacaactgacctagatcaatatatttctaaaattaattgcggatcacaaattgcaaagcttgtgctcattgacaaagaaacctggctgaaggaatcccactctatgcctcttttggttactaaattgaggaacaaagatcagccagactctacaaagttatttcttttggagaaccctaaaagtactgccaaaagcaattcacatatattcagggaatttaacttgaatgtaattatgaagccacttcgagcaagcatgcttcaggtttcgctacacagagcattgggtgggatagataaactgcactgcaggaatggagtacttggcaattcaacactgggcagccttcttcacaagaaacgaatcttagtggttgacgacaatattgtaaatctcaaggttgctgcaggcgctctgaagaaatatggcgcagaagtaacttgtgctgatagcgggaagaaagcaatcacgcaactgaaacctcctcacagttttgatgcttgtttcatggacatacagatgcctgaaatggatggatttgaagccacaaaaaggattagagtgatggaaagagatctaaatgagcaaatagaacgtggagaagccccaccggaatgcgcagggctccggcagtggcgaactccaatattagccatgacagcagatgttatccaggcgacgcacgaacagtgcttaaaatctgaaatggacggttatgtatccaagccattcgagggcgagcaattgtacagagaagtagctcgctttttccaaaatcaagaccaagttcagtaggtaggcttatatggaggagtgtaaagtagtggaggatatcgccaacggttcacccgtcgaggccgaaagaattttgtcaaagatctcatcttcttgaaagtggaaacgatttaggctggagatggaaccacccatgttcggatgcttggtacatctgaccaatctgcaaagctaaatgcgcaatgtcttgaaatcaacatgcacgtgcagctattcattcgacgatttgctgaggtcaaggcgtgtgaaaaaaaatcagctgcattcactaactgcaggtgccctctgccactatataatatataagactagggggagaagttttccttcccccggaaggcacggctgtacatattatattagggattggttggttgtttgtgcaggcatttttgtatgcatcatattcggcctgtatgggtcgaagctgtaaagtgtaaatgacacattcaaagatggaagttttgtttgacaaaaaaaaaaaacatcagtcgccatcagcttgtcgtcctgagttcctctcctgctattggctctctcgaccagccaattggcatactgagaactccctgttggtgtggctttatctcatgtcttctgcctgatgtcacggagcttgtttaaggtgtgtggcctggagcatgttacgacggtacctaactgccggcatatgttaatcgccgcaaatggtccaaagtgtgatgacacttgattgctgctgtttaaactaatgccag

SEQ ID NO: 74492 - DNA, 4507 bp, Zea Mays
cttcctccgtccgcccgtcccccaatccctccgctcctctctaccagccgagaccgagagagagcgcccgaccctaccacagctgctgcctgctgctgctctgttctgctctcccccttttccaccgtttctctctcttctcacctcacctgtttggccgcttttctccactcccctcttccaatcagaccaatctccccgtctccctaaacacgaataccatccctctgctccggtgttccggctctcccacgcaccccaccccaccccactagtttttgcttcctgttcacttgtgcctgctctcgctcgctgttggcctgttgctgttgctattcccgtcccgtgcttcccttcctctcactggtcgtctagtatcctctctcccacctgccgctgccgccgccgccgccgccgccgccctgctcccacctgccgtcctctggtcaaagccagcggctcccgagatttgccgctgcttccttgcttgaggaatcaagcctgagcggtgagagatcaagagggagggacggagcgagagacgcaagaggaaagggagccagcccctcgcgcccggcattcaattggagccaacagtaggcgggtggggcggctgctacagcacgtcggactccataaattagctccccgctttccggcccccttttcgccccgtgtctcccccgatcggcccgtcgacgacgcggacgcccgccggagcatgcgcgccgcgggcctcggccgccgcagcgccgccgccggcgtccggaagatgtagctccgcgacccgcgaggagagggcgagggggatgaccgttacggcgcgcgggaggagcggcggggccgggatggaggagaagggcgacgcgcccgggctcggcttcctgggcctcgaccggatgcgcgtcctcctgccgccgctccgcctgccggagaagctgtcggccagggcgctgcggacgcacctcttcaccaactaccggatgcgcaaggtgcgggacagctccagctggctcatcccgctctgggtcctcttctgggtgctcctcgcctccgtcatctgcctctggatgagcaaccaggccgtcgccaagcgccgggagtcgctcgccagcatgtgcgacgagcgcgcgcgcatgctccaggaccagttcaacgtcagcgtgaaccacctccaggcgctcgctatcctcgtctccaccttccaccactccaagacaccctccgccatcgaccagaccaagaagcagtcgcagggaccagggaacgctgaggacgccgaggtgcgggagccggcggaggagtatgctcccgtaatcttcgcgcaggacgcatacaagcatgtcatctccttcgacttgctatccggcgccgatgaccgcgacaacgtactccgagctagagaatctgggaagggtgttcttactgctccttttaagctgctcaataatcgccttggagtgatctccacctacgctgtgtacaagtatgagcttcccccaaatgccaggccacaggagcgcattcaggctgctataggctacttaggtggcatatttgacattgaagcgcttgttgacaagttgcttcaccagctcgcgggcaagcaatccatcatggtgaacgtttacgatactactaatgatagacggatcagtatgtatggttcgaatgatacaggcagtggcatgtgccaagtcagcacactgaactttggtgacccgtcaaggaagcatgaaatgcactgcaggttcattcagagtccaccttggccttggatggcaataacgacatcaattggaactcttgtgattgctttactgattggatacataatttatgctactgcaaaacggattgccagagttgaagatgactttcaggagatgagtgtgctcaaaaagcgtgcagaggatgcagatattgccaagtcacagttcttggctactgtttctcatgagatcagaactccaatgaatggtgttctaggtgaggttctagtccatctaaactgtacaataatcttaattgttaattagagtgaaaggagatatgatgtttccgattttgcagggatgctccaaatgctcatggatactgatttggacacaacacaacaagactatgttagaaccgcacaagccagtggcaaagctttggtatctctcatcaatgaagtacttgatcaggccaagatcgagtctggtaaacttgagcttgaagcggtgccctttgaccttagaacagtttgtgatgacattttgtctctcttctgtgggaaagctcaggagaaaggactggagctggcagtgtttgtttctgaccaagttccacaagcactaattggcgatcctggcagaataaggcaaatcattacaaatcttgtcgggaactctataaaattcacagagaagggtcatatctacttgacagttcatgttgttgaagagattatgaattgtcttgaggttgagacgggaactcagtccgccaataccttaagtggctacccagtggcgaacagaaagcgcagttgggaaaactttcgagtctttagcagggaactgaactcatctgagatgccttttgcacccatcgcatcagactcaataagcttgataatatcagttgaagatacgggtgttggaatcccgttcgatgctcagtcccgtgtcttcacccctttcatgcaagtaggtccatccattgctcgcatccatgggggcactggcattggattaagcatcagcaaatgcttggttggactcatgaggggagagattggatttgcaagtaaaccccaagttggttctactttcaccttcactgcggttcttacgagggcccattccagcagaaatgagaataaatcgtcagaatttaaagggatcaatgcattggtggtagatcataggccggtccgtgccaaggttactaggtaccatttacagagactgggagttcagaccgaattgacaactgacctagatcaatatatttctaaaattaattgcggatcacaaattgcaaagcttgtgctcattgacaaagaaacctggctgaaggaatcccactctatgcctcttttggttactaaattgaggaacaaagatcagccagactctacaaagttatttcttttggagaaccctaaaagtactgccaaaagcaattcacatatattcagggaatttaacttgaatgtaattatgaagccacttcgagcaagcatgcttcaggtttcgctacacagagcattgggtgggatagataaactgcactgcaggaatggagtacttggcaattcaacactgggcagccttcttcacaagaaacgaatcttagtggttgacgacaatattgtaaatctcaaggttgctgcaggcgctctgaagaaatatggcgcagaagtaacttgtgctgatagcgggaagaaagcaatcacgcaactgaaacctcctcacagttttgatgcttgtttcatggacatacagatgcctgaaatggatggatttgaagccacaaaaaggattagagtgatggaaagagatctaaatgagcaaatagaacgtggagaagccccaccggaatgcgcagggctccggcagtggcgaactccaatattagccatgacagcagatgttatccaggcgacgcacgaacagtgcttaaaatctgaaatggacggttatgtatccaagccattcgagggcgagcaattgtacagagaagtagctcgctttttccaaaatcaagaccaagttcagtaggtaggcttatatggaggagtgtaaagtagtggaggatatcgccaacggttcacccgtcgaggccgaaagaattttgtcaaagatctcatcttcttgaaagtggaaacgatttaggctggagatggaaccacccatgttcggatgcttggtacatctgaccaatctgcaaagctaaatgcgcaatgtcttgaaatcaacatgcacgtgcagctattcattcgacgatttgctgaggtcaaggcgtgtgaaaaaaaatcagctgcattcactaactgcaggtgccctctgccactatataatatataagactagggggagaagttttccttcccccggaaggcacggctgtacatattatattagggattggttggttgtttgtgcaggcatttttgtatgcatcatattcggcctgtatgggtcgaagctgtaaagtgtaaatgacacattcaaagatggaagttttgtttgacaaaaaaaaaaaacatcagtcgccatcagcttgtcgtcctgagttcctctcctgctattggctctctcgaccagccaattggcatactgagaactccctgttggtgtggctttatctcatgtcttctgcctgatgtcacggagcttgtttaaggtgtgtggcctggagcatgttacgacggtacctaactgccggcatatgttaatcgccgcaaatggtccaaagtgtgatgacacttgattgctgctgtttaaactaatgccag

SEQ ID NO: 74493 - DNA, 4687 bp, Zea Mays
cgcccgtcccccaatccctccgctcctctctaccagccgagaccgagagagagcgcccgaccctaccacagctgctgcctgctgctgctctgttctgctctcccccttttccaccgtttctctctcttctcacctcacctgtttggccgcttttctccactcccctcttccaatcagaccaatctccccgtctccctaaacacgaataccatccctctgctccggtgttccggctctcccacgcaccccaccccaccccactagtttttgcttcctgttcacttgtgcctgctctcgctcgctgttggcctgttgctgttgctattcccgtcccgtgcttcccttcctctcactggtcgtctagtatcctctctcccacctgccgctgccgccgccgccgccgccgccgccctgctcccacctgccgtcctctggtcaaagccagcggctcccgagatttgccgctgcttccttgcttgaggaatcaagcctgagcggtgagagatcaagagggagggacggagcgagagacgcaagaggaaagggagccagcccctcgcgcccggcattcaattggagccaacagtaggcgggtggggcggctgctacagcacgtcggactccataaattagctccccgctttccggcccccttttcgccccgtgtctcccccgatcggcccgtcgacgacgcggacgcccgccggagcatgcgcgccgcgggcctcggccgccgcagcgccgccgccggcgtccggaagatgtagctccgcgacccgcgaggagagggcgagggggatgaccgttacggcgcgcgggaggagcggcggggccgggatggaggagaagggcgacgcgcccgggctcggcttcctgggcctcgaccggatgcgcgtcctcctgccgccgctccgcctgccggagaagctgtcggccagggcgctgcggacgcacctcttcaccaactaccggatgcgcaaggtgcgggacagctccagctggctcatcccgctctgggtcctcttctgggtgctcctcgcctccgtcatctgcctctggatgagcaaccaggccgtcgccaagcgccgggagtcgctcgccagcatgtgcgacgagcgcgcgcgcatgctccaggaccagttcaacgtcagcgtgaaccacctccaggcgctcgctatcctcgtctccaccttccaccactccaagacaccctccgccatcgaccagaccacgttcgcaaggtacgcggagaggacggcgttcgagcggccgctcacgagcggggtcgcgtacggggtgcgggtcacgcacgccgagcgggagcagttcgagcgccagcagggatggagcatcaagaagatgtactcctccaagaccaagaagcagtcgcagggaccagggaacgctgaggacgccgaggtgcgggagccggcggaggagtatgctcccgtaatcttcgcgcaggacgcatacaagcatgtcatctccttcgacttgctatccggcgccgatgaccgcgacaacgtactccgagctagagaatctgggaagggtgttcttactgctccttttaagctgctcaataatcgccttggagtgatctccacctacgctgtgtacaagtatgagcttcccccaaatgccaggccacaggagcgcattcaggctgctataggctcgcgggcaagcaatccatcatggtgaacgtttacgatactactaatgatagacggatcagtatgtatggttcgaatgatacaggcagtggcatgtgccaagtcagcacactgaactttggtgacccgtcaaggaagcatgaaatgcactgcaggttcattcagagtccaccttggccttggatggcaataacgacatcaattggaactcttgtgattgctttactgattggatacataatttatgctactgcaaaacggattgccagagttgaagatgactttcaggagatgagtgtgctcaaaaagcgtgcagaggatgcagatattgccaagtcacagttcttggctactgtttctcatgagatcagaactccaatgaatggtgttctagggatgctccaaatgctcatggatactgatttggacacaacacaacaagactatgttagaaccgcacaagccagtggcaaagctttggtatctctcatcaatgaagtacttgatcaggccaagatcgagtctggtaaacttgagcttgaagcggtgccctttgaccttagaacagtttgtgatgacattttgtctctcttctgtgggaaagctcaggagaaaggactggagctggcagtgtttgtttctgaccaagttccacaagcactaattggcgatcctggcagaataaggcaaatcattacaaatcttgtcgggaactctataaaagtaagacgatcactatatatcgatagcaggaaataggataatcccttgtatatttatatgcatatatgcatttgttctttgttggctaagagttctgtatttttccacagttcacagagaagggtcatatctacttgacagttcatgttgttgaagagattatgaattgtcttgaggttgagacgggaactcagtccgccaataccttaagtggctacccagtggcgaacagaaagcgcagttgggaaaactttcgagtctttagcagggaactgaactcatctgagatgccttttgcacccatcgcatcagactcaataagcttgataatatcagttgaagatacgggtgttggaatcccgttcgatgctcagtcccgtgtcttcacccctttcatgcaagtaggtccatccattgctcgcatccatgggggcactggcattggattaagcatcagcaaatgcttggttggactcatgaggggagagattggatttgcaagtaaaccccaagttggttctactttcaccttcactgcggttcttacgagggcccattccagcagaaatgagaataaatcgtcagaatttaaagggatcaatgcattggtggtagatcataggccggtccgtgccaaggttactaggtaccatttacagagactgggagttcagaccgaattgacaactgacctagatcaatatatttctaaaattaattgcggatcacaaattgcaaagcttgtgctcattgacaaagaaacctggctgaaggaatcccactctatgcctcttttggttactaaattgaggaacaaagatcagccagactctacaaagttatttcttttggagaaccctaaaagtactgccaaaagcaattcacatatattcagggaatttaacttgaatgtaattatgaagccacttcgagcaagcatgcttcaggtttcgctacacagagcattgggtgggatagataaactgcactgcaggaatggagtacttggcaattcaacactgggcagccttcttcacaagaaacgaatcttagtggttgacgacaatattgtaaatctcaaggttgctgcaggcgctctgaagaaatatggcgcagaagtaacttgtgctgatagcgggaagaaagcaatcacgcaactgaaacctcctcacagttttgatgcttgtttcatggacatacagatgcctgaaatggatggatttgaagccacaaaaaggattagagtgatggaaagagatctaaatgagcaaatagaacgtggagaagccccaccggaatgcgcagggctccggcagtggcgaactccaatattagccatgacagcagatgttatccaggcgacgcacgaacagtgcttaaaatctgaaatggacggttatgtatccaagccattcgagggcgagcaattgtacagagaagtagctcgctttttccaaaatcaagaccaagttcagtaggtaggcttatatggaggagtgtaaagtagtggaggatatcgccaacggttcacccgtcgaggccgaaagaattttgtcaaagatctcatcttcttgaaagtgggcatcaattcgcaaagttagagggcccctattaaaacactagaaatgctgggatgtggccgccagttaggtggaaacgatttaggctggagatggaaccacccatgttcggatgcttggtacatctgaccaatctgcaaagctaaatgcgcaatgtcttgaaatcaacatgcacgtgcagctattcattcgacgatttgctgaggtcaaggcgtgtgaaaaaaaatcagctgcattcactaactgcaggtgccctctgccactatataatatataagactagggggagaagttttccttcccccggaaggcacggctgtacatattatattagggattggttggttgtttgtgcaggcatttttgtatgcatcatattcggcctgtatgggtcgaagctgtaaagtgtaaatgacacattcaaagatggaagttttgtttgacaaaaaaaaaaaacatcagtcgccatcagcttgtcgtcctgagttcctctcctgctattggctctctcgaccagccaattggcatactgagaactccctgttggtgtggctttatctcatgtcttctgcctgatgtcacggagcttgtttaaggtgtgtggcctggagcatgttacgacggtacctaactgccggcatatgttaatcgccgcaaatggtccaaagtgtgatgacacttgattgctgctgtttaaactaatgccag

SEQ ID NO: 74494 - DNA, 805 bp, Zea Mays
ccccccccccccccccccccccaaaaaaaaaaagcgaggttgattgcaagcaaacggtttggaggacgggagacagagagatcacagcggcagcatgcaattaagaatccaagaacagcagacgctaggggggttgtggggaggcaacgtggatgctcacacagtgagcagagctgctaggccaggcgcggccgggcggctgcagcgagcggtggcttgagctttataacgggcggaggagtggaggacacggatggatggatggatacaggaagcaaggagcaaccccgcgggtggggtccgagaaaaggcgggcggcgaaggaagaggaagagaaggcagcagggtaagtggtggttggagacagcacaggaagaggacgatggcggaggtgggggacaatttactgacaataattgccgggaggcgagctgctgtccactgctcactcgactcctttgttgtacctagcgatggcagtaaacatatatacggtgtgcgtgcgtgatgcctggtcggggatgcatggtagggcggagggagaaggaactcggagagacagcaagcggatggaatggatggacgtgggcgtcgcaaaagattcagacagggaagggggatagaaaaggaaggccgaaggagaagcagcagctaccactctcgtcgtcggcgacgaagcagcagctagcaagaggagggagaggacggatcggctgaggcacctcttcgccttcggtggggtgctgcctttcgtttccgttgctttgcttgctccctcagcagcctaggactaggagtttcttgc

SEQ ID NO: 74495 - DNA, 2960 bp, Zea Mays
cccccttgaagcctctcgatttgaaatcccacacctcaaaactgaaaaaaagggaaaaaaggtgctctcgatctagggaatagggatccccttcccggcttctagttcccctcctcgtccaaaaccctaggccagcctagcggcggagcccgcgcgcccgcctccaggaccatggccgaagaccacttctcctccgcgccgtccgccccgtcggcagcggcgacagcggcggcggcggccgccgcggcggtcgggtcctcggtgatcccgatcgtcaacaagctgcaggatatcttcgcgcagctggggagcagctccacgatcgacctgccgcaggttgccgtggtcgggagccagagcagcggcaagtccagcgtgctcgaggcgctcgtcggccgcgactttctcccgcggggctcggacatttgcacgcgccgccccctcgtgctgcagctcgtgcaccagccgcgccgacccgccgacgccgaggccgatgagtggggcgagttcctccacctatcggggcgtcgcttctacgatttccgcgaaattcgacgcgagatccaggcagaaacagaccgagaggcaggtggtaacaaagttggtgaccagccaactgatattgaagctagaatacggactatgataatgtcatacatcaagcacaagacatgtatcatcttagctgtatcgccagcaaatgcagatttagcaaactctgacgctcttcaaatggctcgggttgctgatcctgatggttctcgaacaattggtgttatcacaaagttggatataatggacaggggcactgatgcccggaactttctgctgggaaatgtgatccccttaaaacttggctatgttggtgttgttaaccgcagccagcaggatatcaactctgacctcagtatcaaggatgctctggctcgtgaagaaaaattcttccgtactcagccggcatatcatggtcttgcacagtactgtgggataccacaattagcaaagaagctaaatcagattctggtccaacatataaaaacagttctgccagggcttaagtcacgcataagcagtcaattgactgctgttgccaaggagcttgctgtgtatggtgaccctgttgattcaaaggctggtcaaggtgctaagcttttgaacatactagctaaatactgtgaagctttttcgtcaatggtggaaggaaaaaatgaagatatatcgacaactgaactttctggtggagcgaggatccattacattttccagtctatctttgtcaaaagtttagaggaggttgatccttgcgaggatgttacagacgtagatatccgcatggctattcaaaatgcaactggtcctagaagtgctctgtttgtacctgaagttccatttgaagtccttgtacgtaggcagatcagcagattgcttgatccaagtcttcagtgtgcacagttcatatatgatgaacttgtaaagatgagccatcgctgccttgcaacggagttgcagcagtttcctatactccgcagaagcatggatgaagtcattgggaagtttttgcgggatggacttaagccagcagaaagtatgatatcacacattattgagatggaggaagattacataaacacatcgcacccaagttttattggtggcagcaaggctgttgaggaagcacagcagcaagttaggtctgccaaaacgtctgcagtggtagtaagaaaggatggagtggattcacaggtttctgagaaaactcaaaaatcacgcccgatattgggtagaagtggtgtaaatggagtagttactgaccacatccagggggtacggcctgctgctgaggcagagagaccaggatcttctggtagtggaagcacatctttctggaatcaaatatttacttccaatgaggatcgaacacatgctcctgcaagagataacacagcaaacaaatcttatgctatgcctgcccctaatctggatcattcattctccactatacagttaagagagccaccagtcgtcctgaagccttcagaacaccagtctgagcaggaggcacttgaaatagcaattacaaagttgctattgaagtcatattacaatattgtcaggaaaaatgtggaggacttcataccaaaagcaattatgcatttcctggttaatcacacaaaaagggcactgcataattacctcataacaaaactttatagagatgatcttttggaagacttgctcaaagaacctgatgagctaaccataaagaggaagcagatacgtgaaaatcttaaggtccttcaacaagcttacaaaactttggatgagataccacttgacgcagaggcagtagagaggggtggtggatactccctcgattctgatgcgattggtctaccaagggctcatgggctttcttcatccctccacggattcaatgatggaagctcatcatattcaaccccgaagcagtcaaggtcaaggaggccaaaccattctggcgagcaacttcctttcaaccccgcaacgagtggcaatggtttttgatgccaccctacacgatggccacccagattggttatggaaccaaccattgcagcaagcacaccttactctgctccaagtttgttggcacccgtagatatatgttatttctagttaaattctttgcagcgttgcgctgatgaagcctggcatggtgcgagttttgtcatttcgccttttgtacagtatatatctttgcccagtcatttcgtcttgaaatggtatcaagtgataggtatactttttcttcggacccagggaaagcaatggaaaaagttatactaggtgcagcacccagcgtctgagtgacttgccacggatttgccttgcaaaatagacatggcaaaaacttggtctagctgagaaagtttctgtaattaccctgtgtcatattggtcacttgattggttcggacgatg

SEQ ID NO: 74496 - DNA, 3084 bp, Zea Mays
ctcgatttgaaatcccacacctcaaaactgaaaaaaagggaaaaaaggtgctctcgatctagggaatagggatccccttcccggcttctagttcccctcctcgtccaaaaccctaggccagcctagcggcggagcccgcgcgcccgcctccaggaccatggccgaagaccacttctcctccgcgccgtccgccccgtcggcagcggcgacagcggcggcggcggccgccgcggcggtcgggtcctcggtgatcccgatcgtcaacaagctgcaggatatcttcgcgcagctggggagcagctccacgatcgacctgccgcaggttgccgtggtcgggagccagagcagcggcaagtccagcgtgctcgaggcgctcgtcggccgcgactttctcccgcggggctcggacatttgcacgcgccgccccctcgtgctgcagctcgtgcaccagccgcgccgacccgccgacgccgaggccgatgagtggggcgagttcctccacctatcggggcgtcgcttctacgatttccgcgaaattcgacgcgagatccagaaacagaccgagaggcaggtggtaacaaaggtgtatcggataggcagatacgattgaagattttttctccaaatgttcttaacattactttggttgatttgcctggaattactaaggtgccagttggtgaccagccaactgatattgaagctagaatacggactatgataatgtcatacatcaagcacaagacatgtatcatcttagctgtatcgccagcaaatgcagatttagcaaactctgacgctcttcaaatggctcgggttgctgatcctgatggttctcgaacaattggtgttatcacaaagttggatataatggacaggggcactgatgcccggaactttctgctgggaaatgtgatccccttaaaacttggctatgttggtgttgttaaccgcagccagcaggatatcaactctgacctcagtatcaaggatgctctggctcgtgaagaaaaattcttccgtactcagccggcatatcatggtcttgcacagtactgtgggataccacaattagcaaagaagctaaatcagattctggtccaacatataaaaacagttctgccagggcttaagtcacgcataagcagtcaattgactgctgttgccaaggagcttgctgtgtatggtgaccctgttgattcaaaggctggtcaaggtgctaagcttttgaacatactagctaaatactgtgaagctttttcgtcaatggtggaaggaaaaaatgaagatatatcgacaactgaactttctggtggagcgaggatccattacattttccagtctatctttgtcaaaagtttagaggaggttgatccttgcgaggatgttacagacgtagatatccgcatggctattcaaaatgcaactggtcctagaagtgctctgtttgtacctgaagttccatttgaagtccttgtacgtaggcagatcagcagattgcttgatccaagtcttcagtgtgcacagttcatatatgatgaacttgtaaagatgagccatcgctgccttgcaacggagttgcagcagtttcctatactccgcagaagcatggatgaagtcattgggaagtttttgcgggatggacttaagccagcagaaagtatgatatcacacattattgagatggaggaagattacataaacacatcgcacccaagttttattggtggcagcaaggctgttgaggaagcacagcagcaagttaggtctgccaaaacgtctgcagtggtagtaagaaaggatggagtggattcacaggtttctgagaaaactcaaaaatcacgcccgatattgggtagaagtggtgtaaatggagtagttactgaccacatccagggggtacggcctgctgctgaggcagagagaccaggatcttctggtagtggaagcacatctttctggaatcaaatatttacttccaatgaggatcgaacacatgctcctgcaagagataacacagcaaacaaatcttatgctatgcctgcccctaatctggatcattcattctccactatacagttaagagagccaccagtcgtcctgaagccttcagaacaccagtctgagcaggaggcacttgaaatagcaattacaaagttgctattgaagtcatattacaatattgtcaggaaaaatgtggaggacttcataccaaaagcaattatgcatttcctggttaatcacacaaaaagggcactgcataattacctcataacaaaactttatagagatgatcttttggaagacttgctcaaagaacctgatgagctaaccataaagaggaagcagatacgtgaaaatcttaaggtccttcaacaagcttacaaaactttggatgagataccacttgacgcagaggcagtagagaggggtggtggatactccctcgattctgatgcgattggtctaccaagggctcatgggctttcttcatccctccacggattcaatgatggaagctcatcatattcaaccccgaagcagtcaaggtcaaggaggccaaaccattctggcgagcaacttcctttcaaccccgcaacgagtggcaatggtttttgatgccaccctacacgatggccacccagattggttatggaaccaaccattgcagcaagcacaccttactctgctccaagtttgttggcacccgtagatatatgttatttctagttaaattctttgcagcgttgcgctgatgaagcctggcatggtgcgagttttgtcatttcgccttttgtacagtatatatctttgcccagtcatttcgtcttgaaatggtatcaagtgataggtatactttttcttcggacccagggaaagcaatggaaaaagttatactaggtgcagcacccagcgtctgagtgacttgccacggatttgccttgcaaaatagacatggttggtattgtggtggcaataaaatgtggcatgaaatagtttccgtttcgttaatgttttgtcttgatttaatacgcctttgttaatagttgtgcatttgtacatcagcattaataactgtgggat

SEQ ID NO: 74497 - DNA, 3007 bp, Zea Mays
atttgaaatcccacacctcaaaactgaaaaaaagggaaaaaaggtgctctcgatctagggaatagggatccccttcccggcttctagttcccctcctcgtccaaaaccctaggccagcctagcggcggagcccgcgcgcccgcctccaggaccatggccgaagaccacttctcctccgcgccgtccgccccgtcggcagcggcgacagcggcggcggcggccgccgcggcggtcgggtcctcggtgatcccgatcgtcaacaagctgcaggatatcttcgcgcagctggggagcagctccacgatcgacctgccgcaggttgccgtggtcgggagccagagcagcggcaagtccagcgtgctcgaggcgctcgtcggccgcgactttctcccgcggggctcggacatttgcacgcgccgccccctcgtgctgcagctcgtgcaccagccgcgccgacccgccgacgccgaggccgatgagtggggcgagttcctccacctatcggggcgtcgcttctacgatttccgcgaaattcgacgcgagatccaggcagaaacagaccgagaggcaggtggtaacaaaggtgtatcggataggcagatacgattgaagattttttctccaaatgttcttaacattactttggttgatttgcctggaattactaaggtgccagttggtgaccagccaactgatattgaagctagaatacggactatgataatgtcatacatcaagcacaagacatgtatcatcttagctgtatcgccagcaaatgcagatttagcaaactctgacgctcttcaaatggctcgggttgctgatcctgatggttctcgaacaattggtgttatcacaaagttggatataatggacaggggcactgatgcccggaactttctgctgggaaatgtgatccccttaaaacttggctatgttggtgttgttaaccgcagccagcaggatatcaactctgacctcagtatcaaggatgctctggctcgtgaagaaaaattcttccgtactcagccggcatatcatggtcttgcacagtactgtgggataccacaattagcaaagaagctaaatcagattctggtccaacatataaaaacagttctgccagggcttaagtcacgcataagcagtcaattgactgctgttgccaaggagcttgctgtgtatggtgaccctgttgattcaaaggctggtcaaggtgctaagcttttgaacatactagctaaatactgtgaagctttttcgtcaatggtggaaggaaaaaatgaagatatatcgacaactgaactttctggtggagcgaggatccattacattttccagtctatctttgtcaaaagtttagagacgtagatatccgcatggctattcaaaatgcaactggtcctagaagtgctctgtttgtacctgaagttccatttgaagtccttgtacgtaggcagatcagcagattgcttgatccaagtcttcagtgtgcacagttcatatatgatgaacttgtaaagatgagccatcgctgccttgcaacggagttgcagcagtttcctatactccgcagaagcatggatgaagtcattgggaagtttttgcgggatggacttaagccagcagaaagtatgatatcacacattattgagatggaggaagattacataaacacatcgcacccaagttttattggtggcagcaaggctgttgaggaagcacagcagcaagttaggtctgccaaaacgtctgcagtggtagtaagaaaggatggagtggattcacaggtttctgagaaaactcaaaaatcacgcccgatattgggtagaagtggtgtaaatggagtagttactgaccacatccagggggtacggcctgctgctgaggcagagagaccaggatcttctggtagtggaagcacatctttctggaatcaaatatttacttccaatgaggatcgaacacatgctcctgcaagagataacacagcaaacaaatcttatgctatgcctgcccctaatctggatcattcattctccactatacagttaagagagccaccagtcgtcctgaagccttcagaacaccagtctgagcaggaggcacttgaaatagcaattacaaagttgctattgaagtcatattacaatattgtcaggaaaaatgtggaggacttcataccaaaagcaattatgcatttcctggttaatcacacaaaaagggcactgcataattacctcataacaaaactttatagagatgatcttttggaagacttgctcaaagaacctgatgagctaaccataaagaggaagcagatacgtgaaaatcttaaggtccttcaacaagcttacaaaactttggatgagataccacttgacgcagaggcagtagagaggggtggtggatactccctcgattctgatgcgattggtctaccaagggctcatgggctttcttcatccctccacggattcaatgatggaagctcatcatattcaaccccgaagcagtcaaggtcaaggaggccaaaccattctggcgagcaacttcctttcaaccccgcaacgagtggcaatggtttttgatgccaccctacacgatggccacccagattggttatggaaccaaccattgcagcaagcacaccttactctgctccaagtttgttggcacccgtagatatatgttatttctagttaaattctttgcagcgttgcgctgatgaagcctggcatggtgcgagttttgtcatttcgccttttgtacagtatatatctttgcccagtcatttcgtcttgaaatggtatcaagtgataggtatactttttcttcggacccagggaaagcaatggaaaaagttatactaggtgcagcacccagcgtctgagtgacttgccacggatttgccttgcaaaatagacatggcaaaaacttggtctagctgagaaagtttctgtaattaccctgtgtcatattggtcacttgattggttcggacgatg

SEQ ID NO: 74498 - DNA, 3061 bp, Zea Mays
cacctcaaaactgaaaaaaagggaaaaaaggtgctctcgatctagggaatagggatccccttcccggcttctagttcccctcctcgtccaaaaccctaggccagcctagcggcggagcccgcgcgcccgcctccaggaccatggccgaagaccacttctcctccgcgccgtccgccccgtcggcagcggcgacagcggcggcggcggccgccgcggcggtcgggtcctcggtgatcccgatcgtcaacaagctgcaggatatcttcgcgcagctggggagcagctccacgatcgacctgccgcaggttgccgtggtcgggagccagagcagcggcaagtccagcgtgctcgaggcgctcgtcggccgcgactttctcccgcggggctcggacatttgcacgcgccgccccctcgtgctgcagctcgtgcaccagccgcgccgacccgccgacgccgaggccgatgagtggggcgagttcctccacctatcggggcgtcgcttctacgatttccgcgaaattcgacgcgagatccaggcagaaacagaccgagaggcaggtggtaacaaaggtgtatcggataggcagatacgattgaagattttttctccaaatgttcttaacattactttggttgatttgcctggaattactaaggtgccagttggtgaccagccaactgatattgaagctagaatacggactatgataatgtcatacatcaagcacaagacatgtatcatcttagctgtatcgccagcaaatgcagatttagcaaactctgacgctcttcaaatggctcgggttgctgatcctgatggttctcgaacaattggtgttatcacaaagttggatataatggacaggggcactgatgcccggaactttctgctgggaaatgtgatccccttaaaacttggctatgttggtgttgttaaccgcagccagcaggatatcaactctgacctcagtatcaaggatgctctggctcgtgaagaaaaattcttccgtactcagccggcatatcatggtcttgcacagtactgtgggataccacaattagcaaagaagctaaatcagattctggtccaacatataaaaacagttctgccagggcttaagtcacgcataagcagtcaattgactgctgttgccaaggagcttgctgtgtatggtgaccctgttgattcaaaggctggtcaaggtgctaagcttttgaacatactagctaaatactgtgaagctttttcgtcaatggtggaaggaaaaaatgaagatatatcgacaactgaactttctggtggagcgaggatccattacattttccagtctatctttgtcaaaagtttagaggaggttgatccttgcgaggatgttacagacgtagatatccgcatggctattcaaaatgcaactggtcctagaagtgctctgtttgtacctgaagttccatttgaagtccttgtacgtaggcagatcagcagattgcttgatccaagtcttcagtgtgcacagttcatatatgatgaacttgtaaagatgagccatcgctgccttgcaacggagttgcagcagtttcctatactccgcagaagcatggatgaagtcattgggaagtttttgcgggatggacttaagccagcagaaagtatgatatcacacattattgagatggaggaagattacataaacacatcgcacccaagttttattggtggcagcaaggctgttgaggaagcacagcagcaagttaggtctgccaaaacgtctgcagtggtagtaagaaaggatggagtggattcacaggtttctgagaaaactcaaaaatcacgcccgatattgggtagaagtggtgtaaatggagtagttactgaccacatccagggggtacggcctgctgctgaggcagagagaccaggatcttctggtagtggaagcacatctttctggaatcaaatatttacttccaatgaggatcgaacacatgctcctgcaagagataacacagcaaacaaatcttatgctatgcctgcccctaatctggatcattcattctccactatacaccaccagtcgtcctgaagccttcagaacaccagtctgagcaggaggcacttgaaatagcaattacaaagttgctattgaagtcatattacaatattgtcaggaaaaatgtggaggacttcataccaaaagcaattatgcatttcctggttaatcacacaaaaagggcactgcataattacctcataacaaaactttatagagatgatcttttggaagacttgctcaaagaacctgatgagctaaccataaagaggaagcagatacgtgaaaatcttaaggtccttcaacaagcttacaaaactttggatgagataccacttgacgcagaggcagtagagaggggtggtggatactccctcgattctgatgcgattggtctaccaagggctcatgggctttcttcatccctccacggattcaatgatggaagctcatcatattcaaccccgaagcagtcaaggtcaaggaggccaaaccattctggcgagcaacttcctttcaaccccgcaacgagtggcaatggtttttgatgccaccctacacgatggccacccagattggttatggaaccaaccattgcagcaagcacaccttactctgctccaagtttgttggcacccgtagatatatgttatttctagttaaattctttgcagcgttgcgctgatgaagcctggcatggtgcgagttttgtcatttcgccttttgtacagtatatatctttgcccagtcatttcgtcttgaaatggtatcaagtgataggtatactttttcttcggacccagggaaagcaatggaaaaagttatactaggtgcagcacccagcgtctgagtgacttgccacggatttgccttgcaaaatagacatggttggtattgtggtggcaataaaatgtggcatgaaatagtttccgtttcgttaatgttttgtcttgatttaatacgcctttgttaatagttgtgcatttgtacatcagcattaataactgtgggat

SEQ ID NO: 74499 - DNA, 3064 bp, Zea Mays
cacctcaaaactgaaaaaaagggaaaaaaggtgctctcgatctagggaatagggatccccttcccggcttctagttcccctcctcgtccaaaaccctaggccagcctagcggcggagcccgcgcgcccgcctccaggaccatggccgaagaccacttctcctccgcgccgtccgccccgtcggcagcggcgacagcggcggcggcggccgccgcggcggtcgggtcctcggtgatcccgatcgtcaacaagctgcaggatatcttcgcgcagctggggagcagctccacgatcgacctgccgcaggttgccgtggtcgggagccagagcagcggcaagtccagcgtgctcgaggcgctcgtcggccgcgactttctcccgcggggctcggacatttgcacgcgccgccccctcgtgctgcagctcgtgcaccagccgcgccgacccgccgacgccgaggccgatgagtggggcgagttcctccacctatcggggcgtcgcttctacgatttccgcgaaattcgacgcgagatccaggcagaaacagaccgagaggcaggtggtaacaaaggtgtatcggataggcagatacgattgaagattttttctccaaatgttcttaacattactttggttgatttgcctggaattactaaggtgccagttggtgaccagccaactgatattgaagctagaatacggactatgataatgtcatacatcaagcacaagacatgtatcatcttagctgtatcgccagcaaatgcagatttagcaaactctgacgctcttcaaatggctcgggttgctgatcctgatggttctcgaacaattggtgttatcacaaagttggatataatggacaggggcactgatgcccggaactttctgctgggaaatgtgatccccttaaaacttggctatgttggtgttgttaaccgcagccagcaggatatcaactctgacctcagtatcaaggatgctctggctcgtgaagaaaaattcttccgtactcagccggcatatcatggtcttgcacagtactgtgggataccacaattagcaaagaagctaaatcagattctggtccaacatataaaaacagttctgccagggcttaagtcacgcataagcagtcaattgactgctgttgccaaggagcttgctgtgtatggtgaccctgttgattcaaaggctggtcaaggtgctaagcttttgaacatactagctaaatactgtgaagctttttcgtcaatggtggaaggaaaaaatgaagatatatcgacaactgaactttctggtggagcgaggatccattacattttccagtctatctttgtcaaaagtttagaggaggttgatccttgcgaggatgttacagacgtagatatccgcatggctattcaaaatgcaactggtcctagaagtgctctgtttgtacctgaagttccatttgaagtccttgtacgtaggcagatcagcagattgcttgatccaagtcttcagtgtgcacagttcatatatgatgaacttgtaaagatgagccatcgctgccttgcaacggagttgcagcagtttcctatactccgcagaagcatggatgaagtcattgggaagtttttgcgggatggacttaagccagcagaaagtatgatatcacacattattgagatggaggaagattacataaacacatcgcacccaagttttattggtggcagcaaggctgttgaggaagcacagcagcaagttaggtctgccaaaacgtctgcagtggtagtaagaaaggatggagtggattcacaggtttctgagaaaactcaaaaatcacgcccgatattgggtagaagtggtgtaaatggagtagttactgaccacatccagggggtacggcctgctgctgaggcagagagaccaggatcttctggtagtggaagcacatctttctggaatcaaatatttacttccaatgaggatcgaacacatgctcctgcaagagataacacagcaaacaaatcttatgctatgcctgcccctaatctggatcattcattctccactatacagttaagagagtcgtcctgaagccttcagaacaccagtctgagcaggaggcacttgaaatagcaattacaaagttgctattgaagtcatattacaatattgtcaggaaaaatgtggaggacttcataccaaaagcaattatgcatttcctggttaatcacacaaaaagggcactgcataattacctcataacaaaactttatagagatgatcttttggaagacttgctcaaagaacctgatgagctaaccataaagaggaagcagatacgtgaaaatcttaaggtccttcaacaagcttacaaaactttggatgagataccacttgacgcagaggcagtagagaggggtggtggatactccctcgattctgatgcgattggtctaccaagggctcatgggctttcttcatccctccacggattcaatgatggaagctcatcatattcaaccccgaagcagtcaaggtcaaggaggccaaaccattctggcgagcaacttcctttcaaccccgcaacgagtggcaatggtttttgatgccaccctacacgatggccacccagattggttatggaaccaaccattgcagcaagcacaccttactctgctccaagtttgttggcacccgtagatatatgttatttctagttaaattctttgcagcgttgcgctgatgaagcctggcatggtgcgagttttgtcatttcgccttttgtacagtatatatctttgcccagtcatttcgtcttgaaatggtatcaagtgataggtatactttttcttcggacccagggaaagcaatggaaaaagttatactaggtgcagcacccagcgtctgagtgacttgccacggatttgccttgcaaaatagacatggttggtattgtggtggcaataaaatgtggcatgaaatagtttccgtttcgttaatgttttgtcttgatttaatacgcctttgttaatagttgtgcatttgtacatcagcattaataactgtgggat

SEQ ID NO: 74500 - DNA, 3058 bp, Zea Mays
cacctcaaaactgaaaaaaagggaaaaaaggtgctctcgatctagggaatagggatccccttcccggcttctagttcccctcctcgtccaaaaccctaggccagcctagcggcggagcccgcgcgcccgcctccaggaccatggccgaagaccacttctcctccgcgccgtccgccccgtcggcagcggcgacagcggcggcggcggccgccgcggcggtcgggtcctcggtgatcccgatcgtcaacaagctgcaggatatcttcgcgcagctggggagcagctccacgatcgacctgccgcaggttgccgtggtcgggagccagagcagcggcaagtccagcgtgctcgaggcgctcgtcggccgcgactttctcccgcggggctcggacatttgcacgcgccgccccctcgtgctgcagctcgtgcaccagccgcgccgacccgccgacgccgaggccgatgagtggggcgagttcctccacctatcggggcgtcgcttctacgatttccgcgaaattcgacgcgagatccaggcagaaacagaccgagaggcaggtggtaacaaaggtgtatcggataggcagatacgattgaagattttttctccaaatgttcttaacattactttggttgatttgcctggaattactaaggtgccagttggtgaccagccaactgatattgaagctagaatacggactatgataatgtcatacatcaagcacaagacatgtatcatcttagctgtatcgccagcaaatgcagatttagcaaactctgacgctcttcaaatggctcgggttgctgatcctgatggttctcgaacaattggtgttatcacaaagttggatataatggacaggggcactgatgcccggaactttctgctgggaaatgtgatccccttaaaacttggctatgttggtgttgttaaccgcagccagcaggatatcaactctgacctcagtatcaaggatgctctggctcgtgaagaaaaattcttccgtactcagccggcatatcatggtcttgcacagtactgtgggataccacaattagcaaagaagctaaatcagattctggtccaacatataaaaacagttctgccagggcttaagtcacgcataagcagtcaattgactgctgttgccaaggagcttgctgtgtatggtgaccctgttgattcaaaggctggtcaaggtgctaagcttttgaacatactagctaaatactgtgaagctttttcgtcaatggtggaaggaaaaaatgaagatatatcgacaactgaactttctggtggagcgaggatccattacattttccagtctatctttgtcaaaagtttagaggaggttgatccttgcgaggatgttacagacgtagatatccgcatggctattcaaaatgcaactggtcctagaagtgctctgtttgtacctgaatccttgtacgtaggcagatcagcagattgcttgatccaagtcttcagtgtgcacagttcatatatgatgaacttgtaaagatgagccatcgctgccttgcaacggagttgcagcagtttcctatactccgcagaagcatggatgaagtcattgggaagtttttgcgggatggacttaagccagcagaaagtatgatatcacacattattgagatggaggaagattacataaacacatcgcacccaagttttattggtggcagcaaggctgttgaggaagcacagcagcaagttaggtctgccaaaacgtctgcagtggtagtaagaaaggatggagtggattcacaggtttctgagaaaactcaaaaatcacgcccgatattgggtagaagtggtgtaaatggagtagttactgaccacatccagggggtacggcctgctgctgaggcagagagaccaggatcttctggtagtggaagcacatctttctggaatcaaatatttacttccaatgaggatcgaacacatgctcctgcaagagataacacagcaaacaaatcttatgctatgcctgcccctaatctggatcattcattctccactatacagttaagagagccaccagtcgtcctgaagccttcagaacaccagtctgagcaggaggcacttgaaatagcaattacaaagttgctattgaagtcatattacaatattgtcaggaaaaatgtggaggacttcataccaaaagcaattatgcatttcctggttaatcacacaaaaagggcactgcataattacctcataacaaaactttatagagatgatcttttggaagacttgctcaaagaacctgatgagctaaccataaagaggaagcagatacgtgaaaatcttaaggtccttcaacaagcttacaaaactttggatgagataccacttgacgcagaggcagtagagaggggtggtggatactccctcgattctgatgcgattggtctaccaagggctcatgggctttcttcatccctccacggattcaatgatggaagctcatcatattcaaccccgaagcagtcaaggtcaaggaggccaaaccattctggcgagcaacttcctttcaaccccgcaacgagtggcaatggtttttgatgccaccctacacgatggccacccagattggttatggaaccaaccattgcagcaagcacaccttactctgctccaagtttgttggcacccgtagatatatgttatttctagttaaattctttgcagcgttgcgctgatgaagcctggcatggtgcgagttttgtcatttcgccttttgtacagtatatatctttgcccagtcatttcgtcttgaaatggtatcaagtgataggtatactttttcttcggacccagggaaagcaatggaaaaagttatactaggtgcagcacccagcgtctgagtgacttgccacggatttgccttgcaaaatagacatggttggtattgtggtggcaataaaatgtggcatgaaatagtttccgtttcgttaatgttttgtcttgatttaatacgcctttgttaatagttgtgcatttgtacatcagcattaataactgtgggat

SEQ ID NO: 74501 - DNA, 1324 bp, Zea Mays
caaaatcataatggacatatctatacttaataataaagaggatggagtggattcacaggtttctgagaaaactcaaaaatcacgcccgatattgggtagaagtggtgtaaatggagtagttactgaccacatccagggggtacggcctgctgctgaggcagagagaccaggatcttctggtagtggaagcacatctttctggaatcaaatatttacttccaatgaggatcgaacacatgctcctgcaagagataacacagcaaacaaatcttatgctatgcctgcccctaatctggatcattcattctccactatacagttaagagagccaccagtcgtcctgaagccttcagaacaccagtctgagcaggaggcacttgaaatagcaattacaaagttgctattgaagtcatattacaatattgtcaggaaaaatgtggaggacttcataccaaaagcaattatgcatttcctggttaatcacacaaaaagggcactgcataattacctcataacaaaactttatagagatgatcttttggaagacttgctcaaagaacctgatgagctaaccataaagaggaagcagatacgtgaaaatcttaaggtccttcaacaagcttacaaaactttggatgagataccacttgacgcagaggcagtagagaggggtggtggatactccctcgattctgatgcgattggtctaccaagggctcatgggctttcttcatccctccacggattcaatgatggaagctcatcatattcaaccccgaagcagtcaaggtcaaggaggccaaaccattctggcgagcaacttcctttcaaccccgcaacgagtggcaatggtttttgatgccaccctacacgatggccacccagattggttatggaaccaaccattgcagcaagcacaccttactctgctccaagtttgttggcacccgtagatatatgttatttctagttaaattctttgcagcgttgcgctgatgaagcctggcatggtgcgagttttgtcatttcgccttttgtacagtatatatctttgcccagtcatttcgtcttgaaatggtatcaagtgataggtatactttttcttcggacccagggaaagcaatggaaaaagttatactaggtgcagcacccagcgtctgagtgacttgccacggatttgccttgcaaaatagacatggttggtattgtggtggcaataaaatgtggcatgaaatagtttccgtttcgttaatgttttgtcttgatttaatacgcctttgttaatagttgtgcatttgtacatcagcattaataactgtgggat

SEQ ID NO: 74502 - DNA, 2534 bp, Zea Mays
cggatcagaaagatattttttttagtccgttttcaaccctactacgcctcggaatcagaggaaccgaacggtggaagagtacgcctcggaatcagaggagcagcgaggaagctgaaggaggggcgaatctaagcccaattgaagcatgagggcgtcgattaatcgtcccccgacgccgagcgcggaggaggatcgggacaagcagccttctctcggagagatcattaacatcaagttggtagagactggggagaaggagaagctaatggagctactccgcgagcgactcgctgagtgcggctggagggatgagatgaaggcactctgcagtaataaacacatgcatccaatgatgctgagcaagtgcttcacattcctaaggttctgatatttgcattagcatatgaattgtttgcacttcttgagaatgcatgatgttttttccccaacttctcagtggtcctctcaatttaaatgcctttgacgattacaactgaatgcatgtgaaaggcacacattaatatgtcacaaccccaaacattgttctatctttctcaaatatgtgcagctaaattctgaagcaaaagtgtgatatcctggcccaaaccttaatagggttgatagaatactcaacaagttgcatcttcttttttgaaagtctatctcgaaagaacctctctttaagagtgcttggcccagagtaatcttgagatgggtgatcgactgagaagttttctctgatgcgcatgaatgaggacaaagtgcacataaaagactcatgttggtctgtgtggatgatctatggtcttagagagctgtcaggagtaagtatcgttggttcgagagtgaacggggcattacaaatggtattagagccgactctcgcggtttcatggtcgtgtggcgctaggggttcggccatatgatgcatggcgcttgtgggcttagaatggtcacatggcatgacatatgatgacactagacatacatacatgaccaagaggggaggttactggcttggggttgaccgacgaagacgtcggttttctaagaggtggtggattgtgatatcctggtcaaagcttaataggattgatagaatactcataacaaaaaggtgcatcttttttttcaggagcctatctcgaaagaacctctggattaagtgtgcttggcccactaactggaaagtcttctcgggtgtgcgtgagtgaggacaaagtgcgcacaaagtactctttttgtctgtgcggatggtctatgatcgtagagggctgccaggagtaagtatcgccggttcgggagtagatggggtgttacaataagtagtttcttcatttcctcgtgaagaaatgacctgaaggggttcatttgcttcctaataaattgggaatttttgtaaatcttatgcaactcaagttggtttatcatggaaactacttatggttagttctctcaaattttctggtaaataaataattgcaatgattttactagatggctattgcagctgcaattattgcaacccatgcaagtgtgcaatatttgcaatttgtttaaatttcgtgctttccttttcctgaaattatattattttcaaatgaacttgtgttgcaaaaacaggttgtgacttgtgagtaacccactaaacacttgcacgctaaaatcttcttactgacaggattcatctggttcatttgctttgttcaaattctatgctaaatgctcattgcagccaatcaaatttatctaattctgatgtcttcaaaaccctaggcattggagaccgttttgcagtttgacacttaactgtagctacctcaaactgcctcattagagcattctgaaatgtgtgttacattacacactccataggttgacaataaagatggcgtggttttaactggataatatgtatccttcccaatgcttatcattctctttcgacgcgtctctgttttgtccttttgtgtactgtgtagggcctatgcaaggaagaaaggaagaaataatgtgacagtagatgacctcattcatgttattactccgaaaggaagagcatccgtgcctgattcagtgaaggcagaactcctgcaacgcatccggtccttccttatgtctaccacacttcggtagtcatttgtcgcgacggttggagcctatatgtaccattgtaggatcattgggaagtcgatcttgttggggaccaaaggtgcaggaaagcagtgcgtaggggaatattgtgagcatgaaaagaaacagtgtgatcttcatgacactgtcgacatgttcctcgtcaggcgcaggcggttggcgtaatttcaggtgtaccaatagagttgtaagttgtaacccctgaatactgtattgttaaagcaaccttccaccttgtaatgctacattgtactataactgctcagcgctgatgcttaatttcacaattagaaaacagaaacgcaatcttgatatagatgataacacgcatgtgaaacctgaaaccctgactgggtcatcttcaattgttttctttttgg

SEQ ID NO: 74503 - DNA, 961 bp, Zea Mays
gaaagatattttttttagtccgttttcaaccctactacgcctcggaatcagaggaaccgaacggtggaagagtacgcctcggaatcagaggagcagcgaggaagctgaaggaggggcgaatctaagcccaattgaagcatgagggcgtcgattaatcgtcccccgacgccgagcgcggaggaggatcgggacaagcagccttctctcggagagatcattaacatcaagttggtagagactggggagaaggagaagctaatggagctactccgcgagcgactcgctgagtgcggctggagggatgagatgaaggcactctgcaggagcctatctcgaaagaacctctggattaagtgtgcttggcccactaactggaaagtcttctcgggtgtgcgtgagtgaggacaaaggcctatgcaaggaagaaaggaagaaataatgtgacagtagatgacctcattcatgttattactccgaaaggaagagcatccgtgcctgattcagtgaaggcagaactcctgcaacgcatccggtccttccttatgtctaccacacttcggtagtcatttgtcgcgacggttggagcctatatgtaccattgtaggatcattgggaagtcgatcttgttggggaccaaaggtgcaggaaagcagtgcgtaggggaatattgtgagcatgaaaagaaacagtgtgatcttcatgacactgtcgacatgttcctcgtcaggcgcaggcggttggcgtaatttcaggtgtaccaatagagttgtaagttgtaacccctgaatactgtattgttaaagcaaccttccaccttgtaatgctacattgtactataactgctcagcgctgatgcttaatttcacaattagaaaacagaaacgcaatcttgatatagatgataacacgcatgtgaaacctgaaaccctgactgggtcatcttcaattgttttctttttgg

SEQ ID NO: 74504 - DNA, 1722 bp, Zea Mays
gaaagatattttttttagtccgttttcaaccctactacgcctcggaatcagaggaaccgaacggtggaagagtacgcctcggaatcagaggagcagcgaggaagctgaaggaggggcgaatctaagcccaattgaagcatgagggcgtcgattaatcgtcccccgacgccgagcgcggaggaggatcgggacaagcagccttctctcggagagatcattaacatcaagttggtagagactggggagaaggagaagctaatggagctactccgcgagcgactcgctgagtgcggctggagggatgagatgaaggcactctgcaggagcctatctcgaaagaacctctggattaagtgtgcttggcccactaactggaaagtcttctcgggtgtgcgtgagtgaggacaaagtgcgcacaaagtactctttttgtctgtgcggatggtctatgatcgtagagggctgccaggagtaagtatcgccggttcgggagtagatggggtgttacaataagtagtttcttcatttcctcgtgaagaaatgacctgaaggggttcatttgcttcctaataaattgggaatttttgtaaatcttatgcaactcaagttggtttatcatggaaactacttatggttagttctctcaaattttctggtaaataaataattgcaatgattttactagatggctattgcagctgcaattattgcaacccatgcaagtgtgcaatatttgcaatttgtttaaatttcgtgctttccttttcctgaaattatattattttcaaatgaacttgtgttgcaaaaacaggttgtgacttgtgagtaacccactaaacacttgcacgctaaaatcttcttactgacaggattcatctggttcatttgctttgttcaaattctatgctaaatgctcattgcagccaatcaaatttatctaattctgatgtcttcaaaaccctaggcattggagaccgttttgcagtttgacacttaactgtagctacctcaaactgcctcattagagcattctgaaatgtgtgttacattacacactccataggttgacaataaagatggcgtggttttaactggataatatgtatccttcccaatgcttatcattctctttcgacgcgtctctgttttgtccttttgtgtactgtgtagggcctatgcaaggaagaaaggaagaaataatgtgacagtagatgacctcattcatgttattactccgaaaggaagagcatccgtgcctgattcagtgaaggcagaactcctgcaacgcatccggtccttccttatgtctaccacacttcggtagtcatttgtcgcgacggttggagcctatatgtaccattgtaggatcattgggaagtcgatcttgttggggaccaaaggtgcaggaaagcagtgcgtaggggaatattgtgagcatgaaaagaaacagtgtgatcttcatgacactgtcgacatgttcctcgtcaggcgcaggcggttggcgtaatttcaggtgtaccaatagagttgtaagttgtaacccctgaatactgtattgttaaagcaaccttccaccttgtaatgctacattgtactataactgctcagcgctgatgcttaatttcacaattagaaaacagaaacgcaatcttgatatagatgataacacgcatgtgaaacctgaaaccctgactgggtcatcttcaattgttttctttttgg

SEQ ID NO: 74505 - DNA, 1014 bp, Zea Mays
tttttttagtccgttttcaaccctactacgcctcggaatcagaggaaccgaacggtggaagagtacgcctcggaatcagaggagcagcgaggaagctgaaggaggggcgaatctaagcccaattgaagcatgagggcgtcgattaatcgtcccccgacgccgagcgcggaggaggatcgggacaagcagccttctctcggagagatcattaacatcaagttggtagagactggggagaaggagaagctaatggagctactccgcgagcgactcgctgagtgcggctggagggatgagatgaaggcactctgcaggagcctatctcgaaagaacctctggattaagtgtgcttggcccactaactggaaagtcttctcgggtgtgcgtgagtgaggacaaagtgcgcacaaagtactctttttgtctgtgcggatggtctatgatcgtagagggctgccaggaggcctatgcaaggaagaaaggaagaaataatgtgacagtagatgacctcattcatgttattactccgaaaggaagagcatccgtgcctgattcagtgaaggcagaactcctgcaacgcatccggtccttccttatgtctaccacacttcggtagtcatttgtcgcgacggttggagcctatatgtaccattgtaggatcattgggaagtcgatcttgttggggaccaaaggtgcaggaaagcagtgcgtaggggaatattgtgagcatgaaaagaaacagtgtgatcttcatgacactgtcgacatgttcctcgtcaggcgcaggcggttggcgtaatttcaggtgtaccaatagagttgtaagttgtaacccctgaatactgtattgttaaagcaaccttccaccttgtaatgctacattgtactataactgctcagcgctgatgcttaatttcacaattagaaaacagaaacgcaatcttgatatagatgataacacgcatgtgaaacctgaaaccctgactgggtcatcttcaattgttttctttttgg

SEQ ID NO: 74506 - DNA, 779 bp, Zea Mays
aagagagccaatctcatccgctgctgctcgtctgcgcactctgtgagggcgtcgattaatcgtcccccgacgccgagcgcggaggaggatcgggacaagcagccttctctcggagagatcattaacatcaagttggtagagactggggagaaggagaagctaatggagctactccgcgagcgactcgctgagtgcggctggagggatgagatgaaggcactctgcagggcctatgcaaggaagaaaggaagaaataatgtgacagtagatgacctcattcatgttattactccgaaaggaagagcatccgtgcctgattcagtgaaggcagaactcctgcaacgcatccggtccttccttatgtctaccacacttcggtagtcatttgtcgcgacggttggagcctatatgtaccattgtaggatcattgggaagtcgatcttgttggggaccaaaggtgcaggaaagcagtgcgtaggggaatattgtgagcatgaaaagaaacagtgtgatcttcatgacactgtcgacatgttcctcgtcaggcgcaggcggttggcgtaatttcaggtgtaccaatagagttgtaagttgtaacccctgaatactgtattgttaaagcaaccttccaccttgtaatgctacattgtactataactgctcagcgctgatgcttaatttcacaattagaaaacagaaacgcaatcttgatatagatgataacacgcatgtgaaacctgaaaccctgactgggtcatcttcaattgttttctttttgg

SEQ ID NO: 74507 - DNA, 1970 bp, Zea Mays
atggaccttgacgcggctgcagaggaggaggagcgccggcttgaggactacaatgaggcgcaggatgctaggtacttcctggggtttggtgacacccatggagatcctattgaggttgatactgttgccggctctcaaattggcactggaaccgaatccactagcccgtcagaagcagtccctaatcctgatcaggctgctaatgctagtggtagcaacatgaagaaaaggtccaagtgctgggatgactttgatgaattgactaagattgtgaatggtaagaaagtcaggagccacgttgtgcctgccgccagccccgacacctccagatgttgcctccatccatcctccgagcttaccgcctcgcccccgcccccaaaccctagaccccctacaatcacgaggaaggggagaacggccgaggaggatgctccgcaaggaaggggaggacggtcgaggatgacgttgttgctcgtcgctgagcatcttcgcgccctcagtgctgccaaggagccctctctatccctgatggcgtcccaaccgttggccgatcgtcggcgatgatgacccagcctccctctccacgtccctgctccccaactcatacaggaattcacaagagcaatatggtacaccaatgccacacattggacaaacaacagttgaagttgatcttttgaattatggtgtgatagaaggtgatgaatcatgtaaacatttctctgaactaaaagtcttacatccatggatgatcaaagatggcatgaatcttacaaaggaacagagattagagaaaattgagtcacaaaaacttgaaaaatatgaagccaaaggtgacaagagacatgacttgaaagatgatcaaagtgtacaggaagaatacataaatgcatattatgaggccttgaggaaaagttggaagaggaagaagcaaaaagcagaatgcagcatgaaggcaagatttttgtccctgatgctcaaagggaacgccaagttgacaataaatacaagcaggatgatgatgaagaaggcattgaataagtattccagctttcttatatggacagtaggaacccaaggtttgctgtgtaatccattatcaacagttgcactcacattagccttgtggcgattcttttcaaaacaggatgatttaaacccatatgttgttccaatggctatgggcatttaacgtcaactagagagtcccttggatatgactacaagtactatcatcaggaggattgttgctaaccatgaagcttacctgtgtattgtcagctttcaaactcgatgaaccaactgagaaagtactgcttatgaagctagagaagcatggaaggagtgttgctgaatcaaaggcaaaagaagaagctggaagagttttgatttgcatgaaggataggtcctcgacacagttcagcagagatgctggctctatgcccaaggtgtggacaggaaaggaggacataaaagccataactaaaactgttcgctcagttgtacgccagatgctaatatttaatactctatatatagaatactgttgaagacgcttctaaagcactagagtattgtagcactgatggaaggccttcgatgaaatgtttccctgaaagttgcatactacatcgctgaagcactacaatattgtaacactgagggaaggcctttgtatcatgacctaaattcatatagggccctctttgatgagggaataaggttgtgtcaacatggaccgtgccactctcatcgagggctaccataacaagattgaagttgaactcaacaagatctgcgttggaatcctcaagctctttgcttcccaccttcccccctcattaatagttccaaagtccaaggtcttctacctcaagatgaagggtgattactacagttccttgcggagtttgaaacttgatctaggagaaaagatgcagctaagaataccatggtggcacacaaagttg

SEQ ID NO: 74508 - DNA, 3930 bp, Zea Mays
atggaccttgacgcggctgcagaggaggaggagcgccggcttgaggactacaatgaggcgcaggatgctaggtacttcctggggtttggtgacacccatggagatcctattgaggttgatactgttgccggctctcaaattggcactggaaccgaatccactagcccgtcagaagcagtccctaatcctgatcaggctgctaatgctagtggtagcaacatgaagaaaaggtccaagtgctgggatgactttgatgaattgactaagattgtgaatggtaagaaagtcaggagccacgttgtgcctgccgccagccccgacacctccagatgttgcctccatccatcctccgagcttaccgcctcgcccccgcccccaaaccctagaccccctacaatcacgaggaaggggagaacggccgaggaggatgctccgcaaggaaggggaggacggtcgaggatgacgttgttgctcgtcgctgagcatcttcgcgccctcagtgctgccaaggagccctctctatccctgatggcgtcccaaccgttggtaatatctccgcctcggccatgggcattgcaaccctcgattcaatctctcctcttcgatctcaggccgatcgtcggcgatgatgacccagcctccctctccacgtccctgctccccaactcatacaggtgttgtggcgccctcctctccactcccctatctattttgttgtttgatgtctactttcttcgccgctctggttgcggcacgattggtgcaccacctcctcgtgcgaggtgagggcaagcctgcacatgctcaactccatcgacaacctcaccttcatgccactctgggagcatgccgagtggcgatgtgacgacttggtggtctatcgtcgttgcccttcgccaggtgtcgatctcttcgtcagtgaagagcatccaccagttccattcattcatttattatatggtgaatggccacaaaaccatattctatgatggcacaaggtcccaccaagatgcgtagccatgtgcaaaccatatttgtcatgtagccacaagggcccgtcgatctgttttggtttacaatgtggatgaaaacaacatggagctctggcttatgggggcttatcgatgccagcgaagcccgtgggagcaattgaagccattggacattggttgcacaacttgataaagtgaagaatctgcttgcgtctgagtttgggagtctataaacatggggaagagaaaatattggtgcctttgcaattggtgaccctgctgcaactatttttttctaggaattcacaagagcaatatggtacaccaatgccacacattggacaaacaacagttgaagttgatcttttgaattatggtgtgatagaaggtgatgaatcatgtaaacatttctctgaactaaaagtcttacatccatggatgatcaaagatggcatgaatcttacaaaggaacagagattagagaaaattgagtcacaaaaacttgaaaaatatgaagccaaaggtgacaagagacatgacttgaaagatgatcaaagtgtacaggaagaatacataaatgcatattatgaggccttgaggaaaagttggaagaggaagaagcaaaaagcagaatgcagcatgaaggcaagatttttgtccctgatgctcaaagggaacgccaagttgacaataaatacaagcaggatgatgatgaagaaggcattgaataattatacttcacattatcatgtctttacttttggcagtgttgttagtaatgaagttgcttctcatgcaacacttcttattagcaagcagtatgtattggcaatgggttttgcattgctggaacacctgacagaaatttttagtttcccagaagtaaaggcgttctggtttgttagtaatattggccttctaatggtttatgctctatccagagtattccagctttcttatatggacagtaggaacccaaggtttgctgtgtaatccattatcaacagttgcactcacattagccttgtggcgattcttttcaaaacaggatgatttaaacccatatgttgttccaatggctatgggcatttaacgtcaactagagagtcccttggatatgactacaagtactatcatcaggaggattgttgctaaccatgaagcttacctgtgtattgtcagctttcaaactcgatgaaccaactgagaaagtactgcttatgaagctagagaagcatggaaggagtgttgctgaatcaaaggcaaaagaagaagctggaagagttttgatttgcatgaaggatagctgttgaagacgcttctaaagcactagagtattgtagcactgatggaaggccttcgatgaaatgtttccctgaaagttgcatactacatcgctgaagcactacaatattgtaacactgagggaaggcctttgtatcatgacctaaattcatatagggccctctttgatgaggtaattgttgctttggttttcacttttccttacaaccttcgaattatgtggctatgtctgaaaacttaatacttctacagttctcgggtcttcataccattccaatttgtgttagctaataaacaagtcaggctatgtctgaaaccagtatctaatagttctccgcccaacaaggaactgtgcaacataaaaacaaatcttaaacaagttacatgttctgaattttagaaactcaaactccactctaagggctaaccggctaaccgaacatgttatagaacaaactcagtcctaaattgtagacatattggaattctgcgtatgttttttccaacctatcttcaaactatacaagaattattatctaatataaacaatacattgacaataatgtacacaaaaatccatgtatttaatgtgtggacatggtatcatcatgtctgactaacccttttttactttcattgaatgaagttcgtacatgtatttgaggtattttttattttcttcctactataagccttgcttagatactgatctaagatcatctccaagggacagacaaaaaatcctagaggttctcacataagtacggtttagagaagggataaaccgaggaaagcctcccccacaaatacagaaaggctgcctcgaacctatgatttggtgactcagtgaaacaaacaactctcactactgcactaggcctgccattgtttacgagcatccccaagggccttacttaaattcactctctaaattttaatttggtgagccattttaataaaaatatgtttgataggttttttatcttctaacaatttttatgtatcttgtacgcactctagagaaccaacccactcactgctctttatttactgcatgctatttaggtctgctaagcaaaaaatgatattctttctcaatcttttgtcatgtttagataaatttggtggttttaggataaagtttgtgaagggcttcactttttttttctataattagaatttaactcaaaagttttcccttgaaattcaagttgattttgagaagtatgaagggatgattaaggtcatggagaaggtggtaatacagttaattctatggagctcactggaggagcactaccttttgccagttgcttgcaagaatgtaattggaatccgatgtgcttcatggcgcatcgtatcctccattgagtatagggaataaggttgtgtcaacatggaccgtgccactctcatcgagggctaccataacaagattgaagttgaactcaacaagatctgcgttggaatcctcaagctctttgcttcccaccttcccccctcattaatagttccaaagtccaaggtcttctacctcaagatgaagggtgattactacagttccttgcggagtttgaaacttgatctaggagaaaagatgcagctaagaataccatggtggcacacaaagttg

SEQ ID NO: 74509 - DNA, 3217 bp, Zea Mays
atggaccttgacgcggctgcagaggaggaggagcgccggcttgaggactacaatgaggcgcaggatgctaggtacttcctggggtttggtgacacccatggagatcctattgaggttgatactgttgccggctctcaaattggcactggaaccgaatccactagcccgtcagaagcagtccctaatcctgatcaggctgctaatgctagtggtagcaacatgaagaaaaggtccaagtgctgggatgactttgatgaattgactaagattgtgaatggtaagaaagtcaggagccacgttgtgcctgccgccagccccgacacctccagatgttgcctccatccatcctccgagcttaccgcctcgcccccgcccccaaaccctagaccccctacaatcacgaggaaggggagaacggccgaggaggatgctccgcaaggaaggggaggacggtcgaggatgacgttgttgctcgtcgctgagcatcttcgcgccctcagtgctgccaaggagccctctctatccctgatggcgtcccaaccgttggtaatatctccgcctcggccatgggcattgcaaccctcgattcaatctctcctcttcgatctcaggccgatcgtcggcgatgatgacccagcctccctctccacgtccctgctccccaactcatacaggtgttgtggcgccctcctctccactcccctatctattttgttgtttgatgtctactttcttcgccgctctggttgcggcacgattggtgcaccacctcctcgtgcgaggtgagggcaagcctgcacatgctcaactccatcgacaacctcaccttcatgccactctgggagcatgccgagtggcgatgtgacgacttggtggtctatcgtcgttgcccttcgccaggtgtcgatctcttcgtcagtgaagagcatccaccagttccattcattcatttattatatggtgaatggccacaaaaccatattctatgatggcacaaggtcccaccaagatgcgtagccatgtgcaaaccatatttgtcatgtagccacaagggcccgtcgatctgttttggtttacaatgtggatgaaaacaacatggagctctggcttatgggggcttatcgatgccagcgaagcccgtgggagcaattgaagccattggacattggttgcacaacttgataaagtgaagaatctgcttgcgtctgagtttgggagtctataaacatggggaagagaaaatattggtgcctttgcaattggtgaccctgctgcaactatttttttctaggaattcacaagagcaatatggtacaccaatgccacacattggacaaacaacagttgaagttgatcttttgaattatggtgtgatagaaggtgatgaatcatgtaaacatttctctgaactaaaagtcttacatccatggatgatcaaagatggcatgaatcttacaaaggaacagagattagagaaaattgagtcacaaaaacttgaaaaatatgaagccaaaggtgacaagagacatgacttgaaagatgatcaaagtgtacaggaagaatacataaatgcatattatgaggccttgaggaaaagttggaagaggaagaagcaaaaagcagaatgcagcatgaaggcaagatttttgtccctgatgctcaaagggaacgccaagttgacaataaatacaagcaggatgatgatgaagaaggcattgaataagtattccagctttcttatatggacagtaggaacccaaggtttgctgtgtaatccattatcaacagttgcactcacattagccttgtggcgattcttttcaaaacaggatgatttaaacccatatgttgttccaatggctatgggcatttaacgtcaactagagagtcccttggatatgactacaagtactatcatcaggaggattgttgctaaccatgaagcttacctgtgtattgtcagctttcaaactcgatgaaccaactgagaaagtactgcttatgaagctagagaagcatggaaggagtgttgctgaatcaaaggcaaaagaagaagctggaagagttttgatttgcatgaaggatagctgttgaagacgcttctaaagcactagagtattgtagcactgatggaaggccttcgatgaaatgtttccctgaaagttgcatactacatcgctgaagcactacaatattgtaacactgagggaaggcctttgtatcatgacctaaattcatatagggccctctttgatgagttgattttgagaagtatgaagggatgattaaggtcatggagaaggtggtaatacagttaattctatggagctcactggaggagcactaccttttgccagttgcttgcaagaatgtaattggaatccgatgtgcttcatggcgcatcgtatcctccattgagtatagggaataaggttgtgtcaacatggaccgtgccactctcatcgagggctaccataacaagattgaagttgaactcaacaagatctgcgttggaatcctcaagctctttgcttcccaccttcccccctcattaatagttccaaagtccaaggtcttctacctcaagatgaagggtgattactacaggatattgctttggaggagttggcccccttatcctattaggctttggctgatgcttaacctctcaactctcctgatcttgctcgtggtctccccaaacaggtttggtttctagatccattacatggagtgtgtagtgtttttcctcttttttgcaatcctcatgatgtgccaccaggtctggtctaatcgttcccctaaaattgtggcctataatcagcttcttggcctatgatccttttgtatgtaggcaaagccaacgaatgaaagggactcactcgcagcaacaaccaaaaagctgatcacgcattctccttttcacatttgttgcatttaattaattcatccaatagcataaattggcactccttttgtgttattgctctttggttggtcttattgttgttgttgtactgcttgccatgtgtattttatcataagtgttgttttggctaatccctaacgatgcaatacatttgagcaacaattcaattgttttgttttttgaacagttattctaaatacccaatgttcacagcatatttcacttcccatggttcactgttttgttgtattagtagctctaattctaaggtgtcaatgaatcttaggc

SEQ ID NO: 74510 - DNA, 2872 bp, Zea Mays
atggaccttgacgcggctgcagaggaggaggagcgccggcttgaggactacaatgaggcgcaggatgctaggtacttcctggggtttggtgacacccatggagatcctattgaggttgatactgttgccggctctcaaattggcactggaaccgaatccactagcccgtcagaagcagtccctaatcctgatcaggctgctaatgctagtggtagcaacatgaagaaaaggtccaagtgctgggatgactttgatgaattgactaagattgtgaatggtaagaaagtcaggagccacgttgtgcctgccgccagccccgacacctccagatgttgcctccatccatcctccgagcttaccgcctcgcccccgcccccaaaccctagaccccctacaatcacgaggaaggggagaacggccgaggaggatgctccgcaaggaaggggaggacggtcgaggatgacgttgttgctcgtcgctgagcatcttcgcgccctcagtgctgccaaggagccctctctatccctgatggcgtcccaaccgttggtgttgtggcgccctcctctccactcccctatctattttgttgtttgatgtctactttcttcgccgctctggttgcggcacgattggtgcaccacctcctcgtgcgaggtgagggcaagcctgcacatgctcaactccatcgacaacctcaccttcatgccactctgggagcatgccgagtggcgatgtgacgacttggtggtctatcgtcgttgcccttcgccaggtgtcgatctcttcgtcagtgaagagcatccaccaggagcaattgaagccattggacattggttgcacaacttgataaagtgaagaatctgcttgcgtctgagtttgggagtctataaacatggggaagagaaaatattggtgcctttgcaattggtgaccctgctgcaactatttttttctaggaattcacaagagcaatatggtacaccaatgccacacattggacaaacaacagttgaagttgatcttttgaattatggtgtgatagaaggtgatgaatcatgtaaacatttctctgaactaaaagtcttacatccatggatgatcaaagatggcatgaatcttacaaaggaacagagattagagaaaattgagtcacaaaaacttgaaaaatatgaagccaaaggtgacaagagacatgacttgaaagatgatcaaagtgtacaggaagaatacataaatgcatattatgaggccttgaggaaaagttggaagaggaagaagcaaaaagcagaatgcagcatgaaggcaagatttttgtccctgatgctcaaagggaacgccaagttgacaataaatacaagcaggatgatgatgaagaaggcattgaataagtattccagctttcttatatggacagtaggaacccaaggtttgctgtgtaatccattatcaacagttgcactcacattagccttgtggcgattcttttcaaaacaggatgatttaaacccatatgttgttccaatggctatgggcatttaacgtcaactagagagtcccttggatatgactacaagtactatcatcaggaggattgttgctaaccatgaagcttacctgtgtattgtcagctttcaaactcgatgaaccaactgagaaagtactgcttatgaagctagagaagcatggaaggagtgttgctgaatcaaaggcaaaagaagaagctggaagagttttgatttgcatgaaggataggtcctcgacacagttcagcagagatgctggctctatgcccaaggtgtggacaggaaaggaggacataaaagccataactaaaactgttcgctcagttgtacgccagatgctaatatttaatactctatatatagaatactgttgaagacgcttctaaagcactagagtattgtagcactgatggaaggccttcgatgaaatgtttccctgaaagttgcatactacatcgctgaagcactacaatattgtaacactgagggaaggcctttgtatcatgacctaaattcatatagggccctctttgatgagttgattttgagaagtatgaagggatgattaaggtcatggagaaggtggtaatacagttaattctatggagctcactggaggagcactaccttttgccagttgcttgcaagaatgtaattggaatccgatgtgcttcatggcgcatcgtatcctccattgagtatagggaataaggttgtgtcaacatggaccgtgccactctcatcgagggctaccataacaagattgaagttgaactcaacaagatctgcgttggaatcctcaagctctttgcttcccaccttcccccctcattaatagttccaaagtccaaggtcttctacctcaagatgaagggtgattactacaggatattgctttggaggagttggcccccttatcctattaggctttggctgatgcttaacctctcaactctcctgatcttgctcgtggtctccccaaacaggcaaagccaacgaatgaaagggactcactcgcagcaacaaccaaaaagctgatcacgcattctccttttcacatttgttgcatttaattaattcatccaatagcataaattggcactccttttgtgttattgctctttggttggtcttattgttgttgttgtactgcttgccatgtgtattttatcataagtgttgttttggctaatccctaacgatgcaatacatttgagcaacaattcaattgttttgttttttgaacagttattctaaatacccaatgttcacagcatatttcacttcccatggttcactgttttgttgtattagtagctctaattctaaggtgtcaatgaatcttaggc

SEQ ID NO: 74511 - DNA, 2976 bp, Zea Mays
atggaccttgacgcggctgcagaggaggaggagcgccggcttgaggactacaatgaggcgcaggatgctaggtacttcctggggtttggtgacacccatggagatcctattgaggttgatactgttgccggctctcaaattggcactggaaccgaatccactagcccgtcagaagcagtccctaatcctgatcaggctgctaatgctagtggtagcaacatgaagaaaaggtccaagtgctgggatgactttgatgaattgactaagattgtgaatggtaagaaagtcaggagccacgttgtgcctgccgccagccccgacacctccagatgttgcctccatccatcctccgagcttaccgcctcgcccccgcccccaaaccctagaccccctacaatcacgaggaaggggagaacggccgaggaggatgctccgcaaggaaggggaggacggtcgaggatgacgttgttgctcgtcgctgagcatcttcgcgccctcagtgctgccaaggagccctctctatccctgatggcgtcccaaccgccgatcgtcggcgatgatgacccagcctccctctccacgtccctgctccccaactcatacaggtgttgtggcgccctcctctccactcccctatctattttgttgtttgatgtctactttcttcgccgctctggttgcggcacgattggtgcaccacctcctcgtgcgaggtgagggcaagcctgcacatgctcaactccatcgacaacctcaccttcatgccactctgggagcatgccgagtggcgatgtgacgacttggtggtctatcgtcgttgcccttcgccaggtgtcgatctcttcgtcagtgaagagcatccaccaggagcaattgaagccattggacattggttgcacaacttgataaagtgaagaatctgcttgcgtctgagtttgggagtctataaacatggggaagagaaaatattggtgcctttgcaattggtgaccctgctgcaactatttttttctaggaattcacaagagcaatatggtacaccaatgccacacattggacaaacaacagttgaagttgatcttttgaattatggtgtgatagaaggtgatgaatcatgtaaacatttctctgaactaaaagtcttacatccatggatgatcaaagatggcatgaatcttacaaaggaacagagattagagaaaattgagtcacaaaaacttgaaaaatatgaagccaaaggtgacaagagacatgacttgaaagatgatcaaagtgtacaggaagaatacataaatgcatattatgaggccttgaggaaaagttggaagaggaagaagcaaaaagcagaatgcagcatgaaggcaagatttttgtccctgatgctcaaagggaacgccaagttgacaataaatacaagcaggatgatgatgaagaaggcattgaataattatacttcacattatcatgtctttacttttggcagtgttgttagtaatgaagttgcttctcatgcaacacttcttattagcaagcagtatgtattggcaatgggttttgcattgctggaacacctgacagaaatttttagtttcccagaagtaaaggcgttctggtttgttagtaatattggccttctaatggtttatgctctatccagagtattccagctttcttatatggacagtaggaacccaaggtttgctgtgtaatccattatcaacagttgcactcacattagccttgtggcgattcttttcaaaacaggatgatttaaacccatatgttgttccaatggctatgggcatttaacgtcaactagagagtcccttggatatgactacaagtactatcatcaggaggattgttgctaaccatgaagcttacctgtgtattgtcagctttcaaactcgatgaaccaactgagaaagtactgcttatgaagctagagaagcatggaaggagtgttgctgaatcaaaggcaaaagaagaagctggaagagttttgatttgcatgaaggataggtcctcgacacagttcagcagagatgctggctctatgcccaaggtgtggacaggaaaggaggacataaaagccataactaaaactgttcgctcagttgtacgccagatgctaatatttaatactctatatatagaatactgttgaagacgcttctaaagcactagagtattgtagcactgatggaaggccttcgatgaaatgtttccctgaaagttgcatactacatcgctgaagcactacaatattgtaacactgagggaaggcctttgtatcatgacctaaattcatatagggccctctttgatgagggaataaggttgtgtcaacatggaccgtgccactctcatcgagggctaccataacaagattgaagttgaactcaacaagatctgcgttggaatcctcaagctctttgcttcccaccttcccccctcattaatagttccaaagtccaaggtcttctacctcaagatgaagggtgattactacaggatattgctttggaggagttggcccccttatcctattaggctttggctgatgcttaacctctcaactctcctgatcttgctcgtggtctccccaaacaggcaaagccaacgaatgaaagggactcactcgcagcaacaaccaaaaagctgatcacgcattctccttttcacatttgttgcatttaattaattcatccaatagcataaattggcactccttttgtgttattgctctttggttggtcttattgttgttgttgtactgcttgccatgtgtattttatcataagtgttgttttggctaatccctaacgatgcaatacatttgagcaacaattcaattgttttgttttttgaacagttattctaaatacccaatgttcacagcatatttcacttcccatggttcactgttttgttgtattagtagctctaattctaaggtgtcaatgaatcttaggc

SEQ ID NO: 74512 - DNA, 4181 bp, Zea Mays
atggaccttgacgcggctgcagaggaggaggagcgccggcttgaggactacaatgaggcgcaggatgctaggtacttcctggggtttggtgacacccatggagatcctattgaggttgatactgttgccggctctcaaattggcactggaaccgaatccactagcccgtcagaagcagtccctaatcctgatcaggctgctaatgctagtggtagcaacatgaagaaaaggtccaagtgctgggatgactttgatgaattgactaagattgtgaatggtaagaaagtcaggagccacgttgtgcctgccgccagccccgacacctccagatgttgcctccatccatcctccgagcttaccgcctcgcccccgcccccaaaccctagaccccctacaatcacgaggaaggggagaacggccgaggaggatgctccgcaaggaaggggaggacggtcgaggatgacgttgttgctcgtcgctgagcatcttcgcgccctcagtgctgccaaggagccctctctatccctgatggcgtcccaaccgttggccgatcgtcggcgatgatgacccagcctccctctccacgtccctgctccccaactcatacaggtgttgtggcgccctcctctccactcccctatctattttgttgtttgatgtctactttcttcgccgctctggttgcggcacgattggtgcaccacctcctcgtgcgaggtgagggcaagcctgcacatgctcaactccatcgacaacctcaccttcatgccactctgggagcatgccgagtggcgatgtgacgacttggtggtctatcgtcgttgcccttcgccaggtgtcgatctcttcgtcagtgaagagcatccaccagttccattcattcatttattatatggtgaatggccacaaaaccatattctatgatggcacaaggtcccaccaagatgcgtagccatgtgcaaaccatatttgtcatgtagccacaagggcccgtcgatctgttttggtttacaatgtggatgaaaacaacatggagctctggcttatgggggcttatcgatgccagcgaagcccgtgggagcaattgaagccattggacattggttgcacaacttgataaagtgaagaatctgcttgcgtctgagtttgggagtctataaacatggggaagagaaaatattggtgcctttgcaattggtgaccctgctgcaactatttttttctaggaattcacaagagcaatatggtacaccaatgccacacattggacaaacaacagttgaagttgatcttttgaattatggtgtgatagaaggtgatgaatcatgtaaacatttctctgaactaaaagtcttacatccatggatgatcaaagatggcatgaatcttacaaaggaacagagattagagaaaattgagtcacaaaaacttgaaaaatatgaagccaaaggtgacaagagacatgacttgaaagatgatcaaagtgtacaggaagaatacataaatgcatattatgaggccttgaggaaaagttggaagaggaagaagcaaaaagcagaatgcagcatgaaggcaagatttttgtccctgatgctcaaagggaacgccaagttgacaataaatacaagcaggatgatgatgaagaaggcattgaataagtattccagctttcttatatggacagtaggaacccaaggtttgctgtgtaatccattatcaacagttgcactcacattagccttgtggcgattcttttcaaaacaggatgatttaaacccatatgttgttccaatggctatgggcatttaacgtcaactagagagtcccttggatatgactacaagtactatcatcaggaggattgttgctaaccatgaagcttacctgtgtattgtcagctttcaaactcgatgaaccaactgagaaagtactgcttatgaagctagagaagcatggaaggagtgttgctgaatcaaaggcaaaagaagaagctggaagagttttgatttgcatgaaggataggtcctcgacacagttcagcagagatgctggctctatgcccaaggtgtggacaggaaaggaggacataaaagccataactaaaactgttcgctcagttgtacgccagatgctaatatttaatactctatatatagaatactgttgaagacgcttctaaagcactagagtattgtagcactgatggaaggccttcgatgaaatgtttccctgaaagttgcatactacatcgctgaagcactacaatattgtaacactgagggaaggcctttgtatcatgacctaaattcatatagggccctctttgatgaggtaattgttgctttggttttcacttttccttacaaccttcgaattatgtggctatgtctgaaaacttaatacttctacagttctcgggtcttcataccattccaatttgtgttagctaataaacaagtcaggctatgtctgaaaccagtatctaatagttctccgcccaacaaggaactgtgcaacataaaaacaaatcttaaacaagttacatgttctgaattttagaaactcaaactccactctaagggctaaccggctaaccgaacatgttatagaacaaactcagtcctaaattgtagacatattggaattctgcgtatgttttttccaacctatcttcaaactatacaagaattattatctaatataaacaatacattgacaataatgtacacaaaaatccatgtatttaatgtgtggacatggtatcatcatgtctgactaacccttttttactttcattgaatgaagttcgtacatgtatttgaggtattttttattttcttcctactataagccttgcttagatactgatctaagatcatctccaagggacagacaaaaaatcctagaggttctcacataagtacggtttagagaagggataaaccgaggaaagcctcccccacaaatacagaaaggctgcctcgaacctatgatttggtgactcagtgaaacaaacaactctcactactgcactaggcctgccattgtttacgagcatccccaagggccttacttaaattcactctctaaattttaatttggtgagccattttaataaaaatatgtttgataggttttttatcttctaacaatttttatgtatcttgtacgcactctagagaaccaacccactcactgctctttatttactgcatgctatttaggtctgctaagcaaaaaatgatattctttctcaatcttttgtcatgtttagataaatttggtggttttaggataaagtttgtgaagggcttcactttttttttctataattagaatttaactcaaaagttttcccttgaaattcaagttgattttgagaagtatgaagggatgattaaggtcatggagaaggtggtaatacagttaattctatggagctcactggaggagcactaccttttgccagttgcttgcaagaatgtaattggaatccgatgtgcttcatggcgcatcgtatcctccattgagtatagggaataaggttgtgtcaacatggaccgtgccactctcatcgagggctaccataacaagattgaagttgaactcaacaagatctgcgttggaatcctcaagctctttgcttcccaccttcccccctcattaatagttccaaagtccaaggtcttctacctcaagatgaagggtgattactacaggatattgctttggaggagttggcccccttatcctattaggctttggctgatgcttaacctctcaactctcctgatcttgctcgtggtctccccaaacaggcaaagccaacgaatgaaagggactcactcgcagcaacaaccaaaaagctgatcacgcattctccttttcacatttgttgcatttaattaattcatccaatagcataaattggcactccttttgtgttattgctctttggttggtcttattgttgttgttgtactgcttgccatgtgtattttatcataagtgttgttttggctaatccctaacgatgcaatacatttgagcaacaattcaattgttttgttttttgaacagttattctaaatacccaatgttcacagcatatttcacttcccatggttcactgttttgttgtattagtagctctaattctaaggtgtcaatgaatcttaggc

SEQ ID NO: 74513 - DNA, 3124 bp, Zea Mays
atggaccttgacgcggctgcagaggaggaggagcgccggcttgaggactacaatgaggcgcaggatgctaggtacttcctggggtttggtgacacccatggagatcctattgaggttgatactgttgccggctctcaaattggcactggaaccgaatccactagcccgtcagaagcagtccctaatcctgatcaggctgctaatgctagtggtagcaacatgaagaaaaggtccaagtgctgggatgactttgatgaattgactaagattgtgaatggtaagaaagtcaggagccacgttgtgcctgccgccagccccgacacctccagatgttgcctccatccatcctccgagcttaccgcctcgcccccgcccccaaaccctagaccccctacaatcacgaggaaggggagaacggccgaggaggatgctccgcaaggaaggggaggacggtcgaggatgacgttgttgctcgtcgctgagcatcttcgcgccctcagtgctgccaaggagccctctctatccctgatggcgtcccaaccgtgttgtggcgccctcctctccactcccctatctattttgttgtttgatgtctactttcttcgccgctctggttgcggcacgattggtgcaccacctcctcgtgcgaggtgagggcaagcctgcacatgctcaactccatcgacaacctcaccttcatgccactctgggagcatgccgagtggcgatgtgacgacttggtggtctatcgtcgttgcccttcgccaggtgtcgatctcttcgtcagtgaagagcatccaccagttccattcattcatttattatatggtgaatggccacaaaaccatattctatgatggcacaaggtcccaccaagatgcgtagccatgtgcaaaccatatttgtcatgtagccacaagggcccgtcgatctgttttggtttacaatgtggatgaaaacaacatggagctctggcttatgggggcttatcgatgccagcgaagcccgtgggagcaattgaagccattggacattggttgcacaacttgataaagtgaagaatctgcttgcgtctgagtttgggagtctataaacatggggaagagaaaatattggtgcctttgcaattggtgaccctgctgcaactatttttttctaggaattcacaagagcaatatggtacaccaatgccacacattggacaaacaacagttgaagttgatcttttgaattatggtgtgatagaaggtgatgaatcatgtaaacatttctctgaactaaaagtcttacatccatggatgatcaaagatggcatgaatcttacaaaggaacagagattagagaaaattgagtcacaaaaacttgaaaaatatgaagccaaaggtgacaagagacatgacttgaaagatgatcaaagtgtacaggaagaatacataaatgcatattatgaggccttgaggaaaagttggaagaggaagaagcaaaaagcagaatgcagcatgaaggcaagatttttgtccctgatgctcaaagggaacgccaagttgacaataaatacaagcaggatgatgatgaagaaggcattgaataagtattccagctttcttatatggacagtaggaacccaaggtttgctgtgtaatccattatcaacagttgcactcacattagccttgtggcgattcttttcaaaacaggatgatttaaacccatatgttgttccaatggctatgggcatttaacgtcaactagagagtcccttggatatgactacaagtactatcatcaggaggattgttgctaaccatgaagcttacctgtgtattgtcagctttcaaactcgatgaaccaactgagaaagtactgcttatgaagctagagaagcatggaaggagtgttgctgaatcaaaggcaaaagaagaagctggaagagttttgatttgcatgaaggataggtcctcgacacagttcagcagagatgctggctctatgcccaaggtgtggacaggaaaggaggacataaaagccataactaaaactgttcgctcagttgtacgccagatgctaatatttaatactctatatatagaatactgttgaagacgcttctaaagcactagagtattgtagcactgatggaaggccttcgatgaaatgtttccctgaaagttgcatactacatcgctgaagcactacaatattgtaacactgagggaaggcctttgtatcatgacctaaattcatatagggccctctttgatgagttgcttgcaagaatgtaattggaatccgatgtgcttcatggcgcatcgtatcctccattgagtatagggaataaggttgtgtcaacatggaccgtgccactctcatcgagggctaccataacaagattgaagttgaactcaacaagatctgcgttggaatcctcaagctctttgcttcccaccttcccccctcattaatagttccaaagtccaaggtcttctacctcaagatgaagggtgattactacaggatattgctttggaggagttggcccccttatcctattaggctttggctgatgcttaacctctcaactctcctgatcttgctcgtggtctccccaaacaggtttggtttctagatccattacatggagtgtgtagtgtttttcctcttttttgcaatcctcatgatgtgccaccaggtctggtctaatcgttcccctaaaattgtggcctataatcagcttcttggcctatgatccttttgtatgtaggcaaagccaacgaatgaaagggactcactcgcagcaacaaccaaaaagctgatcacgcattctccttttcacatttgttgcatttaattaattcatccaatagcataaattggcactccttttgtgttattgctctttggttggtcttattgttgttgttgtactgcttgccatgtgtattttatcataagtgttgttttggctaatccctaacgatgcaatacatttgagcaacaattcaattgttttgttttttgaacagttattctaaatacccaatgttcacagcatatttcacttcccatggttcactgttttgttgtattagtagctctaattctaaggtgtcaatgaatcttaggc

SEQ ID NO: 74514 - DNA, 3777 bp, Zea Mays
atggaccttgacgcggctgcagaggaggaggagcgccggcttgaggactacaatgaggcgcaggatgctaggtacttcctggggtttggtgacacccatggagatcctattgaggttgatactgttgccggctctcaaattggcactggaaccgaatccactagcccgtcagaagcagtccctaatcctgatcaggctgctaatgctagtggtagcaacatgaagaaaaggtccaagtgctgggatgactttgatgaattgactaagattgtgaatggtaagaaagtcaggagccacgttgtgcctgccgccagccccgacacctccagatgttgcctccatccatcctccgagcttaccgcctcgcccccgcccccaaaccctagaccccctacaatcacgaggaaggggagaacggccgaggaggatgctccgcaaggaaggggaggacggtcgaggatgacgttgttgctcgtcgctgagcatcttcgcgccctcagtgctgccaaggagccctctctatccctgatggcgtcccaaccgttggtaatatctccgcctcggccatgggcattgcaaccctcgattcaatctctcctcttcgatctcaggccgatcgtcggcgatgatgacccagcctccctctccacgtccctgctccccaactcatacaggagcaattgaagccattggacattggttgcacaacttgataaagtgaagaatctgcttgcgtctgagtttgggagtctataaacatggggaagagaaaatattggtgcctttgcaattggtgaccctgctgcaactatttttttctaggaattcacaagagcaatatggtacaccaatgccacacattggacaaacaacagttgaagttgatcttttgaattatggtgtgatagaaggtgatgaatcatgtaaacatttctctgaactaaaagtcttacatccatggatgatcaaagatggcatgaatcttacaaaggaacagagattagagaaaattgagtcacaaaaacttgaaaaatatgaagccaaaggtgacaagagacatgacttgaaagatgatcaaagtgtacaggaagaatacataaatgcatattatgaggccttgaggaaaagttggaagaggaagaagcaaaaagcagaatgcagcatgaaggcaagatttttgtccctgatgctcaaagggaacgccaagttgacaataaatacaagcaggatgatgatgaagaaggcattgaataagtattccagctttcttatatggacagtaggaacccaaggtttgctgtgtaatccattatcaacagttgcactcacattagccttgtggcgattcttttcaaaacaggatgatttaaacccatatgttgttccaatggctatgggcatttaacgtcaactagagagtcccttggatatgactacaagtactatcatcaggaggattgttgctaaccatgaagcttacctgtgtattgtcagctttcaaactcgatgaaccaactgagaaagtactgcttatgaagctagagaagcatggaaggagtgttgctgaatcaaaggcaaaagaagaagctggaagagttttgatttgcatgaaggataggtcctcgacacagttcagcagagatgctggctctatgcccaaggtgtggacaggaaaggaggacataaaagccataactaaaactgttcgctcagttgtacgccagatgctaatatttaatactctatatatagaatactgttgaagacgcttctaaagcactagagtattgtagcactgatggaaggccttcgatgaaatgtttccctgaaagttgcatactacatcgctgaagcactacaatattgtaacactgagggaaggcctttgtatcatgacctaaattcatatagggccctctttgatgaggtaattgttgctttggttttcacttttccttacaaccttcgaattatgtggctatgtctgaaaacttaatacttctacagttctcgggtcttcataccattccaatttgtgttagctaataaacaagtcaggctatgtctgaaaccagtatctaatagttctccgcccaacaaggaactgtgcaacataaaaacaaatcttaaacaagttacatgttctgaattttagaaactcaaactccactctaagggctaaccggctaaccgaacatgttatagaacaaactcagtcctaaattgtagacatattggaattctgcgtatgttttttccaacctatcttcaaactatacaagaattattatctaatataaacaatacattgacaataatgtacacaaaaatccatgtatttaatgtgtggacatggtatcatcatgtctgactaacccttttttactttcattgaatgaagttcgtacatgtatttgaggtattttttattttcttcctactataagccttgcttagatactgatctaagatcatctccaagggacagacaaaaaatcctagaggttctcacataagtacggtttagagaagggataaaccgaggaaagcctcccccacaaatacagaaaggctgcctcgaacctatgatttggtgactcagtgaaacaaacaactctcactactgcactaggcctgccattgtttacgagcatccccaagggccttacttaaattcactctctaaattttaatttggtgagccattttaataaaaatatgtttgataggttttttatcttctaacaatttttatgtatcttgtacgcactctagagaaccaacccactcactgctctttatttactgcatgctatttaggtctgctaagcaaaaaatgatattctttctcaatcttttgtcatgtttagataaatttggtggttttaggataaagtttgtgaagggcttcactttttttttctataattagaatttaactcaaaagttttcccttgaaattcaagttgattttgagaagtatgaagggatgattaaggtcatggagaaggtggtaatacagttaattctatggagctcactggaggagcactaccttttgccagttgcttgcaagaatgtaattggaatccgatgtgcttcatggcgcatcgtatcctccattgagtatagggaataaggttgtgtcaacatggaccgtgccactctcatcgagggctaccataacaagattgaagttgaactcaacaagatctgcgttggaatcctcaagctctttgcttcccaccttcccccctcattaatagttccaaagtccaaggtcttctacctcaagatgaagggtgattactacaggatattgctttggaggagttggcccccttatcctattaggctttggctgatgcttaacctctcaactctcctgatcttgctcgtggtctccccaaacaggcaaagccaacgaatgaaagggactcactcgcagcaacaaccaaaaagctgatcacgcattctccttttcacatttgttgcatttaattaattcatccaatagcataaattggcactccttttgtgttattgctctttggttggtcttattgttgttgttgtactgcttgccatgtgtattttatcataagtgttgttttggctaatccctaacgatgcaatacatttgagcaacaattcaattgttttgttttttgaacagttattctaaatacccaatgttcacagcatatttcacttcccatggttcactgttttgttgtattagtagctctaattctaaggtgtcaatgaatcttaggc

SEQ ID NO: 74515 - DNA, 3094 bp, Zea Mays
atggaccttgacgcggctgcagaggaggaggagcgccggcttgaggactacaatgaggcgcaggatgctaggtacttcctggggtttggtgacacccatggagatcctattgaggttgatactgttgccggctctcaaattggcactggaaccgaatccactagcccgtcagaagcagtccctaatcctgatcaggctgctaatgctagtggtagcaacatgaagaaaaggtccaagtgctgggatgactttgatgaattgactaagattgtgaatggtaagaaagtcaggagccacgttgtgcctgccgccagccccgacacctccagatgttgcctccatccatcctccgagcttaccgcctcgcccccgcccccaaaccctagaccccctacaatcacgaggaaggggagaacggccgaggaggatgctccgcaaggaaggggaggacggtcgaggatgacgttgttgctcgtcgctgagcatcttcgcgccctcagtgctgccaaggagccctctctatccctgatggcgtcccaaccgttggtaatatctccgcctcggccatgggcattgcaaccctcgattcaatctctcctcttcgatctcaggccgatcgtcggcgatgatgacccagcctccctctccacgtccctgctccccaactcatacaggtgttgtggcgccctcctctccactcccctatctattttgttgtttgatgtctactttcttcgccgctctggttgcggcacgattggtgcaccacctcctcgtgcgaggtgagggcaagcctgcacatgctcaactccatcgacaacctcaccttcatgccactctgggagcatgccgagtggcgatgtgacgacttggtggtctatcgtcgttgcccttcgccaggtgtcgatctcttcgtcagtgaagagcatccaccagttccattcattcatttattatatggtgaatggccacaaaaccatattctatgatggcacaaggtcccaccaagatgcgtagccatgtgcaaaccatatttgtcatgtagccacaagggcccgtcgatctgttttggtttacaatgtggatgaaaacaacatggagctctggcttatgggggcttatcgatgccagcgaagcccgtgggagcaattgaagccattggacattggttgcacaacttgataaagtgaagaatctgcttgcgtctgagtttgggagtctataaacatggggaagagaaaatattggtgcctttgcaattggtgaccctgctgcaactatttttttctaggaattcacaagagcaatatggtacaccaatgccacacattggacaaacaacagttgaagttgatcttttgaattatggtgtgatagaaggtgatgaatcatgtaaacatttctctgaactaaaagtcttacatccatggatgatcaaagatggcatgaatcttacaaaggaacagagattagagaaaattgagtcacaaaaacttgaaaaatatgaagccaaaggtgacaagagacatgacttgaaagatgatcaaagtgtacaggaagaatacataaatgcatattatgaggccttgaggaaaagttggaagaggaagaagcaaaaagcagaatgcagcatgaaggcaagatttttgtccctgatgctcaaagggaacgccaagttgacaataaatacaagcaggatgatgatgaagaaggcattgaataagtattccagctttcttatatggacagtaggaacccaaggtttgctgtgtaatccattatcaacagttgcactcacattagccttgtggcgattcttttcaaaacaggatgatttaaacccatatgttgttccaatggctatgggcatttaacgtcaactagagagtcccttggatatgactacaagtactatcatcaggaggattgttgctaaccatgaagcttacctgtgtattgtcagctttcaaactcgatgaaccaactgagaaagtactgcttatgaagctagagaagcatggaaggagtgttgctgaatcaaaggcaaaagaagaagctggaagagttttgatttgcatgaaggataggtcctcgacacagttcagcagagatgctggctctatgcccaagctgttgaagacgcttctaaagcactagagtattgtagcactgatggaaggccttcgatgaaatgtttccctgaaagttgcatactacatcgctgaagcactacaatattgtaacactgagggaaggcctttgtatcatgacctaaattcatatagggccctctttgatgagggaataaggttgtgtcaacatggaccgtgccactctcatcgagggctaccataacaagattgaagttgaactcaacaagatctgcgttggaatcctcaagctctttgcttcccaccttcccccctcattaatagttccaaagtccaaggtcttctacctcaagatgaagggtgattactacaggatattgctttggaggagttggcccccttatcctattaggctttggctgatgcttaacctctcaactctcctgatcttgctcgtggtctccccaaacaggtttggtttctagatccattacatggagtgtgtagtgtttttcctcttttttgcaatcctcatgatgtgccaccaggtctggtctaatcgttcccctaaaattgtggcctataatcagcttcttggcctatgatccttttgtatgtaggcaaagccaacgaatgaaagggactcactcgcagcaacaaccaaaaagctgatcacgcattctccttttcacatttgttgcatttaattaattcatccaatagcataaattggcactccttttgtgttattgctctttggttggtcttattgttgttgttgtactgcttgccatgtgtattttatcataagtgttgttttggctaatccctaacgatgcaatacatttgagcaacaattcaattgttttgttttttgaacagttattctaaatacccaatgttcacagcatatttcacttcccatggttcactgttttgttgtattagtagctctaattctaaggtgtcaatgaatcttaggc

SEQ ID NO: 74516 - DNA, 4108 bp, Zea Mays
atggaccttgacgcggctgcagaggaggaggagcgccggcttgaggactacaatgaggcgcaggatgctaggtacttcctggggtttggtgacacccatggagatcctattgaggttgatactgttgccggctctcaaattggcactggaaccgaatccactagcccgtcagaagcagtccctaatcctgatcaggctgctaatgctagtggtagcaacatgaagaaaaggtccaagtgctgggatgactttgatgaattgactaagattgtgaatggtaagaaagtcaggagccacgttgtgcctgccgccagccccgacacctccagatgttgcctccatccatcctccgagcttaccgcctcgcccccgcccccaaaccctagaccccctacaatcacgaggaaggggagaacggccgaggaggatgctccgcaaggaaggggaggacggtcgaggatgacgttgttgctcgtcgctgagcatcttcgcgccctcagtgctgccaaggagccctctctatccctgatggcgtcccaaccgttggtaatatctccgcctcggccatgggcattgcaaccctcgattcaatctctcctcttcgatctcaggccgatcgtcggcgatgatgacccagcctccctctccacgtccctgctccccaactcatacaggtgttgtggcgccctcctctccactcccctatctattttgttgtttgatgtctactttcttcgccgctctggttgcggcacgattggtgcaccacctcctcgtgcgaggtgagggcaagcctgcacatgctcaactccatcgacaacctcaccttcatgccactctgggagcatgccgagtggcgatgtgacgacttggtggtctatcgtcgttgcccttcgccaggtgtcgatctcttcgtcagtgaagagcatccaccagttccattcattcatttattatatggtgaatggccacaaaaccatattctatgatggcacaaggtcccaccaagatgcgtagccatgtgcaaaccatatttgtcatgtagccacaagggcccgtcgatctgttttggtttacaatgtggatgaaaacaacatggagctctggcttatgggggcttatcgatgccagcgaagcccgtgggagcaattgaagccattggacattggttgcacaacttgataaagtgaagaatctgcttgcgtctgagtttgggagtctataaacatggggaagagaaaatattggtgcctttgcaattggtgaccctgctgcaactatttttttctaggaattcacaagagcaatatggtacaccaatgccacacattggacaaacaacagttgaagttgatcttttgaattatggtgtgatagaaggtgatgaatcatgtaaacatttctctgaactaaaagtcttacatccatggatgatcaaagatggcatgaatcttacaaaggaacagagattagagaaaattgagtcacaaaaacttgaaaaatatgaagccaaaggtgacaagagacatgacttgaaagatgatcaaagtgtacaggaagaatacataaatgcatattatgaggccttgaggaaaagttggaagaggaagaagcaaaaagcagaatgcagcatgaaggcaagatttttgtccctgatgctcaaagggaacgccaagttgacaataaatacaagcaggatgatgatgaagaaggcattgaataagtattccagctttcttatatggacagtaggaacccaaggtttgctgtgtaatccattatcaacagttgcactcacattagccttgtggcgattcttttcaaaacaggatgatttaaacccatatgttgttccaatggctatgggcatttaacgtcaactagagagtcccttggatatgactacaagtactatcatcaggaggattgttgctaaccatgaagcttacctgtgtattgtcagctttcaaactcgatgaaccaactgagaaagtactgcttatgaagctagagaagcatggaaggagtgttgctgaatcaaaggcaaaagaagaagctggaagagttttgatttgcatgaaggatagctgttgaagacgcttctaaagcactagagtattgtagcactgatggaaggccttcgatgaaatgtttccctgaaagttgcatactacatcgctgaagcactacaatattgtaacactgagggaaggcctttgtatcatgacctaaattcatatagggccctctttgatgaggtaattgttgctttggttttcacttttccttacaaccttcgaattatgtggctatgtctgaaaacttaatacttctacagttctcgggtcttcataccattccaatttgtgttagctaataaacaagtcaggctatgtctgaaaccagtatctaatagttctccgcccaacaaggaactgtgcaacataaaaacaaatcttaaacaagttacatgttctgaattttagaaactcaaactccactctaagggctaaccggctaaccgaacatgttatagaacaaactcagtcctaaattgtagacatattggaattctgcgtatgttttttccaacctatcttcaaactatacaagaattattatctaatataaacaatacattgacaataatgtacacaaaaatccatgtatttaatgtgtggacatggtatcatcatgtctgactaacccttttttactttcattgaatgaagttcgtacatgtatttgaggtattttttattttcttcctactataagccttgcttagatactgatctaagatcatctccaagggacagacaaaaaatcctagaggttctcacataagtacggtttagagaagggataaaccgaggaaagcctcccccacaaatacagaaaggctgcctcgaacctatgatttggtgactcagtgaaacaaacaactctcactactgcactaggcctgccattgtttacgagcatccccaagggccttacttaaattcactctctaaattttaatttggtgagccattttaataaaaatatgtttgataggttttttatcttctaacaatttttatgtatcttgtacgcactctagagaaccaacccactcactgctctttatttactgcatgctatttaggtctgctaagcaaaaaatgatattctttctcaatcttttgtcatgtttagataaatttggtggttttaggataaagtttgtgaagggcttcactttttttttctataattagaatttaactcaaaagttttcccttgaaattcaagttgattttgagaagtatgaagggatgattaaggtcatggagaaggtggtaatacagttaattctatggagctcactggaggagcactaccttttgccagttgcttgcaagaatgtaattggaatccgatgtgcttcatggcgcatcgtatcctccattgagtatagggaataaggttgtgtcaacatggaccgtgccactctcatcgagggctaccataacaagattgaagttgaactcaacaagatctgcgttggaatcctcaagctctttgcttcccaccttcccccctcattaatagttccaaagtccaaggtcttctacctcaagatgaagggtgattactacaggatattgctttggaggagttggcccccttatcctattaggctttggctgatgcttaacctctcaactctcctgatcttgctcgtggtctccccaaacaggcaaagccaacgaatgaaagggactcactcgcagcaacaaccaaaaagctgatcacgcattctccttttcacatttgttgcatttaattaattcatccaatagcataaattggcactccttttgtgttattgctctttggttggtcttattgttgttgttgtactgcttgccatgtgtattttatcataagtgttgttttggctaatccctaacgatgcaatacatttgagcaacaattcaattgttttgttttttgaacagttattctaaatacccaatgttcacagcatatttcacttcccatggttcactgttttgttgtattagtagctctaattctaaggtgtcaatgaatcttaggc

SEQ ID NO: 74517 - DNA, 2988 bp, Zea Mays
atggaccttgacgcggctgcagaggaggaggagcgccggcttgaggactacaatgaggcgcaggatgctaggtacttcctggggtttggtgacacccatggagatcctattgaggttgatactgttgccggctctcaaattggcactggaaccgaatccactagcccgtcagaagcagtccctaatcctgatcaggctgctaatgctagtggtagcaacatgaagaaaaggtccaagtgctgggatgactttgatgaattgactaagattgtgaatggtaagaaagtcaggagccacgttgtgcctgccgccagccccgacacctccagatgttgcctccatccatcctccgagcttaccgcctcgcccccgcccccaaaccctagaccccctacaatcacgaggaaggggagaacggccgaggaggatgctccgcaaggaaggggaggacggtcgaggatgacgttgttgctcgtcgctgagcatcttcgcgccctcagtgctgccaaggagccctctctatccctgatggcgtcccaaccgttggtgttgtggcgccctcctctccactcccctatctattttgttgtttgatgtctactttcttcgccgctctggttgcggcacgattggtgcaccacctcctcgtgcgaggtgagggcaagcctgcacatgctcaactccatcgacaacctcaccttcatgccactctgggagcatgccgagtggcgatgtgacgacttggtggtctatcgtcgttgcccttcgccaggtgtcgatctcttcgtcagtgaagagcatccaccaggagcaattgaagccattggacattggttgcacaacttgataaagtgaagaatctgcttgcgtctgagtttgggagtctataaacatggggaagagaaaatattggtgcctttgcaattggtgaccctgctgcaactatttttttctaggaattcacaagagcaatatggtacaccaatgccacacattggacaaacaacagttgaagttgatcttttgaattatggtgtgatagaaggtgatgaatcatgtaaacatttctctgaactaaaagtcttacatccatggatgatcaaagatggcatgaatcttacaaaggaacagagattagagaaaattgagtcacaaaaacttgaaaaatatgaagccaaaggtgacaagagacatgacttgaaagatgatcaaagtgtacaggaagaatacataaatgcatattatgaggccttgaggaaaagttggaagaggaagaagcaaaaagcagaatgcagcatgaaggcaagatttttgtccctgatgctcaaagggaacgccaagttgacaataaatacaagcaggatgatgatgaagaaggcattgaataagtattccagctttcttatatggacagtaggaacccaaggtttgctgtgtaatccattatcaacagttgcactcacattagccttgtggcgattcttttcaaaacaggatgatttaaacccatatgttgttccaatggctatgggcatttaacgtcaactagagagtcccttggatatgactacaagtactatcatcaggaggattgttgctaaccatgaagcttacctgtgtattgtcagctttcaaactcgatgaaccaactgagaaagtactgcttatgaagctagagaagcatggaaggagtgttgctgaatcaaaggcaaaagaagaagctggaagagttttgatttgcatgaaggataggtcctcgacacagttcagcagagatgctggctctatgcccaaggtgtggacaggaaaggaggacataaaagccataactaaaactgttcgctcagttgtacgccagatgctaatatttaatactctatatatagaatactgttgaagacgcttctaaagcactagagtattgtagcactgatggaaggccttcgatgaaatgtttccctgaaagttgcatactacatcgctgaagcactacaatattgtaacactgagggaaggcctttgtatcatgacctaaattcatatagggccctctttgatgaggtcatggagaaggtggtaatacagttaattctatggagctcactggaggagcactaccttttgccagttgcttgcaagaatgtaattggaatccgatgtgcttcatggcgcatcgtatcctccattgagtatagggaataaggttgtgtcaacatggaccgtgccactctcatcgagggctaccataacaagattgaagttgaactcaacaagatctgcgttggaatcctcaagctctttgcttcccaccttcccccctcattaatagttccaaagtccaaggtcttctacctcaagatgaagggtgattactacaggatattgctttggaggagttggcccccttatcctattaggctttggctgatgcttaacctctcaactctcctgatcttgctcgtggtctccccaaacaggtttggtttctagatccattacatggagtgtgtagtgtttttcctcttttttgcaatcctcatgatgtgccaccaggtctggtctaatcgttcccctaaaattgtggcctataatcagcttcttggcctatgatccttttgtatgtaggcaaagccaacgaatgaaagggactcactcgcagcaacaaccaaaaagctgatcacgcattctccttttcacatttgttgcatttaattaattcatccaatagcataaattggcactccttttgtgttattgctctttggttggtcttattgttgttgttgtactgcttgccatgtgtattttatcataagtgttgttttggctaatccctaacgatgcaatacatttgagcaacaattcaattgttttgttttttgaacagttattctaaatacccaatgttcacagcatatttcacttcccatggttcactgttttgttgtattagtagctctaattctaaggtgtcaatgaatcttaggc

SEQ ID NO: 74518 - DNA, 3562 bp, Zea Mays
atggaccttgacgcggctgcagaggaggaggagcgccggcttgaggactacaatgaggcgcaggatgctaggtacttcctggggtttggtgacacccatggagatcctattgaggttgatactgttgccggctctcaaattggcactggaaccgaatccactagcccgtcagaagcagtccctaatcctgatcaggctgctaatgctagtggtagcaacatgaagaaaaggtccaagtgctgggatgactttgatgaattgactaagattgtgaatggtaagaaagtcaggagccacgttgtgcctgccgccagccccgacacctccagatgttgcctccatccatcctccgagcttaccgcctcgcccccgcccccaaaccctagaccccctacaatcacgaggaaggggagaacggccgaggaggatgctccgcaaggaaggggaggacggtcgaggatgacgttgttgctcgtcgctgagcatcttcgcgccctcagtgctgccaaggagccctctctatccctgatggcgtcccaaccgttggtaatatctccgcctcggccatgggcattgcaaccctcgattcaatctctcctcttcgatctcaggccgatcgtcggcgatgatgacccagcctccctctccacgtccctgctccccaactcatacaggtgttgtggcgccctcctctccactcccctatctattttgttgtttgatgtctactttcttcgccgctctggttgcggcacgattggtgcaccacctcctcgtgcgaggtgagggcaagcctgcacatgctcaactccatcgacaacctcaccttcatgccactctgggagcatgccgagtggcgatgtgacgacttggtggtctatcgtcgttgcccttcgccaggtgtcgatctcttcgtcagtgaagagcatccaccagttccattcattcatttattatatggtgaatggccacaaaaccatattctatgatggcacaaggtcccaccaagatgcgtagccatgtgcaaaccatatttgtcatgtagccacaagggcccgtcgatctgttttggtttacaatgtggatgaaaacaacatggagctctggcttatgggggcttatcgatgccagcgaagcccgagcaattgaagccattggacattggttgcacaacttgataaagtgaagaatctgcttgcgtctgagtttgggagtctataaacatggggaagagaaaatattggtgcctttgcaattggtgaccctgctgcaactatttttttctaggaattcacaagagcaatatggtacaccaatgccacacattggacaaacaacagttgaagttgatcttttgaattatggtgtgatagaaggtgatgaatcatgtaaacatttctctgaactaaaagtcttacatccatggatgatcaaagatggcatgaatcttacaaaggaacagagattagagaaaattgagtcacaaaaacttgaaaaatatgaagccaaaggtgacaagagacatgacttgaaagatgatcaaagtgtacaggaagaatacataaatgcatattatgaggccttgaggaaaagttggaagaggaagaagcaaaaagcagaatgcagcatgaaggcaagatttttgtccctgatgctcaaagggaacgccaagttgacaataaatacaagcaggatgatgatgaagaaggcattgaataattatacttcacattatcatgtctttacttttggcagtgttgttagtaatgaagttgcttctcatgcaacacttcttattagcaagcagtatgtattggcaatgggttttgcattgctggaacacctgacagaaatttttagtttcccagaagtaaaggcgttctggtttgttagtaatattggccttctaatggtttatgctctatccagagtattccagctttcttatatggacagtaggaacccaaggtttgctgtgtaatccattatcaacagttgcactcacattagccttgtggcgattcttttcaaaacaggatgatttaaacccatatgttgttccaatggctatgggcatttaacgtcaactagagagtcccttggatatgactacaagtactatcatcaggaggattgttgctaaccatgaagcttacctgtgtattgtcagctttcaaactcgatgaaccaactgagaaagtactgcttatgaagctagagaagcatggaaggagtgttgctgaatcaaaggcaaaagaagaagctggaagagttttgatttgcatgaaggataggtcctcgacacagttcagcagagatgctggctctatgcccaaggtgtggacaggaaaggaggacataaaagccataactaaaactgttcgctcagttgtacgccagatgctaatatttaatactctatatatagaatactgttgaagacgcttctaaagcactagagtattgtagcactgatggaaggccttcgatgaaatgtttccctgaaagttgcatactacatcgctgaagcactacaatattgtaacactgagggaaggcctttgtatcatgacctaaattcatatagggccctctttgatgagttgattttgagaagtatgaagggatgattaaggtcatggagaaggtggtaatacagttaattctatggagctcactggaggagcactaccttttgccagttgcttgcaagaatgtaattggaatccgatgtgcttcatggcgcatcgtatcctccattgagtatagggaataaggttgtgtcaacatggaccgtgccactctcatcgagggctaccataacaagattgaagttgaactcaacaagatctgcgttggaatcctcaagctctttgcttcccaccttcccccctcattaatagttccaaagtccaaggtcttctacctcaagatgaagggtgattactacaggatattgctttggaggagttggcccccttatcctattaggctttggctgatgcttaacctctcaactctcctgatcttgctcgtggtctccccaaacaggtttggtttctagatccattacatggagtgtgtagtgtttttcctcttttttgcaatcctcatgatgtgccaccaggtctggtctaatcgttcccctaaaattgtggcctataatcagcttcttggcctatgatccttttgtatgtaggcaaagccaacgaatgaaagggactcactcgcagcaacaaccaaaaagctgatcacgcattctccttttcacatttgttgcatttaattaattcatccaatagcataaattggcactccttttgtgttattgctctttggttggtcttattgttgttgttgtactgcttgccatgtgtattttatcataagtgttgttttggctaatccctaacgatgcaatacatttgagcaacaattcaattgttttgttttttgaacagttattctaaatacccaatgttcacagcatatttcacttcccatggttcactgttttgttgtattagtagctctaattctaaggtgtcaatgaatcttaggc

SEQ ID NO: 74519 - DNA, 4151 bp, Zea Mays
atggaccttgacgcggctgcagaggaggaggagcgccggcttgaggactacaatgaggcgcaggatgctaggtacttcctggggtttggtgacacccatggagatcctattgaggttgatactgttgccggctctcaaattggcactggaaccgaatccactagcccgtcagaagcagtccctaatcctgatcaggctgctaatgctagtggtagcaacatgaagaaaaggtccaagtgctgggatgactttgatgaattgactaagattgtgaatggtaagaaagtcaggagccacgttgtgcctgccgccagccccgacacctccagatgttgcctccatccatcctccgagcttaccgcctcgcccccgcccccaaaccctagaccccctacaatcacgaggaaggggagaacggccgaggaggatgctccgcaaggaaggggaggacggtcgaggatgacgttgttgctcgtcgctgagcatcttcgcgccctcagtgctgccaaggagccctctctatccctgatggcgtcccaaccgttggtaatatctccgcctcggccatgggcattgcaaccctcgattcaatctctcctcttcgatctcaggccgatcgtcggcgatgatgacccagcctccctctccacgtccctgctccccaactcatacaggtgttgtggcgccctcctctccactcccctatctattttgttgtttgatgtctactttcttcgccgctctggttgcggcacgattggtgcaccacctcctcgtgcgaggtgagggcaagcctgcacatgctcaactccatcgacaacctcaccttcatgccactctgggagcatgccgagtggcgatgtgacgacttggtggtctatcgtcgttgcccttcgccaggtgtcgatctcttcgtcagtgaagagcatccaccagttccattcattcatttattatatggtgaatggccacaaaaccatattctatgatggcacaaggtcccaccaagatgcgtagccatgtgcaaaccatatttgtcatgtagccacaagggcccgtcgatctgttttggtttacaatgtggatgaaaacaacatggagctctggcttatgggggcttatcgatgccagcgaagcccgtgggagcaattgaagccattggacattggttgcacaacttgataaagtgaagaatctgcttgcgtctgagtttgggagtctataaacatggggaagagaaaatattggtgcctttgcaattggtgaccctgctgcaactatttttttctaggaattcacaagagcaatatggtacaccaatgccacacattggacaaacaacagttgaagttgatcttttgaattatggtgtgatagaaggtgatgaatcatgtaaacatttctctgaactaaaagtcttacatccatggatgatcaaagatggcatgaatcttacaaaggaacagagattagagaaaattgagtcacaaaaacttgaaaaatatgaagccaaaggtgacaagagacatgacttgaaagatgatcaaagtgtacaggaagaatacataaatgcatattatgaggccttgaggaaaagttggaagaggaagaagcaaaaagcagaatgcagcatgaaggcaagatttttgtccctgatgctcaaagggaacgccaagttgacaataaatacaagcaggatgatgatgaagaaggcattgaataagtattccagctttcttatatggacagtaggaacccaaggtttgctgtgtaatccattatcaacagttgcactcacattagccttgtggcgattcttttcaaaacaggatgatttaaacccatatgttgttccaatggctatgggcatttaacgtcaactagagagtcccttggatatgactacaagtactatcatcaggaggattgttgctaaccatgaagcttacctgtgtattgtcagctttcaaactcgatgaaccaactgagaaagtactgcttatgaagctagagaagcatggaaggagtgttgctgaatcaaaggcaaaagaagaagctggaagagttttgatttgcatgaaggataggtcctcgacacagttcagcagagatgctggctctatgcccaagctgttgaagacgcttctaaagcactagagtattgtagcactgatggaaggccttcgatgaaatgtttccctgaaagttgcatactacatcgctgaagcactacaatattgtaacactgagggaaggcctttgtatcatgacctaaattcatatagggccctctttgatgaggtaattgttgctttggttttcacttttccttacaaccttcgaattatgtggctatgtctgaaaacttaatacttctacagttctcgggtcttcataccattccaatttgtgttagctaataaacaagtcaggctatgtctgaaaccagtatctaatagttctccgcccaacaaggaactgtgcaacataaaaacaaatcttaaacaagttacatgttctgaattttagaaactcaaactccactctaagggctaaccggctaaccgaacatgttatagaacaaactcagtcctaaattgtagacatattggaattctgcgtatgttttttccaacctatcttcaaactatacaagaattattatctaatataaacaatacattgacaataatgtacacaaaaatccatgtatttaatgtgtggacatggtatcatcatgtctgactaacccttttttactttcattgaatgaagttcgtacatgtatttgaggtattttttattttcttcctactataagccttgcttagatactgatctaagatcatctccaagggacagacaaaaaatcctagaggttctcacataagtacggtttagagaagggataaaccgaggaaagcctcccccacaaatacagaaaggctgcctcgaacctatgatttggtgactcagtgaaacaaacaactctcactactgcactaggcctgccattgtttacgagcatccccaagggccttacttaaattcactctctaaattttaatttggtgagccattttaataaaaatatgtttgataggttttttatcttctaacaatttttatgtatcttgtacgcactctagagaaccaacccactcactgctctttatttactgcatgctatttaggtctgctaagcaaaaaatgatattctttctcaatcttttgtcatgtttagataaatttggtggttttaggataaagtttgtgaagggcttcactttttttttctataattagaatttaactcaaaagttttcccttgaaattcaagttgattttgagaagtatgaagggatgattaaggtcatggagaaggtggtaatacagttaattctatggagctcactggaggagcactaccttttgccagttgcttgcaagaatgtaattggaatccgatgtgcttcatggcgcatcgtatcctccattgagtatagggaataaggttgtgtcaacatggaccgtgccactctcatcgagggctaccataacaagattgaagttgaactcaacaagatctgcgttggaatcctcaagctctttgcttcccaccttcccccctcattaatagttccaaagtccaaggtcttctacctcaagatgaagggtgattactacaggatattgctttggaggagttggcccccttatcctattaggctttggctgatgcttaacctctcaactctcctgatcttgctcgtggtctccccaaacaggcaaagccaacgaatgaaagggactcactcgcagcaacaaccaaaaagctgatcacgcattctccttttcacatttgttgcatttaattaattcatccaatagcataaattggcactccttttgtgttattgctctttggttggtcttattgttgttgttgtactgcttgccatgtgtattttatcataagtgttgttttggctaatccctaacgatgcaatacatttgagcaacaattcaattgttttgttttttgaacagttattctaaatacccaatgttcacagcatatttcacttcccatggttcactgttttgttgtattagtagctctaattctaaggtgtcaatgaatcttaggc

SEQ ID NO: 74520 - DNA, 3879 bp, Zea Mays
atggaccttgacgcggctgcagaggaggaggagcgccggcttgaggactacaatgaggcgcaggatgctaggtacttcctggggtttggtgacacccatggagatcctattgaggttgatactgttgccggctctcaaattggcactggaaccgaatccactagcccgtcagaagcagtccctaatcctgatcaggctgctaatgctagtggtagcaacatgaagaaaaggtccaagtgctgggatgactttgatgaattgactaagattgtgaatggtaagaaagtcaggagccacgttgtgcctgccgccagccccgacacctccagatgttgcctccatccatcctccgagcttaccgcctcgcccccgcccccaaaccctagaccccctacaatcacgaggaaggggagaacggccgaggaggatgctccgcaaggaaggggaggacggtcgaggatgacgttgttgctcgtcgctgagcatcttcgcgccctcagtgctgccaaggagccctctctatccctgatggcgtcccaaccgttggccgatcgtcggcgatgatgacccagcctccctctccacgtccctgctccccaactcatacaggtgttgtggcgccctcctctccactcccctatctattttgttgtttgatgtctactttcttcgccgctctggttgcggcacgattggtgcaccacctcctcgtgcgaggtgagggcaagcctgcacatgctcaactccatcgacaacctcaccttcatgccactctgggagcatgccgagtggcgatgtgacgacttggtggtctatcgtcgttgcccttcgccaggtgtcgatctcttcgtcagtgaagagcatccaccaggagcaattgaagccattggacattggttgcacaacttgataaagtgaagaatctgcttgcgtctgagtttgggagtctataaacatggggaagagaaaatattggtgcctttgcaattggtgaccctgctgcaactatttttttctaggaattcacaagagcaatatggtacaccaatgccacacattggacaaacaacagttgaagttgatcttttgaattatggtgtgatagaaggtgatgaatcatgtaaacatttctctgaactaaaagtcttacatccatggatgatcaaagatggcatgaatcttacaaaggaacagagattagagaaaattgagtcacaaaaacttgaaaaatatgaagccaaaggtgacaagagacatgacttgaaagatgatcaaagtgtacaggaagaatacataaatgcatattatgaggccttgaggaaaagttggaagaggaagaagcaaaaagcagaatgcagcatgaaggcaagatttttgtccctgatgctcaaagggaacgccaagttgacaataaatacaagcaggatgatgatgaagaaggcattgaataagtattccagctttcttatatggacagtaggaacccaaggtttgctgtgtaatccattatcaacagttgcactcacattagccttgtggcgattcttttcaaaacaggatgatttaaacccatatgttgttccaatggctatgggcatttaacgtcaactagagagtcccttggatatgactacaagtactatcatcaggaggattgttgctaaccatgaagcttacctgtgtattgtcagctttcaaactcgatgaaccaactgagaaagtactgcttatgaagctagagaagcatggaaggagtgttgctgaatcaaaggcaaaagaagaagctggaagagttttgatttgcatgaaggataggtcctcgacacagttcagcagagatgctggctctatgcccaagctgttgaagacgcttctaaagcactagagtattgtagcactgatggaaggccttcgatgaaatgtttccctgaaagttgcatactacatcgctgaagcactacaatattgtaacactgagggaaggcctttgtatcatgacctaaattcatatagggccctctttgatgaggtaattgttgctttggttttcacttttccttacaaccttcgaattatgtggctatgtctgaaaacttaatacttctacagttctcgggtcttcataccattccaatttgtgttagctaataaacaagtcaggctatgtctgaaaccagtatctaatagttctccgcccaacaaggaactgtgcaacataaaaacaaatcttaaacaagttacatgttctgaattttagaaactcaaactccactctaagggctaaccggctaaccgaacatgttatagaacaaactcagtcctaaattgtagacatattggaattctgcgtatgttttttccaacctatcttcaaactatacaagaattattatctaatataaacaatacattgacaataatgtacacaaaaatccatgtatttaatgtgtggacatggtatcatcatgtctgactaacccttttttactttcattgaatgaagttcgtacatgtatttgaggtattttttattttcttcctactataagccttgcttagatactgatctaagatcatctccaagggacagacaaaaaatcctagaggttctcacataagtacggtttagagaagggataaaccgaggaaagcctcccccacaaatacagaaaggctgcctcgaacctatgatttggtgactcagtgaaacaaacaactctcactactgcactaggcctgccattgtttacgagcatccccaagggccttacttaaattcactctctaaattttaatttggtgagccattttaataaaaatatgtttgataggttttttatcttctaacaatttttatgtatcttgtacgcactctagagaaccaacccactcactgctctttatttactgcatgctatttaggtctgctaagcaaaaaatgatattctttctcaatcttttgtcatgtttagataaatttggtggttttaggataaagtttgtgaagggcttcactttttttttctataattagaatttaactcaaaagttttcccttgaaattcaagttgattttgagaagtatgaagggatgattaaggtcatggagaaggtggtaatacagttaattctatggagctcactggaggagcactaccttttgccagttgcttgcaagaatgtaattggaatccgatgtgcttcatggcgcatcgtatcctccattgagtatagggaataaggttgtgtcaacatggaccgtgccactctcatcgagggctaccataacaagattgaagttgaactcaacaagatctgcgttggaatcctcaagctctttgcttcccaccttcccccctcattaatagttccaaagtccaaggtcttctacctcaagatgaagggtgattactacaggatattgctttggaggagttggcccccttatcctattaggctttggctgatgcttaacctctcaactctcctgatcttgctcgtggtctccccaaacaggcaaagccaacgaatgaaagggactcactcgcagcaacaaccaaaaagctgatcacgcattctccttttcacatttgttgcatttaattaattcatccaatagcataaattggcactccttttgtgttattgctctttggttggtcttattgttgttgttgtactgcttgccatgtgtattttatcataagtgttgttttggctaatccctaacgatgcaatacatttgagcaacaattcaattgttttgttttttgaacagttattctaaatacccaatgttcacagcatatttcacttcccatggttcactgttttgttgtattagtagctctaattctaaggtgtcaatgaatcttaggc

SEQ ID NO: 74521 - DNA, 2979 bp, Zea Mays
atggaccttgacgcggctgcagaggaggaggagcgccggcttgaggactacaatgaggcgcaggatgctaggtacttcctggggtttggtgacacccatggagatcctattgaggttgatactgttgccggctctcaaattggcactggaaccgaatccactagcccgtcagaagcagtccctaatcctgatcaggctgctaatgctagtggtagcaacatgaagaaaaggtccaagtgctgggatgactttgatgaattgactaagattgtgaatggtaagaaagtcaggagccacgttgtgcctgccgccagccccgacacctccagatgttgcctccatccatcctccgagcttaccgcctcgcccccgcccccaaaccctagaccccctacaatcacgaggaaggggagaacggccgaggaggatgctccgcaaggaaggggaggacggtcgaggatgacgttgttgctcgtcgctgagcatcttcgcgccctcagtgctgccaaggagccctctctatccctgatggcgtcccaaccgttggtaatatctccgcctcggccatgggcattgcaaccctcgattcaatctctcctcttcgatctcaggccgatcgtcggcgatgatgacccagcctccctctccacgtccctgctccccaactcatacaggtgttgtggcgccctcctctccactcccctatctattttgttgtttgatgtctactttcttcgccgctctggttgcggcacgattggtgcaccacctcctcgtgcgaggtgagggcaagcctgcacatgctcaactccatcgacaacctcaccttcatgccactctgggagcatgccgagtggcgatgtgacgacttggtggtctatcgtcgttgcccttcgccaggtgtcgatctcttcgtcagtgaagagcatccaccaggagcaattgaagccattggacattggttgcacaacttgataaagtgaagaatctgcttgcgtctgagtttgggagtctataaacatggggaagagaaaatattggtgcctttgcaattggtgaccctgctgcaactatttttttctaggaattcacaagagcaatatggtacaccaatgccacacattggacaaacaacagttgaagttgatcttttgaattatggtgtgatagaaggtgatgaatcatgtaaacatttctctgaactaaaagtcttacatccatggatgatcaaagatggcatgaatcttacaaaggaacagagattagagaaaattgagtcacaaaaacttgaaaaatatgaagccaaaggtgacaagagacatgacttgaaagatgatcaaagtgtacaggaagaatacataaatgcatattatgaggccttgaggaaaagttggaagaggaagaagcaaaaagcagaatgcagcatgaaggcaagatttttgtccctgatgctcaaagggaacgccaagttgacaataaatacaagcaggatgatgatgaagaaggcattgaataagtattccagctttcttatatggacagtaggaacccaaggtttgctgtgtaatccattatcaacagttgcactcacattagccttgtggcgattcttttcaaaacaggatgatttaaacccatatgttgttccaatggctatgggcatttaacgtcaactagagagtcccttggatatgactacaagtactatcatcaggaggattgttgctaaccatgaagcttacctgtgtattgtcagctttcaaactcgatgaaccaactgagaaagtactgcttatgaagctagagaagcatggaaggagtgttgctgaatcaaaggcaaaagaagaagctggaagagttttgatttgcatgaaggataggtcctcgacacagttcagcagagatgctggctctatgcccaaggtgtggacaggaaaggaggacataaaagccataactaaaactgttcgctcagttgtacgccagatgctaatatttaatactctatatatagaatactgttgaagacgcttctaaagcactagagtattgtagcactgatggaaggccttcgatgaaatgtttccctgaaagttgcatactacatcgctgaagcactacaatattgtaacactgagggaaggcctttgtatcatgacctaaattcatatagggccctctttgatgagggatgattaaggtcatggagaaggtggtaatacagttaattctatggagctcactggaggagcactaccttttgccagttgcttgcaagaatgtaattggaatccgatgtgcttcatggcgcatcgtatcctccattgagtatagggaataaggttgtgtcaacatggaccgtgccactctcatcgagggctaccataacaagattgaagttgaactcaacaagatctgcgttggaatcctcaagctctttgcttcccaccttcccccctcattaatagttccaaagtccaaggtcttctacctcaagatgaagggtgattactacaggatattgctttggaggagttggcccccttatcctattaggctttggctgatgcttaacctctcaactctcctgatcttgctcgtggtctccccaaacaggcaaagccaacgaatgaaagggactcactcgcagcaacaaccaaaaagctgatcacgcattctccttttcacatttgttgcatttaattaattcatccaatagcataaattggcactccttttgtgttattgctctttggttggtcttattgttgttgttgtactgcttgccatgtgtattttatcataagtgttgttttggctaatccctaacgatgcaatacatttgagcaacaattcaattgttttgttttttgaacagttattctaaatacccaatgttcacagcatatttcacttcccatggttcactgttttgttgtattagtagctctaattctaaggtgtcaatgaatcttaggc

SEQ ID NO: 74522 - DNA, 4492 bp, Zea Mays
atggaccttgacgcggctgcagaggaggaggagcgccggcttgaggactacaatgaggcgcaggatgctaggtacttcctggggtttggtgacacccatggagatcctattgaggttgatactgttgccggctctcaaattggcactggaaccgaatccactagcccgtcagaagcagtccctaatcctgatcaggctgctaatgctagtggtagcaacatgaagaaaaggtccaagtgctgggatgactttgatgaattgactaagattgtgaatggtaagaaagtcaggagccacgttgtgcctgccgccagccccgacacctccagatgttgcctccatccatcctccgagcttaccgcctcgcccccgcccccaaaccctagaccccctacaatcacgaggaaggggagaacggccgaggaggatgctccgcaaggaaggggaggacggtcgaggatgacgttgttgctcgtcgctgagcatcttcgcgccctcagtgctgccaaggagccctctctatccctgatggcgtcccaaccgttggccgatcgtcggcgatgatgacccagcctccctctccacgtccctgctccccaactcatacaggtgttgtggcgccctcctctccactcccctatctattttgttgtttgatgtctactttcttcgccgctctggttgcggcacgattggtgcaccacctcctcgtgcgaggtgagggcaagcctgcacatgctcaactccatcgacaacctcaccttcatgccactctgggagcatgccgagtggcgatgtgacgacttggtggtctatcgtcgttgcccttcgccaggtgtcgatctcttcgtcagtgaagagcatccaccagttccattcattcatttattatatggtgaatggccacaaaaccatattctatgatggcacaaggtcccaccaagatgcgtagccatgtgcaaaccatatttgtcatgtagccacaagggcccgtcgatctgttttggtttacaatgtggatgaaaacaacatggagctctggcttatgggggcttatcgatgccagcgaagcccgtgggagcaattgaagccattggacattggttgcacaacttgataaagtgaagaatctgcttgcgtctgagtttgggagtctataaacatggggaagagaaaatattggtgcctttgcaattggtgaccctgctgcaactatttttttctaggaattcacaagagcaatatggtacaccaatgccacacattggacaaacaacagttgaagttgatcttttgaattatggtgtgatagaaggtgatgaatcatgtaaacatttctctgaactaaaagtcttacatccatggatgatcaaagatggcatgaatcttacaaaggaacagagattagagaaaattgagtcacaaaaacttgaaaaatatgaagccaaaggtgacaagagacatgacttgaaagatgatcaaagtgtacaggaagaatacataaatgcatattatgaggccttgaggaaaagttggaagaggaagaagcaaaaagcagaatgcagcatgaaggcaagatttttgtccctgatgctcaaagggaacgccaagttgacaataaatacaagcaggatgatgatgaagaaggcattgaataagtattccagctttcttatatggacagtaggaacccaaggtttgctgtgtaatccattatcaacagttgcactcacattagccttgtggcgattcttttcaaaacaggatgatttaaacccatatgttgttccaatggctatgggcatttaacgtcaactagagagtcccttggatatgactacaagtactatcatcaggaggattgttgctaaccatgaagcttacctgtgtattgtcagctttcaaactcgatgaaccaactgagaaagtactgcttatgaagctagagaagcatggaaggagtgttgctgaatcaaaggcaaaagaagaagctggaagagttttgatttgcatgaaggataggtcctcgacacagttcagcagagatgctggctctatgcccaaggtgtggacaggaaaggaggacataaaagccataactaaaactgttcgctcagttgtacgccagatgctaatatttaatactctatatatagaatactgttgaagacgcttctaaagcactagagtattgtagcactgatggaaggccttcgatgaaatgtttccctgaaagttgcatactacatcgctgaagcactacaatattgtaacactgagggaaggcctttgtatcatgacctaaattcatatagggccctctttgatgaggtaattgttgctttggttttcacttttccttacaaccttcgaattatgtggctatgtctgaaaacttaatacttctacagttctcgggtcttcataccattccaatttgtgttagctaataaacaagtcaggctatgtctgaaaccagtatctaatagttctccgcccaacaaggaactgtgcaacataaaaacaaatcttaaacaagttacatgttctgaattttagaaactcaaactccactctaagggctaaccggctaaccgaacatgttatagaacaaactcagtcctaaattgtagacatattggaattctgcgtatgttttttccaacctatcttcaaactatacaagaattattatctaatataaacaatacattgacaataatgtacacaaaaatccatgtatttaatgtgtggacatggtatcatcatgtctgactaacccttttttactttcattgaatgaagttcgtacatgtatttgaggtattttttattttcttcctactataagccttgcttagatactgatctaagatcatctccaagggacagacaaaaaatcctagaggttctcacataagtacggtttagagaagggataaaccgaggaaagcctcccccacaaatacagaaaggctgcctcgaacctatgatttggtgactcagtgaaacaaacaactctcactactgcactaggcctgccattgtttacgagcatccccaagggccttacttaaattcactctctaaattttaatttggtgagccattttaataaaaatatgtttgataggttttttatcttctaacaatttttatgtatcttgtacgcactctagagaaccaacccactcactgctctttatttactgcatgctatttaggtctgctaagcaaaaaatgatattctttctcaatcttttgtcatgtttagataaatttggtggttttaggataaagtttgtgaagggcttcactttttttttctataattagaatttaactcaaaagttttcccttgaaattcaagttgattttgagaagtatgaagggatgattaaggtcatggagaaggtggtaatacagttaattctatggagctcactggaggagcactaccttttgccagttgcttgcaagaatgtaattggaatccgatgtgcttcatggcgcatcgtatcctccattgagtatagggaataaggttgtgtcaacatggaccgtgccactctcatcgagggctaccataacaagattgaagttgaactcaacaagatctgcgttggaatcctcaagctctttgcttcccaccttcccccctcattaatagttccaaagtccaaggtcttctacctcaagatgaagggtgattactacaggatattgctttggaggagttggcccccttatcctattaggctttggctgatgcttaacctctcaactctcctgatcttgctcgtggtctccccaaacagattgacacggtgggaggaaaaagacaatggtcagcaacttactcggagcagaaattttttaattgtggtacccgtggtgctgtaagtttcatctcatcctcttgtagttcacacttgaacaaagtactctttagattctatacaggcagcgattgcttgtgcaattatattccacttcattcctaattaacaatttgggtcttatgattgacgactttgactttatcaccataaataaacctgacacacgaattatatctggattctggaacaggttcaataagagagcatcatagtgttgcataaataagtgtgcttatgattcatatttgctcattgcaaattggagttatttgtgttgtttctttgtatactcaacaaagagatgttaaccacttgtgtttatctcattgccacactcagttatgtcacgtaacttcattttcatgttttattttgttccagcaatgtagtttatctttgttttaatagctctttctttgtaaaacaacattttgttgtggttattatgcggataagagaacctaaaactacaacactgatgtttgtgtgacataagagaacctaaaacacattgatgacgtttggggccaagaactatagtggggtggttgatgtacttggagaatgagaagttgaagaatggacttaag

SEQ ID NO: 74523 - DNA, 3743 bp, Zea Mays
atggaccttgacgcggctgcagaggaggaggagcgccggcttgaggactacaatgaggcgcaggatgctaggtacttcctggggtttggtgacacccatggagatcctattgaggttgatactgttgccggctctcaaattggcactggaaccgaatccactagcccgtcagaagcagtccctaatcctgatcaggctgctaatgctagtggtagcaacatgaagaaaaggtccaagtgctgggatgactttgatgaattgactaagattgtgaatggtaagaaagtcaggagccacgttgtgcctgccgccagccccgacacctccagatgttgcctccatccatcctccgagcttaccgcctcgcccccgcccccaaaccctagaccccctacaatcacgaggaaggggagaacggccgaggaggatgctccgcaaggaaggggaggacggtcgaggatgacgttgttgctcgtcgctgagcatcttcgcgccctcagtgctgccaaggagccctctctatccctgatggcgtcccaaccgttggtaatatctccgcctcggccatgggcattgcaaccctcgattcaatctctcctcttcgatctcagtatttaagattttgaattagatttgtatattatttttctattatattaggagcaattgaagccattggacattggttgcacaacttgataaagtgaagaatctgcttgcgtctgagtttgggagtctataaacatggggaagagaaaatattggtgcctttgcaattggtgaccctgctgcaactatttttttctaggaattcacaagagcaatatggtacaccaatgccacacattggacaaacaacagttgaagttgatcttttgaattatggtgtgatagaaggtgatgaatcatgtaaacatttctctgaactaaaagtcttacatccatggatgatcaaagatggcatgaatcttacaaaggaacagagattagagaaaattgagtcacaaaaacttgaaaaatatgaagccaaaggtgacaagagacatgacttgaaagatgatcaaagtgtacaggaagaatacataaatgcatattatgaggccttgaggaaaagttggaagaggaagaagcaaaaagcagaatgcagcatgaaggcaagatttttgtccctgatgctcaaagggaacgccaagttgacaataaatacaagcaggatgatgatgaagaaggcattgaataagtattccagctttcttatatggacagtaggaacccaaggtttgctgtgtaatccattatcaacagttgcactcacattagccttgtggcgattcttttcaaaacaggatgatttaaacccatatgttgttccaatggctatgggcatttaacgtcaactagagagtcccttggatatgactacaagtactatcatcaggaggattgttgctaaccatgaagcttacctgtgtattgtcagctttcaaactcgatgaaccaactgagaaagtactgcttatgaagctagagaagcatggaaggagtgttgctgaatcaaaggcaaaagaagaagctggaagagttttgatttgcatgaaggatagctgttgaagacgcttctaaagcactagagtattgtagcactgatggaaggccttcgatgaaatgtttccctgaaagttgcatactacatcgctgaagcactacaatattgtaacactgagggaaggcctttgtatcatgacctaaattcatatagggccctctttgatgaggtaattgttgctttggttttcacttttccttacaaccttcgaattatgtggctatgtctgaaaacttaatacttctacagttctcgggtcttcataccattccaatttgtgttagctaataaacaagtcaggctatgtctgaaaccagtatctaatagttctccgcccaacaaggaactgtgcaacataaaaacaaatcttaaacaagttacatgttctgaattttagaaactcaaactccactctaagggctaaccggctaaccgaacatgttatagaacaaactcagtcctaaattgtagacatattggaattctgcgtatgttttttccaacctatcttcaaactatacaagaattattatctaatataaacaatacattgacaataatgtacacaaaaatccatgtatttaatgtgtggacatggtatcatcatgtctgactaacccttttttactttcattgaatgaagttcgtacatgtatttgaggtattttttattttcttcctactataagccttgcttagatactgatctaagatcatctccaagggacagacaaaaaatcctagaggttctcacataagtacggtttagagaagggataaaccgaggaaagcctcccccacaaatacagaaaggctgcctcgaacctatgatttggtgactcagtgaaacaaacaactctcactactgcactaggcctgccattgtttacgagcatccccaagggccttacttaaattcactctctaaattttaatttggtgagccattttaataaaaatatgtttgataggttttttatcttctaacaatttttatgtatcttgtacgcactctagagaaccaacccactcactgctctttatttactgcatgctatttaggtctgctaagcaaaaaatgatattctttctcaatcttttgtcatgtttagataaatttggtggttttaggataaagtttgtgaagggcttcactttttttttctataattagaatttaactcaaaagttttcccttgaaattcaagttgattttgagaagtatgaagggatgattaaggtcatggagaaggtggtaatacagttaattctatggagctcactggaggagcactaccttttgccagttgcttgcaagaatgtaattggaatccgatgtgcttcatggcgcatcgtatcctccattgagtatagggaataaggttgtgtcaacatggaccgtgccactctcatcgagggctaccataacaagattgaagttgaactcaacaagatctgcgttggaatcctcaagctctttgcttcccaccttcccccctcattaatagttccaaagtccaaggtcttctacctcaagatgaagggtgattactacaggatattgctttggaggagttggcccccttatcctattaggctttggctgatgcttaacctctcaactctcctgatcttgctcgtggtctccccaaacagattgacacggtgggaggaaaaagacaatggtcagcaacttactcggagcagaaattttttaattgtggtacccgtggtgctgttcaataagagagcatcatagtgttgcataaataagtgtgcttatgattcatatttgctcattgcaaattggagttatttgtgttgtttctttgtatactcaacaaagagatgttaaccacttgtgtttatctcattgccacactcagttatgtcacgtaacttcattttcatgttttattttgttccagcaatgtagtttatctttgttttaatagctctttctttgtaaaacaacattttgttgtggttattatgcggataagagaacctaaaactacaacactgatgtttgtgtgacataagagaacctaaaacacattgatgacgtttggggccaagaactatagtggggtggttgatgtacttggagaatgagaagttgaagaatggacttaag

SEQ ID NO: 74524 - DNA, 4074 bp, Zea Mays
atggaccttgacgcggctgcagaggaggaggagcgccggcttgaggactacaatgaggcgcaggatgctaggtacttcctggggtttggtgacacccatggagatcctattgaggttgatactgttgccggctctcaaattggcactggaaccgaatccactagcccgtcagaagcagtccctaatcctgatcaggctgctaatgctagtggtagcaacatgaagaaaaggtccaagtgctgggatgactttgatgaattgactaagattgtgaatggtaagaaagtcaggagccacgttgtgcctgccgccagccccgacacctccagatgttgcctccatccatcctccgagcttaccgcctcgcccccgcccccaaaccctagaccccctacaatcacgaggaaggggagaacggccgaggaggatgctccgcaaggaaggggaggacggtcgaggatgacgttgttgctcgtcgctgagcatcttcgcgccctcagtgctgccaaggagccctctctatccctgatggcgtcccaaccgttggtaatatctccgcctcggccatgggcattgcaaccctcgattcaatctctcctcttcgatctcagtatttaagattttgaattagatttgtatattatttttctattatattaggagcaattgaagccattggacattggttgcacaacttgataaagtgaagaatctgcttgcgtctgagtttgggagtctataaacatggggaagagaaaatattggtgcctttgcaattggtgaccctgctgcaactatttttttctaggaattcacaagagcaatatggtacaccaatgccacacattggacaaacaacagttgaagttgatcttttgaattatggtgtgatagaaggtgatgaatcatgtaaacatttctctgaactaaaagtcttacatccatggatgatcaaagatggcatgaatcttacaaaggaacagagattagagaaaattgagtcacaaaaacttgaaaaatatgaagccaaaggtgacaagagacatgacttgaaagatgatcaaagtgtacaggaagaatacataaatgcatattatgaggccttgaggaaaagttggaagaggaagaagcaaaaagcagaatgcagcatgaaggcaagatttttgtccctgatgctcaaagggaacgccaagttgacaataaatacaagcaggatgatgatgaagaaggcattgaataagtattccagctttcttatatggacagtaggaacccaaggtttgctgtgtaatccattatcaacagttgcactcacattagccttgtggcgattcttttcaaaacaggatgatttaaacccatatgttgttccaatggctatgggcatttaacgtcaactagagagtcccttggatatgactacaagtactatcatcaggaggattgttgctaaccatgaagcttacctgtgtattgtcagctttcaaactcgatgaaccaactgagaaagtactgcttatgaagctagagaagcatggaaggagtgttgctgaatcaaaggcaaaagaagaagctggaagagttttgatttgcatgaaggataggtcctcgacacagttcagcagagatgctggctctatgcccaaggtgtggacaggaaaggaggacataaaagccataactaaaactgttcgctcagttgtacgccagatgctaatatttaatactctatatatagaatactgttgaagacgcttctaaagcactagagtattgtagcactgatggaaggccttcgatgaaatgtttccctgaaagttgcatactacatcgctgaagcactacaatattgtaacactgagggaaggcctttgtatcatgacctaaattcatatagggccctctttgatgaggtaattgttgctttggttttcacttttccttacaaccttcgaattatgtggctatgtctgaaaacttaatacttctacagttctcgggtcttcataccattccaatttgtgttagctaataaacaagtcaggctatgtctgaaaccagtatctaatagttctccgcccaacaaggaactgtgcaacataaaaacaaatcttaaacaagttacatgttctgaattttagaaactcaaactccactctaagggctaaccggctaaccgaacatgttatagaacaaactcagtcctaaattgtagacatattggaattctgcgtatgttttttccaacctatcttcaaactatacaagaattattatctaatataaacaatacattgacaataatgtacacaaaaatccatgtatttaatgtgtggacatggtatcatcatgtctgactaacccttttttactttcattgaatgaagttcgtacatgtatttgaggtattttttattttcttcctactataagccttgcttagatactgatctaagatcatctccaagggacagacaaaaaatcctagaggttctcacataagtacggtttagagaagggataaaccgaggaaagcctcccccacaaatacagaaaggctgcctcgaacctatgatttggtgactcagtgaaacaaacaactctcactactgcactaggcctgccattgtttacgagcatccccaagggccttacttaaattcactctctaaattttaatttggtgagccattttaataaaaatatgtttgataggttttttatcttctaacaatttttatgtatcttgtacgcactctagagaaccaacccactcactgctctttatttactgcatgctatttaggtctgctaagcaaaaaatgatattctttctcaatcttttgtcatgtttagataaatttggtggttttaggataaagtttgtgaagggcttcactttttttttctataattagaatttaactcaaaagttttcccttgaaattcaagttgattttgagaagtatgaagggatgattaaggtcatggagaaggtggtaatacagttaattctatggagctcactggaggagcactaccttttgccagttgcttgcaagaatgtaattggaatccgatgtgcttcatggcgcatcgtatcctccattgagtatagggaataaggttgtgtcaacatggaccgtgccactctcatcgagggctaccataacaagattgaagttgaactcaacaagatctgcgttggaatcctcaagctctttgcttcccaccttcccccctcattaatagttccaaagtccaaggtcttctacctcaagatgaagggtgattactacaggatattgctttggaggagttggcccccttatcctattaggctttggctgatgcttaacctctcaactctcctgatcttgctcgtggtctccccaaacagattgacacggtgggaggaaaaagacaatggtcagcaacttactcggagcagaaattttttaattgtggtacccgtggtgctgtaagtttcatctcatcctcttgtagttcacacttgaacaaagtactctttagattctatacaggcagcgattgcttgtgcaattatattccacttcattcctaattaacaatttgggtcttatgattgacgactttgactttatcaccataaataaacctgacacacgaattatatctggattctggaacaggttcaataagagagcatcatagtgttgcataaataagtgtgcttatgattcatatttgctcattgcaaattggagttatttgtgttgtttctttgtatactcaacaaagagatgttaaccacttgtgtttatctcattgccacactcagttatgtcacgtaacttcattttcatgttttattttgttccagcaatgtagtttatctttgttttaatagctctttctttgtaaaacaacattttgttgtggttattatgcggataagagaacctaaaactacaacactgatgtttgtgtgacataagagaacctaaaacacattgatgacgtttggggccaagaactatagtggggtggttgatgtacttggagaatgagaagttgaagaatggacttaag

SEQ ID NO: 74525 - DNA, 4419 bp, Zea Mays
atggaccttgacgcggctgcagaggaggaggagcgccggcttgaggactacaatgaggcgcaggatgctaggtacttcctggggtttggtgacacccatggagatcctattgaggttgatactgttgccggctctcaaattggcactggaaccgaatccactagcccgtcagaagcagtccctaatcctgatcaggctgctaatgctagtggtagcaacatgaagaaaaggtccaagtgctgggatgactttgatgaattgactaagattgtgaatggtaagaaagtcaggagccacgttgtgcctgccgccagccccgacacctccagatgttgcctccatccatcctccgagcttaccgcctcgcccccgcccccaaaccctagaccccctacaatcacgaggaaggggagaacggccgaggaggatgctccgcaaggaaggggaggacggtcgaggatgacgttgttgctcgtcgctgagcatcttcgcgccctcagtgctgccaaggagccctctctatccctgatggcgtcccaaccgttggtaatatctccgcctcggccatgggcattgcaaccctcgattcaatctctcctcttcgatctcaggccgatcgtcggcgatgatgacccagcctccctctccacgtccctgctccccaactcatacaggtgttgtggcgccctcctctccactcccctatctattttgttgtttgatgtctactttcttcgccgctctggttgcggcacgattggtgcaccacctcctcgtgcgaggtgagggcaagcctgcacatgctcaactccatcgacaacctcaccttcatgccactctgggagcatgccgagtggcgatgtgacgacttggtggtctatcgtcgttgcccttcgccaggtgtcgatctcttcgtcagtgaagagcatccaccagttccattcattcatttattatatggtgaatggccacaaaaccatattctatgatggcacaaggtcccaccaagatgcgtagccatgtgcaaaccatatttgtcatgtagccacaagggcccgtcgatctgttttggtttacaatgtggatgaaaacaacatggagctctggcttatgggggcttatcgatgccagcgaagcccgtgggagcaattgaagccattggacattggttgcacaacttgataaagtgaagaatctgcttgcgtctgagtttgggagtctataaacatggggaagagaaaatattggtgcctttgcaattggtgaccctgctgcaactatttttttctaggaattcacaagagcaatatggtacaccaatgccacacattggacaaacaacagttgaagttgatcttttgaattatggtgtgatagaaggtgatgaatcatgtaaacatttctctgaactaaaagtcttacatccatggatgatcaaagatggcatgaatcttacaaaggaacagagattagagaaaattgagtcacaaaaacttgaaaaatatgaagccaaaggtgacaagagacatgacttgaaagatgatcaaagtgtacaggaagaatacataaatgcatattatgaggccttgaggaaaagttggaagaggaagaagcaaaaagcagaatgcagcatgaaggcaagatttttgtccctgatgctcaaagggaacgccaagttgacaataaatacaagcaggatgatgatgaagaaggcattgaataagtattccagctttcttatatggacagtaggaacccaaggtttgctgtgtaatccattatcaacagttgcactcacattagccttgtggcgattcttttcaaaacaggatgatttaaacccatatgttgttccaatggctatgggcatttaacgtcaactagagagtcccttggatatgactacaagtactatcatcaggaggattgttgctaaccatgaagcttacctgtgtattgtcagctttcaaactcgatgaaccaactgagaaagtactgcttatgaagctagagaagcatggaaggagtgttgctgaatcaaaggcaaaagaagaagctggaagagttttgatttgcatgaaggatagctgttgaagacgcttctaaagcactagagtattgtagcactgatggaaggccttcgatgaaatgtttccctgaaagttgcatactacatcgctgaagcactacaatattgtaacactgagggaaggcctttgtatcatgacctaaattcatatagggccctctttgatgaggtaattgttgctttggttttcacttttccttacaaccttcgaattatgtggctatgtctgaaaacttaatacttctacagttctcgggtcttcataccattccaatttgtgttagctaataaacaagtcaggctatgtctgaaaccagtatctaatagttctccgcccaacaaggaactgtgcaacataaaaacaaatcttaaacaagttacatgttctgaattttagaaactcaaactccactctaagggctaaccggctaaccgaacatgttatagaacaaactcagtcctaaattgtagacatattggaattctgcgtatgttttttccaacctatcttcaaactatacaagaattattatctaatataaacaatacattgacaataatgtacacaaaaatccatgtatttaatgtgtggacatggtatcatcatgtctgactaacccttttttactttcattgaatgaagttcgtacatgtatttgaggtattttttattttcttcctactataagccttgcttagatactgatctaagatcatctccaagggacagacaaaaaatcctagaggttctcacataagtacggtttagagaagggataaaccgaggaaagcctcccccacaaatacagaaaggctgcctcgaacctatgatttggtgactcagtgaaacaaacaactctcactactgcactaggcctgccattgtttacgagcatccccaagggccttacttaaattcactctctaaattttaatttggtgagccattttaataaaaatatgtttgataggttttttatcttctaacaatttttatgtatcttgtacgcactctagagaaccaacccactcactgctctttatttactgcatgctatttaggtctgctaagcaaaaaatgatattctttctcaatcttttgtcatgtttagataaatttggtggttttaggataaagtttgtgaagggcttcactttttttttctataattagaatttaactcaaaagttttcccttgaaattcaagttgattttgagaagtatgaagggatgattaaggtcatggagaaggtggtaatacagttaattctatggagctcactggaggagcactaccttttgccagttgcttgcaagaatgtaattggaatccgatgtgcttcatggcgcatcgtatcctccattgagtatagggaataaggttgtgtcaacatggaccgtgccactctcatcgagggctaccataacaagattgaagttgaactcaacaagatctgcgttggaatcctcaagctctttgcttcccaccttcccccctcattaatagttccaaagtccaaggtcttctacctcaagatgaagggtgattactacaggatattgctttggaggagttggcccccttatcctattaggctttggctgatgcttaacctctcaactctcctgatcttgctcgtggtctccccaaacagattgacacggtgggaggaaaaagacaatggtcagcaacttactcggagcagaaattttttaattgtggtacccgtggtgctgtaagtttcatctcatcctcttgtagttcacacttgaacaaagtactctttagattctatacaggcagcgattgcttgtgcaattatattccacttcattcctaattaacaatttgggtcttatgattgacgactttgactttatcaccataaataaacctgacacacgaattatatctggattctggaacaggttcaataagagagcatcatagtgttgcataaataagtgtgcttatgattcatatttgctcattgcaaattggagttatttgtgttgtttctttgtatactcaacaaagagatgttaaccacttgtgtttatctcattgccacactcagttatgtcacgtaacttcattttcatgttttattttgttccagcaatgtagtttatctttgttttaatagctctttctttgtaaaacaacattttgttgtggttattatgcggataagagaacctaaaactacaacactgatgtttgtgtgacataagagaacctaaaacacattgatgacgtttggggccaagaactatagtggggtggttgatgtacttggagaatgagaagttgaagaatggacttaag

SEQ ID NO: 74526 - DNA, 3518 bp, Zea Mays
atggaccttgacgcggctgcagaggaggaggagcgccggcttgaggactacaatgaggcgcaggatgctaggtacttcctggggtttggtgacacccatggagatcctattgaggttgatactgttgccggctctcaaattggcactggaaccgaatccactagcccgtcagaagcagtccctaatcctgatcaggctgctaatgctagtggtagcaacatgaagaaaaggtccaagtgctgggatgactttgatgaattgactaagattgtgaatggtaagaaagtcaggagccacgttgtgcctgccgccagccccgacacctccagatgttgcctccatccatcctccgagcttaccgcctcgcccccgcccccaaaccctagaccccctacaatcacgaggaaggggagaacggccgaggaggatgctccgcaaggaaggggaggacggtcgaggatgacgttgttgctcgtcgctgagcatcttcgcgccctcagtgctgccaaggagccctctctatccctgatggcgtcccaaccgttggtaatatctccgcctcggccatgggcattgcaaccctcgattcaatctctcctcttcgatctcaggccgatcgtcggcgatgatgacccagcctccctctccacgtccctgctccccaactcatacaggtgttgtggcgccctcctctccactcccctatctattttgttgtttgatgtctactttcttcgccgctctggttgcggcacgattggtgcaccacctcctcgtgcgaggtgagggcaagcctgcacatgctcaactccatcgacaacctcaccttcatgccactctgggagcatgccgagtggcgatgtgacgacttggtggtctatcgtcgttgcccttcgccaggtgtcgatctcttcgtcagtgaagagcatccaccagttccattcattcatttattatatggtgaatggccacaaaaccatattctatgatggcacaaggtcccaccaagatgcgtagccatgtgcaaaccatatttgtcatgtagccacaagggcccgtcgatctgttttggtttacaatgtggatgaaaacaacatggagctctggcttatgggggcttatcgatgccagcgaagcccgtgggagcaattgaagccattggacattggttgcacaacttgataaagtgaagaatctgcttgcgtctgagtttgggagtctataaacatggggaagagaaaatattggtgcctttgcaattggtgaccctgctgcaactatttttttctaggaattcacaagagcaatatggtacaccaatgccacacattggacaaacaacagttgaagttgatcttttgaattatggtgtgatagaaggtgatgaatcatgtaaacatttctctgaactaaaagtcttacatccatggatgatcaaagatggcatgaatcttacaaaggaacagagattagagaaaattgagtcacaaaaacttgaaaaatatgaagccaaaggtgacaagagacatgacttgaaagatgatcaaagtgtacaggaagaatacataaatgcatattatgaggccttgaggaaaagttggaagaggaagaagcaaaaagcagaatgcagcatgaaggcaagatttttgtccctgatgctcaaagggaacgccaagttgacaataaatacaagcaggatgatgatgaagaaggcattgaataagtattccagctttcttatatggacagtaggaacccaaggtttgctgtgtaatccattatcaacagttgcactcacattagccttgtggcgattcttttcaaaacaggatgatttaaacccatatgttgttccaatggctatgggcatttaacgtcaactagagagtcccttggatatgactacaagtactatcatcaggaggattgttgctaaccatgaagcttacctgtgtattgtcagctttcaaactcgatgaaccaactgagaaagtactgcttatgaagctagagaagcatggaaggagtgttgctgaatcaaaggcaaaagaagaagctggaagagttttgatttgcatgaaggataggtcctcgacacagttcagcagagatgctggctctatgcccaaggtgtggacaggaaaggaggacataaaagccataactaaaactgttcgctcagttgtacgccagatgctaatatttaatactctatatatagaatactgttgaagacgcttctaaagcactagagtattgtagcactgatggaaggccttcgatgaaatgtttccctgaaagttgcatactacatcgctgaagcactacaatattgtaacactgagggaaggcctttgtatcatgacctaaattcatatagggccctctttgatgagttgattttgagaagtatgaagggatgattaaggtcatggagaaggtggtaatacagttaattctatggagctcactggaggagcactaccttttgccagttgcttgcaagaatgtaattggaatccgatgtgcttcatggcgcatcgtatcctccattgagtatagggaataaggttgtgtcaacatggaccgtgccactctcatcgagggctaccataacaagattgaagttgaactcaacaagatctgcgttggaatcctcaagctctttgcttcccaccttcccccctcattaatagttccaaagtccaaggtcttctacctcaagatgaagggtgattactacaggatattgctttggaggagttggcccccttatcctattaggctttggctgatgcttaacctctcaactctcctgatcttgctcgtggtctccccaaacagattgacacggtgggaggaaaaagacaatggtcagcaacttactcggagcagaaattttttaattgtggtacccgtggtgctgtaagtttcatctcatcctcttgtagttcacacttgaacaaagtactctttagattctatacaggcagcgattgcttgtgcaattatattccacttcattcctaattaacaatttgggtcttatgattgacgactttgactttatcaccataaataaacctgacacacgaattatatctggattctggaacaggttcaataagagagcatcatagtgttgcataaataagtgtgcttatgattcatatttgctcattgcaaattggagttatttgtgttgtttctttgtatactcaacaaagagatgttaaccacttgtgtttatctcattgccacactcagttatgtcacgtaacttcattttcatgttttattttgttccagcaatgtagtttatctttgttttaatagctctttctttgtaaaacaacattttgttgtggttattatgcggataagagaacctaaaactacaacactgatgtttgtgtgacataagagaacctaaaacacattgatgacgtttggggccaagaactatagtggggtggttgatgtacttggagaatgagaagttgaagaatggacttaag

SEQ ID NO: 74527 - DNA, 4366 bp, Zea Mays
atggaccttgacgcggctgcagaggaggaggagcgccggcttgaggactacaatgaggcgcaggatgctaggtacttcctggggtttggtgacacccatggagatcctattgaggttgatactgttgccggctctcaaattggcactggaaccgaatccactagcccgtcagaagcagtccctaatcctgatcaggctgctaatgctagtggtagcaacatgaagaaaaggtccaagtgctgggatgactttgatgaattgactaagattgtgaatggtaagaaagtcaggagccacgttgtgcctgccgccagccccgacacctccagatgttgcctccatccatcctccgagcttaccgcctcgcccccgcccccaaaccctagaccccctacaatcacgaggaaggggagaacggccgaggaggatgctccgcaaggaaggggaggacggtcgaggatgacgttgttgctcgtcgctgagcatcttcgcgccctcagtgctgccaaggagccctctctatccctgatggcgtcccaaccgttggtaatatctccgcctcggccatgggcattgcaaccctcgattcaatctctcctcttcgatctcagtatttaagattttgaattagatttgtatattatttttctattatattaggagcaattgaagccattggacattggttgcacaacttgataaagtgaagaatctgcttgcgtctgagtttgggagtctataaacatggggaagagaaaatattggtgcctttgcaattggtgaccctgctgcaactatttttttctaggaattcacaagagcaatatggtacaccaatgccacacattggacaaacaacagttgaagttgatcttttgaattatggtgtgatagaaggtgatgaatcatgtaaacatttctctgaactaaaagtcttacatccatggatgatcaaagatggcatgaatcttacaaaggaacagagattagagaaaattgagtcacaaaaacttgaaaaatatgaagccaaaggtgacaagagacatgacttgaaagatgatcaaagtgtacaggaagaatacataaatgcatattatgaggccttgaggaaaagttggaagaggaagaagcaaaaagcagaatgcagcatgaaggcaagatttttgtccctgatgctcaaagggaacgccaagttgacaataaatacaagcaggatgatgatgaagaaggcattgaataagtattccagctttcttatatggacagtaggaacccaaggtttgctgtgtaatccattatcaacagttgcactcacattagccttgtggcgattcttttcaaaacaggatgatttaaacccatatgttgttccaatggctatgggcatttaacgtcaactagagagtcccttggatatgactacaagtactatcatcaggaggattgttgctaaccatgaagcttacctgtgtattgtcagctttcaaactcgatgaaccaactgagaaagtactgcttatgaagctagagaagcatggaaggagtgttgctgaatcaaaggcaaaagaagaagctggaagagttttgatttgcatgaaggataggtcctcgacacagttcagcagagatgctggctctatgcccaaggtgtggacaggaaaggaggacataaaagccataactaaaactgttcgctcagttgtacgccagatgctaatatttaatactctatatatagaatactgttgaagacgcttctaaagcactagagtattgtagcactgatggaaggccttcgatgaaatgtttccctgaaagttgcatactacatcgctgaagcactacaatattgtaacactgagggaaggcctttgtatcatgacctaaattcatatagggccctctttgatgaggtaattgttgctttggttttcacttttccttacaaccttcgaattatgtggctatgtctgaaaacttaatacttctacagttctcgggtcttcataccattccaatttgtgttagctaataaacaagtcaggctatgtctgaaaccagtatctaatagttctccgcccaacaaggaactgtgcaacataaaaacaaatcttaaacaagttacatgttctgaattttagaaactcaaactccactctaagggctaaccggctaaccgaacatgttatagaacaaactcagtcctaaattgtagacatattggaattctgcgtatgttttttccaacctatcttcaaactatacaagaattattatctaatataaacaatacattgacaataatgtacacaaaaatccatgtatttaatgtgtggacatggtatcatcatgtctgactaacccttttttactttcattgaatgaagttcgtacatgtatttgaggtattttttattttcttcctactataagccttgcttagatactgatctaagatcatctccaagggacagacaaaaaatcctagaggttctcacataagtacggtttagagaagggataaaccgaggaaagcctcccccacaaatacagaaaggctgcctcgaacctatgatttggtgactcagtgaaacaaacaactctcactactgcactaggcctgccattgtttacgagcatccccaagggccttacttaaattcactctctaaattttaatttggtgagccattttaataaaaatatgtttgataggttttttatcttctaacaatttttatgtatcttgtacgcactctagagaaccaacccactcactgctctttatttactgcatgctatttaggtctgctaagcaaaaaatgatattctttctcaatcttttgtcatgtttagataaatttggtggttttaggataaagtttgtgaagggcttcactttttttttctataattagaatttaactcaaaagttttcccttgaaattcaagttgattttgagaagtatgaagggatgattaaggtcatggagaaggtggtaatacagttaattctatggagctcactggaggagcactaccttttgccagttgcttgcaagaatgtaattggaatccgatgtgcttcatggcgcatcgtatcctccattgagtatagggaataaggttgtgtcaacatggaccgtgccactctcatcgagggctaccataacaagattgaagttgaactcaacaagatctgcgttggaatcctcaagctctttgcttcccaccttcccccctcattaatagttccaaagtccaaggtcttctacctcaagatgaagggtgattactacaggatattgctttggaggagttggcccccttatcctattaggctttggctgatgcttaacctctcaactctcctgatcttgctcgtggtctccccaaacagattgacacggtgggaggaaaaagacaatggtcagcaacttactcggagcagaaattttttaattgtggtacccgtggtgctaaaacaattatagagggcagaagacacacgcacgtacgtcaaagaggaagcacgcatcaatcagatcgatcggtcatcaggtcggcaatgagtaagacatcgacgaccggctgacgcagcgtaaccgtaccagtcaaagatggcaatggattgggtgcatgcatgatcagagcctggacctcacctggaggtgggagcaagaaaccaatccactcggcacttccatattacgggagcggagcccagcccaacgaagcggtcctcatgggctttcgctctcgcgttacgggcatgttgattgcacgaggcccacagcgctcgagcatgggccctcaaccaccagccagctctcccgctcccagagtcccagactcccagtgacctgaattcgattgacgccgaccatcgccatccttcccagacaagttttgctgcctatcaagggaagacgttctccagtttctcgtggatgacttggtggttggtgctcttgctcccatcccgctgactcagatattttcccttggagccataaacccgcagtacggttacgtggaagcatctgcgcctgccatggaagcaattcaaaatacccttcaagacccgtgcgccgtcgctgttgtggagacgacgccggatggaactcgcaaactactaggagacatctctactcactggcactggcaaacctgtcagctgggcagttcgtcatgggcgccgacgagaacgggtcaacgcctatctcgatctccccagagcctcccatcgtcaccggtggaggagatcagtcctgggcgctcgcgccaagggcgaagaagttcagcagcaggagcatcgggtttctgaacaacacccagatgccagcgtggcggacacggagcgcgt

SEQ ID NO: 74528 - DNA, 3687 bp, Zea Mays
caccagcctcatccgttctcctcgccccatccgcatccgccgccagcggccgaatgtcgcgcaggccaacctcgcgccccatccgcatccgccacatgccacacatgtccaacatcgccagcctcgtccgggagccatgagcaacctcccactccccaccaacacgccttcgcctcacctcgtgatgcccgggacctgcagcagtcgccgcctcccctgagcgtctgagatgcagctccacgctcatctgcgtcccccgccgcaggagccacgttgtgcctgccgccagccccgacacctccagatgttgcctccatccatcctccgagcttaccgcctcgcccccgcccccaaaccctagaccccctacaatcacgaggaaggggagaacggccgaggaggatgctccgcaaggaaggggaggacggtcgaggatgacgttgttgctcgtcgctgagcatcttcgcgccctcagtgctgccaaggagccctctctatccctgatggcgtcccaaccgttggccgatcgtcggcgatgatgacccagcctccctctccacgtccctgctccccaactcatacaggaattcacaagagcaatatggtacaccaatgccacacattggacaaacaacagttgaagttgatcttttgaattatggtgtgatagaaggtgatgaatcatgtaaacatttctctgaactaaaagtcttacatccatggatgatcaaagatggcatgaatcttacaaaggaacagagattagagaaaattgagtcacaaaaacttgaaaaatatgaagccaaaggtgacaagagacatgacttgaaagatgatcaaagtgtacaggaagaatacataaatgcatattatgaggccttgaggaaaagttggaagaggaagaagcaaaaagcagaatgcagcatgaaggcaagatttttgtccctgatgctcaaagggaacgccaagttgacaataaatacaagcaggatgatgatgaagaaggcattgaataagtattccagctttcttatatggacagtaggaacccaaggtttgctgtgtaatccattatcaacagttgcactcacattagccttgtggcgattcttttcaaaacaggatgatttaaacccatatgttgttccaatggctatgggcatttaacgtcaactagagagtcccttggatatgactacaagtactatcatcaggaggattgttgctaaccatgaagcttacctgtgtattgtcagctttcaaactcgatgaaccaactgagaaagtactgcttatgaagctagagaagcatggaaggagtgttgctgaatcaaaggcaaaagaagaagctggaagagttttgatttgcatgaaggataggtcctcgacacagttcagcagagatgctggctctatgcccaaggtgtggacaggaaaggaggacataaaagccataactaaaactgttcgctcagttgtacgccagatgctaatatttaatactctatatatagaatactgttgaagacgcttctaaagcactagagtattgtagcactgatggaaggccttcgatgaaatgtttccctgaaagttgcatactacatcgctgaagcactacaatattgtaacactgagggaaggcctttgtatcatgacctaaattcatatagggccctctttgatgaggtaattgttgctttggttttcacttttccttacaaccttcgaattatgtggctatgtctgaaaacttaatacttctacagttctcgggtcttcataccattccaatttgtgttagctaataaacaagtcaggctatgtctgaaaccagtatctaatagttctccgcccaacaaggaactgtgcaacataaaaacaaatcttaaacaagttacatgttctgaattttagaaactcaaactccactctaagggctaaccggctaaccgaacatgttatagaacaaactcagtcctaaattgtagacatattggaattctgcgtatgttttttccaacctatcttcaaactatacaagaattattatctaatataaacaatacattgacaataatgtacacaaaaatccatgtatttaatgtgtggacatggtatcatcatgtctgactaacccttttttactttcattgaatgaagttcgtacatgtatttgaggtattttttattttcttcctactataagccttgcttagatactgatctaagatcatctccaagggacagacaaaaaatcctagaggttctcacataagtacggtttagagaagggataaaccgaggaaagcctcccccacaaatacagaaaggctgcctcgaacctatgatttggtgactcagtgaaacaaacaactctcactactgcactaggcctgccattgtttacgagcatccccaagggccttacttaaattcactctctaaattttaatttggtgagccattttaataaaaatatgtttgataggttttttatcttctaacaatttttatgtatcttgtacgcactctagagaaccaacccactcactgctctttatttactgcatgctatttaggtctgctaagcaaaaaatgatattctttctcaatcttttgtcatgtttagataaatttggtggttttaggataaagtttgtgaagggcttcactttttttttctataattagaatttaactcaaaagttttcccttgaaattcaagttgattttgagaagtatgaagggatgattaaggtcatggagaaggtggtaatacagttaattctatggagctcactggaggagcactaccttttgccagttgcttgcaagaatgtaattggaatccgatgtgcttcatggcgcatcgtatcctccattgagtatagggaataaggttgtgtcaacatggaccgtgccactctcatcgagggctaccataacaagattgaagttgaactcaacaagatctgcgttggaatcctcaagctctttgcttcccaccttcccccctcattaatagttccaaagtccaaggtcttctacctcaagatgaagggtgattactacaggatattgctttggaggagttggcccccttatcctattaggctttggctgatgcttaacctctcaactctcctgatcttgctcgtggtctccccaaacaggtttggtttctagatccattacatggagtgtgtagtgtttttcctcttttttgcaatcctcatgatgtgccaccaggtctggtctaatcgttcccctaaaattgtggcctataatcagcttcttggcctatgatccttttgtatgtaggcaaagccaacgaatgaaagggactcactcgcagcaacaaccaaaaagctgatcacgcattctccttttcacatttgttgcatttaattaattcatccaatagcataaattggcactccttttgtgttattgctctttggttggtcttattgttgttgttgtactgcttgccatgtgtattttatcataagtgttgttttggctaatccctaacgatgcaatacatttgagcaacaattcaattgttttgttttttgaacagttattctaaatacccaatgttcacagcatatttcacttcccatggttcactgttttgttgtattagtagctctaattctaaggtgtcaatgaatcttaggc

SEQ ID NO: 74529 - DNA, 3287 bp, Zea Mays
ctcatccgttctcctcgccccatccgcatccgccgccagcggccgaatgtcgcgcaggccaacctcgcgccccatccgcatccgccacatgccacacatgtccaacatcgccagcctcgtccgggagccatgagcaacctcccactccccaccaacacgccttcgcctcacctcgtgatgcccgggacctgcagcagtcgccgcctcccctgagcgtctgagatgcagctccacgctcatctgcgtcccccgccgcaggagccacgttgtgcctgccgccagccccgacacctccagatgttgcctccatccatcctccgagcttaccgcctcgcccccgcccccaaaccctagaccccctacaatcacgaggaaggggagaacggccgaggaggatgctccgcaaggaaggggaggacggtcgaggatgacgttgttgctcgtcgctgagcatcttcgcgccctcagtgctgccaaggagccctctctatccctgatggcgtcccaaccgttggccgatcgtcggcgatgatgacccagcctccctctccacgtccctgctccccaactcatacaggaattcacaagagcaatatggtacaccaatgccacacattggacaaacaacagttgaagttgatcttttgaattatggtgtgatagaaggtgatgaatcatgtaaacatttctctgaactaaaagtcttacatccatggatgatcaaagatggcatgaatcttacaaaggaacagagattagagaaaattgagtcacaaaaacttgaaaaatatgaagccaaaggtgacaagagacatgacttgaaagatgatcaaagtgtacaggaagaatacataaatgcatattatgaggccttgaggaaaagttggaagaggaagaagcaaaaagcagaatgcagcatgaaggcaagatttttgtccctgatgctcaaagggaacgccaagttgacaataaatacaagcaggatgatgatgaagaaggcattgaatagatgatttaaacccatatgttgttccaatggctatgggcatttaacgtcaactagagagtcccttggatatgactacaagtactatcatcaggaggattgttgctaaccatgaagcttacctgtgtattgtcagctttcaaactcgatgaaccaactgagaaagtactgcttatgaagctagagaagcatggaaggagtgttgctgaatcaaaggcaaaagaagaagctggaagagttttgatttgcatgaaggatagctgttgaagacgcttctaaagcactagagtattgtagcactgatggaaggccttcgatgaaatgtttccctgaaagttgcatactacatcgctgaagcactacaatattgtaacactgagggaaggcctttgtatcatgacctaaattcatatagggccctctttgatgaggtaattgttgctttggttttcacttttccttacaaccttcgaattatgtggctatgtctgaaaacttaatacttctacagttctcgggtcttcataccattccaatttgtgttagctaataaacaagtcaggctatgtctgaaaccagtatctaatagttctccgcccaacaaggaactgtgcaacataaaaacaaatcttaaacaagttacatgttctgaattttagaaactcaaactccactctaagggctaaccggctaaccgaacatgttatagaacaaactcagtcctaaattgtagacatattggaattctgcgtatgttttttccaacctatcttcaaactatacaagaattattatctaatataaacaatacattgacaataatgtacacaaaaatccatgtatttaatgtgtggacatggtatcatcatgtctgactaacccttttttactttcattgaatgaagttcgtacatgtatttgaggtattttttattttcttcctactataagccttgcttagatactgatctaagatcatctccaagggacagacaaaaaatcctagaggttctcacataagtacggtttagagaagggataaaccgaggaaagcctcccccacaaatacagaaaggctgcctcgaacctatgatttggtgactcagtgaaacaaacaactctcactactgcactaggcctgccattgtttacgagcatccccaagggccttacttaaattcactctctaaattttaatttggtgagccattttaataaaaatatgtttgataggttttttatcttctaacaatttttatgtatcttgtacgcactctagagaaccaacccactcactgctctttatttactgcatgctatttaggtctgctaagcaaaaaatgatattctttctcaatcttttgtcatgtttagataaatttggtggttttaggataaagtttgtgaagggcttcactttttttttctataattagaatttaactcaaaagttttcccttgaaattcaagttgattttgagaagtatgaagggatgattaaggtcatggagaaggtggtaatacagttaattctatggagctcactggaggagcactaccttttgccagttgcttgcaagaatgtaattggaatccgatgtgcttcatggcgcatcgtatcctccattgagtatagggaataaggttgtgtcaacatggaccgtgccactctcatcgagggctaccataacaagattgaagttgaactcaacaagatctgcgttggaatcctcaagctctttgcttcccaccttcccccctcattaatagttccaaagtccaaggtcttctacctcaagatgaagggtgattactacaggatattgctttggaggagttggcccccttatcctattaggctttggctgatgcttaacctctcaactctcctgatcttgctcgtggtctccccaaacaggcaaagccaacgaatgaaagggactcactcgcagcaacaaccaaaaagctgatcacgcattctccttttcacatttgttgcatttaattaattcatccaatagcataaattggcactccttttgtgttattgctctttggttggtcttattgttgttgttgtactgcttgccatgtgtattttatcataagtgttgttttggctaatccctaacgatgcaatacatttgagcaacaattcaattgttttgttttttgaacagttattctaaatacccaatgttcacagcatatttcacttcccatggttcactgttttgttgtattagtagctctaattctaaggtgtcaatgaatcttaggc

SEQ ID NO: 74530 - DNA, 2493 bp, Zea Mays
ctcatccgttctcctcgccccatccgcatccgccgccagcggccgaatgtcgcgcaggccaacctcgcgccccatccgcatccgccacatgccacacatgtccaacatcgccagcctcgtccgggagccatgagcaacctcccactccccaccaacacgccttcgcctcacctcgtgatgcccgggacctgcagcagtcgccgcctcccctgagcgtctgagatgcagctccacgctcatctgcgtcccccgccgcaggagccacgttgtgcctgccgccagccccgacacctccagatgttgcctccatccatcctccgagcttaccgcctcgcccccgcccccaaaccctagaccccctacaatcacgaggaaggggagaacggccgaggaggatgctccgcaaggaaggggaggacggtcgaggatgacgttgttgctcgtcgctgagcatcttcgcgccctcagtgctgccaaggagccctctctatccctgatggcgtcccaaccgttggccgatcgtcggcgatgatgacccagcctccctctccacgtccctgctccccaactcatacaggaattcacaagagcaatatggtacaccaatgccacacattggacaaacaacagttgaagttgatcttttgaattatggtgtgatagaaggtgatgaatcatgtaaacatttctctgaactaaaagtcttacatccatggatgatcaaagatggcatgaatcttacaaaggaacagagattagagaaaattgagtcacaaaaacttgaaaaatatgaagccaaaggtgacaagagacatgacttgaaagatgatcaaagtgtacaggaagaatacataaatgcatattatgaggccttgaggaaaagttggaagaggaagaagcaaaaagcagaatgcagcatgaaggcaagatttttgtccctgatgctcaaagggaacgccaagttgacaataaatacaagcaggatgatgatgaagaaggcattgaataagtattccagctttcttatatggacagtaggaacccaaggtttgctgtgtaatccattatcaacagttgcactcacattagccttgtggcgattcttttcaaaacaggatgatttaaacccatatgttgttccaatggctatgggcatttaacgtcaactagagagtcccttggatatgactacaagtactatcatcaggaggattgttgctaaccatgaagcttacctgtgtattgtcagctttcaaactcgatgaaccaactgagaaagtactgcttatgaagctagagaagcatggaaggagtgttgctgaatcaaaggcaaaagaagaagctggaagagttttgatttgcatgaaggataggtcctcgacacagttcagcagagatgctggctctatgcccaaggtgtggacaggaaaggaggacataaaagccataactaaaactgttcgctcagttgtacgccagatgctaatatttaatactctatatatagaatactgttgaagacgcttctaaagcactagagtattgtagcactgatggaaggccttcgatgaaatgtttccctgaaagttgcatactacatcgctgaagcactacaatattgtaacactgagggaaggcctttgtatcatgacctaaattcatatagggccctctttgatgagttgattttgagaagtatgaagggatgattaaggtcatggagaaggtggtaatacagttaattctatggagctcactggaggagcactaccttttgccagttgcttgcaagaatgtaattggaatccgatgtgcttcatggcgcatcgtatcctccattgagtatagggaataaggttgtgtcaacatggaccgtgccactctcatcgagggctaccataacaagattgaagttgaactcaacaagatctgcgttggaatcctcaagctctttgcttcccaccttcccccctcattaatagttccaaagtccaaggtcttctacctcaagatgaagggtgattactacaggatattgctttggaggagttggcccccttatcctattaggctttggctgatgcttaacctctcaactctcctgatcttgctcgtggtctccccaaacaggcaaagccaacgaatgaaagggactcactcgcagcaacaaccaaaaagctgatcacgcattctccttttcacatttgttgcatttaattaattcatccaatagcataaattggcactccttttgtgttattgctctttggttggtcttattgttgttgttgtactgcttgccatgtgtattttatcataagtgttgttttggctaatccctaacgatgcaatacatttgagcaacaattcaattgttttgttttttgaacagttattctaaatacccaatgttcacagcatatttcacttcccatggttcactgttttgttgtattagtagctctaattctaaggtgtcaatgaatcttaggc

SEQ ID NO: 74531 - DNA, 3394 bp, Zea Mays
ctcatccgttctcctcgccccatccgcatccgccgccagcggccgaatgtcgcgcaggccaacctcgcgccccatccgcatccgccacatgccacacatgtccaacatcgccagcctcgtccgggagccatgagcaacctcccactccccaccaacacgccttcgcctcacctcgtgatgcccgggacctgcagcagtcgccgcctcccctgagcgtctgagatgcagctccacgctcatctgcgtcccccgccgcaggagccacgttgtgcctgccgccagccccgacacctccagatgttgcctccatccatcctccgagcttaccgcctcgcccccgcccccaaaccctagaccccctacaatcacgaggaaggggagaacggccgaggaggatgctccgcaaggaaggggaggacggtcgaggatgacgttgttgctcgtcgctgagcatcttcgcgccctcagtgctgccaaggagccctctctatccctgatggcgtcccaaccgttggccgatcgtcggcgatgatgacccagcctccctctccacgtccctgctccccaactcatacaggaattcacaagagcaatatggtacaccaatgccacacattggacaaacaacagttgaagttgatcttttgaattatggtgtgatagaaggtgatgaatcatgtaaacatttctctgaactaaaagtcttacatccatggatgatcaaagatggcatgaatcttacaaaggaacagagattagagaaaattgagtcacaaaaacttgaaaaatatgaagccaaaggtgacaagagacatgacttgaaagatgatcaaagtgtacaggaagaatacataaatgcatattatgaggccttgaggaaaagttggaagaggaagaagcaaaaagcagaatgcagcatgaaggcaagatttttgtccctgatgctcaaagggaacgccaagttgacaataaatacaagcaggatgatgatgaagaaggcattgaataagtattccagctttcttatatggacagtaggaacccaaggtttgctgtgtaatccattatcaacagttgcactcacattagccttgtggcgattcttttcaaaacaggatgatttaaacccatatgttgttccaatggctatgggcatttaacgtcaactagagagtcccttggatatgactacaagtactatcatcaggaggattgttgctaaccatgaagcttacctgtgtattgtcagctttcaaactcgatgaaccaactgagaaagtactgcttatgaagctagagaagcatggaaggagtgttgctgaatcaaaggcaaaagaagaagctggaagagttttgatttgcatgaaggatagctgttgaagacgcttctaaagcactagagtattgtagcactgatggaaggccttcgatgaaatgtttccctgaaagttgcatactacatcgctgaagcactacaatattgtaacactgagggaaggcctttgtatcatgacctaaattcatatagggccctctttgatgaggtaattgttgctttggttttcacttttccttacaaccttcgaattatgtggctatgtctgaaaacttaatacttctacagttctcgggtcttcataccattccaatttgtgttagctaataaacaagtcaggctatgtctgaaaccagtatctaatagttctccgcccaacaaggaactgtgcaacataaaaacaaatcttaaacaagttacatgttctgaattttagaaactcaaactccactctaagggctaaccggctaaccgaacatgttatagaacaaactcagtcctaaattgtagacatattggaattctgcgtatgttttttccaacctatcttcaaactatacaagaattattatctaatataaacaatacattgacaataatgtacacaaaaatccatgtatttaatgtgtggacatggtatcatcatgtctgactaacccttttttactttcattgaatgaagttcgtacatgtatttgaggtattttttattttcttcctactataagccttgcttagatactgatctaagatcatctccaagggacagacaaaaaatcctagaggttctcacataagtacggtttagagaagggataaaccgaggaaagcctcccccacaaatacagaaaggctgcctcgaacctatgatttggtgactcagtgaaacaaacaactctcactactgcactaggcctgccattgtttacgagcatccccaagggccttacttaaattcactctctaaattttaatttggtgagccattttaataaaaatatgtttgataggttttttatcttctaacaatttttatgtatcttgtacgcactctagagaaccaacccactcactgctctttatttactgcatgctatttaggtctgctaagcaaaaaatgatattctttctcaatcttttgtcatgtttagataaatttggtggttttaggataaagtttgtgaagggcttcactttttttttctataattagaatttaactcaaaagttttcccttgaaattcaagttgattttgagaagtatgaagggatgattaaggtcatggagaaggtggtaatacagttaattctatggagctcactggaggagcactaccttttgccagttgcttgcaagaatgtaattggaatccgatgtgcttcatggcgcatcgtatcctccattgagtatagggaataaggttgtgtcaacatggaccgtgccactctcatcgagggctaccataacaagattgaagttgaactcaacaagatctgcgttggaatcctcaagctctttgcttcccaccttcccccctcattaatagttccaaagtccaaggtcttctacctcaagatgaagggtgattactacaggatattgctttggaggagttggcccccttatcctattaggctttggctgatgcttaacctctcaactctcctgatcttgctcgtggtctccccaaacaggcaaagccaacgaatgaaagggactcactcgcagcaacaaccaaaaagctgatcacgcattctccttttcacatttgttgcatttaattaattcatccaatagcataaattggcactccttttgtgttattgctctttggttggtcttattgttgttgttgtactgcttgccatgtgtattttatcataagtgttgttttggctaatccctaacgatgcaatacatttgagcaacaattcaattgttttgttttttgaacagttattctaaatacccaatgttcacagcatatttcacttcccatggttcactgttttgttgtattagtagctctaattctaaggtgtcaatgaatcttaggc

SEQ ID NO: 74532 - DNA, 3705 bp, Zea Mays
ctcatccgttctcctcgccccatccgcatccgccgccagcggccgaatgtcgcgcaggccaacctcgcgccccatccgcatccgccacatgccacacatgtccaacatcgccagcctcgtccgggagccatgagcaacctcccactccccaccaacacgccttcgcctcacctcgtgatgcccgggacctgcagcagtcgccgcctcccctgagcgtctgagatgcagctccacgctcatctgcgtcccccgccgcaggagccacgttgtgcctgccgccagccccgacacctccagatgttgcctccatccatcctccgagcttaccgcctcgcccccgcccccaaaccctagaccccctacaatcacgaggaaggggagaacggccgaggaggatgctccgcaaggaaggggaggacggtcgaggatgacgttgttgctcgtcgctgagcatcttcgcgccctcagtgctgccaaggagccctctctatccctgatggcgtcccaaccgttggccgatcgtcggcgatgatgacccagcctccctctccacgtccctgctccccaactcatacaggaattcacaagagcaatatggtacaccaatgccacacattggacaaacaacagttgaagttgatcttttgaattatggtgtgatagaaggtgatgaatcatgtaaacatttctctgaactaaaagtcttacatccatggatgatcaaagatggcatgaatcttacaaaggaacagagattagagaaaattgagtcacaaaaacttgaaaaatatgaagccaaaggtgacaagagacatgacttgaaagatgatcaaagtgtacaggaagaatacataaatgcatattatgaggccttgaggaaaagttggaagaggaagaagcaaaaagcagaatgcagcatgaaggcaagatttttgtccctgatgctcaaagggaacgccaagttgacaataaatacaagcaggatgatgatgaagaaggcattgaataagtattccagctttcttatatggacagtaggaacccaaggtttgctgtgtaatccattatcaacagttgcactcacattagccttgtggcgattcttttcaaaacaggatgatttaaacccatatgttgttccaatggctatgggcatttaacgtcaactagagagtcccttggatatgactacaagtactatcatcaggaggattgttgctaaccatgaagcttacctgtgtattgtcagctttcaaactcgatgaaccaactgagaaagtactgcttatgaagctagagaagcatggaaggagtgttgctgaatcaaaggcaaaagaagaagctggaagagttttgatttgcatgaaggatagctgttgaagacgcttctaaagcactagagtattgtagcactgatggaaggccttcgatgaaatgtttccctgaaagttgcatactacatcgctgaagcactacaatattgtaacactgagggaaggcctttgtatcatgacctaaattcatatagggccctctttgatgaggtaattgttgctttggttttcacttttccttacaaccttcgaattatgtggctatgtctgaaaacttaatacttctacagttctcgggtcttcataccattccaatttgtgttagctaataaacaagtcaggctatgtctgaaaccagtatctaatagttctccgcccaacaaggaactgtgcaacataaaaacaaatcttaaacaagttacatgttctgaattttagaaactcaaactccactctaagggctaaccggctaaccgaacatgttatagaacaaactcagtcctaaattgtagacatattggaattctgcgtatgttttttccaacctatcttcaaactatacaagaattattatctaatataaacaatacattgacaataatgtacacaaaaatccatgtatttaatgtgtggacatggtatcatcatgtctgactaacccttttttactttcattgaatgaagttcgtacatgtatttgaggtattttttattttcttcctactataagccttgcttagatactgatctaagatcatctccaagggacagacaaaaaatcctagaggttctcacataagtacggtttagagaagggataaaccgaggaaagcctcccccacaaatacagaaaggctgcctcgaacctatgatttggtgactcagtgaaacaaacaactctcactactgcactaggcctgccattgtttacgagcatccccaagggccttacttaaattcactctctaaattttaatttggtgagccattttaataaaaatatgtttgataggttttttatcttctaacaatttttatgtatcttgtacgcactctagagaaccaacccactcactgctctttatttactgcatgctatttaggtctgctaagcaaaaaatgatattctttctcaatcttttgtcatgtttagataaatttggtggttttaggataaagtttgtgaagggcttcactttttttttctataattagaatttaactcaaaagttttcccttgaaattcaagttgattttgagaagtatgaagggatgattaaggtcatggagaaggtggtaatacagttaattctatggagctcactggaggagcactaccttttgccagttgcttgcaagaatgtaattggaatccgatgtgcttcatggcgcatcgtatcctccattgagtatagggaataaggttgtgtcaacatggaccgtgccactctcatcgagggctaccataacaagattgaagttgaactcaacaagatctgcgttggaatcctcaagctctttgcttcccaccttcccccctcattaatagttccaaagtccaaggtcttctacctcaagatgaagggtgattactacaggatattgctttggaggagttggcccccttatcctattaggctttggctgatgcttaacctctcaactctcctgatcttgctcgtggtctccccaaacagattgacacggtgggaggaaaaagacaatggtcagcaacttactcggagcagaaattttttaattgtggtacccgtggtgctgtaagtttcatctcatcctcttgtagttcacacttgaacaaagtactctttagattctatacaggcagcgattgcttgtgcaattatattccacttcattcctaattaacaatttgggtcttatgattgacgactttgactttatcaccataaataaacctgacacacgaattatatctggattctggaacaggttcaataagagagcatcatagtgttgcataaataagtgtgcttatgattcatatttgctcattgcaaattggagttatttgtgttgtttctttgtatactcaacaaagagatgttaaccacttgtgtttatctcattgccacactcagttatgtcacgtaacttcattttcatgttttattttgttccagcaatgtagtttatctttgttttaatagctctttctttgtaaaacaacattttgttgtggttattatgcggataagagaacctaaaactacaacactgatgtttgtgtgacataagagaacctaaaacacattgatgacgtttggggccaagaactatagtggggtggttgatgtacttggagaatgagaagttgaagaatggacttaag

SEQ ID NO: 74533 - DNA, 4581 bp, Zea Mays
ccccatccgcatccgccgccagcggccgaatgtcgcgcaggccaacctcgcgccccatccgcatccgccacatgccacacatgtccaacatcgccagcctcgtccgggagccatgagcaacctcccactccccaccaacacgccttcgcctcacctcgtgatgcccgggacctgcagcagtcgccgcctcccctgagcgtctgagatgcagctccacgctcatctgcgtcccccgccgcaggagccacgttgtgcctgccgccagccccgacacctccagatgttgcctccatccatcctccgagcttaccgcctcgcccccgcccccaaaccctagaccccctacaatcacgaggaaggggagaacggccgaggaggatgctccgcaaggaaggggaggacggtcgaggatgacgttgttgctcgtcgctgagcatcttcgcgccctcagtgctgccaaggagccctctctatccctgatggcgtcccaaccgttggtaatatctccgcctcggccatgggcattgcaaccctcgattcaatctctcctcttcgatctcaggccgatcgtcggcgatgatgacccagcctccctctccacgtccctgctccccaactcatacaggtgttgtggcgccctcctctccactcccctatctattttgttgtttgatgtctactttcttcgccgctctggttgcggcacgattggtgcaccacctcctcgtgcgaggtgagggcaagcctgcacatgctcaactccatcgacaacctcaccttcatgccactctgggagcatgccgagtggcgatgtgacgacttggtggtctatcgtcgttgcccttcgccaggtgtcgatctcttcgtcagtgaagagcatccaccagttccattcattcatttattatatggtgaatggccacaaaaccatattctatgatggcacaaggtcccaccaagatgcgtagccatgtgcaaaccatatttgtcatgtagccacaagggcccgtcgatctgttttggtttacaatgtggatgaaaacaacatggagctctggcttatgggggcttatcgatgccagcgaagcccgtgggagcaattgaagccattggacattggttgcacaacttgataaagtgaagaatctgcttgcgtctgagtttgggagtctataaacatggggaagagaaaatattggtgcctttgcaattggtgaccctgctgcaactatttttttctaggaattcacaagagcaatatggtacaccaatgccacacattggacaaacaacagttgaagttgatcttttgaattatggtgtgatagaaggtgatgaatcatgtaaacatttctctgaactaaaagtcttacatccatggatgatcaaagatggcatgaatcttacaaaggaacagagattagagaaaattgagtcacaaaaacttgaaaaatatgaagccaaaggtgacaagagacatgacttgaaagatgatcaaagtgtacaggaagaatacataaatgcatattatgaggccttgaggaaaagttggaagaggaagaagcaaaaagcagaatgcagcatgaaggcaagatttttgtccctgatgctcaaagggaacgccaagttgacaataaatacaagcaggatgatgatgaagaaggcattgaataattatacttcacattatcatgtctttacttttggcagtgttgttagtaatgaagttgcttctcatgcaacacttcttattagcaagcagtatgtattggcaatgggttttgcattgctggaacacctgacagaaatttttagtttcccagaagtaaaggcgttctggtttgttagtaatattggccttctaatggtttatgctctatccagagtattccagctttcttatatggacagtaggaacccaaggtttgctgtgtaatccattatcaacagttgcactcacattagccttgtggcgattcttttcaaaacaggatgatttaaacccatatgttgttccaatggctatgggcatttaacgtcaactagagagtcccttggatatgactacaagtactatcatcaggaggattgttgctaaccatgaagcttacctgtgtattgtcagctttcaaactcgatgaaccaactgagaaagtactgcttatgaagctagagaagcatggaaggagtgttgctgaatcaaaggcaaaagaagaagctggaagagttttgatttgcatgaaggatagctgttgaagacgcttctaaagcactagagtattgtagcactgatggaaggccttcgatgaaatgtttccctgaaagttgcatactacatcgctgaagcactacaatattgtaacactgagggaaggcctttgtatcatgacctaaattcatatagggccctctttgatgaggtaattgttgctttggttttcacttttccttacaaccttcgaattatgtggctatgtctgaaaacttaatacttctacagttctcgggtcttcataccattccaatttgtgttagctaataaacaagtcaggctatgtctgaaaccagtatctaatagttctccgcccaacaaggaactgtgcaacataaaaacaaatcttaaacaagttacatgttctgaattttagaaactcaaactccactctaagggctaaccggctaaccgaacatgttatagaacaaactcagtcctaaattgtagacatattggaattctgcgtatgttttttccaacctatcttcaaactatacaagaattattatctaatataaacaatacattgacaataatgtacacaaaaatccatgtatttaatgtgtggacatggtatcatcatgtctgactaacccttttttactttcattgaatgaagttcgtacatgtatttgaggtattttttattttcttcctactataagccttgcttagatactgatctaagatcatctccaagggacagacaaaaaatcctagaggttctcacataagtacggtttagagaagggataaaccgaggaaagcctcccccacaaatacagaaaggctgcctcgaacctatgatttggtgactcagtgaaacaaacaactctcactactgcactaggcctgccattgtttacgagcatccccaagggccttacttaaattcactctctaaattttaatttggtgagccattttaataaaaatatgtttgataggttttttatcttctaacaatttttatgtatcttgtacgcactctagagaaccaacccactcactgctctttatttactgcatgctatttaggtctgctaagcaaaaaatgatattctttctcaatcttttgtcatgtttagataaatttggtggttttaggataaagtttgtgaagggcttcactttttttttctataattagaatttaactcaaaagttttcccttgaaattcaagttgattttgagaagtatgaagggatgattaaggtcatggagaaggtggtaatacagttaattctatggagctcactggaggagcactaccttttgccagttgcttgcaagaatgtaattggaatccgatgtgcttcatggcgcatcgtatcctccattgagtatagggaataaggttgtgtcaacatggaccgtgccactctcatcgagggctaccataacaagattgaagttgaactcaacaagatctgcgttggaatcctcaagctctttgcttcccaccttcccccctcattaatagttccaaagtccaaggtcttctacctcaagatgaagggtgattactacaggatattgctttggaggagttggcccccttatcctattaggctttggctgatgcttaacctctcaactctcctgatcttgctcgtggtctccccaaacagattgacacggtgggaggaaaaagacaatggtcagcaacttactcggagcagaaattttttaattgtggtacccgtggtgctgtaagtttcatctcatcctcttgtagttcacacttgaacaaagtactctttagattctatacaggcagcgattgcttgtgcaattatattccacttcattcctaattaacaatttgggtcttatgattgacgactttgactttatcaccataaataaacctgacacacgaattatatctggattctggaacaggttcaataagagagcatcatagtgttgcataaataagtgtgcttatgattcatatttgctcattgcaaattggagttatttgtgttgtttctttgtatactcaacaaagagatgttaaccacttgtgtttatctcattgccacactcagttatgtcacgtaacttcattttcatgttttattttgttccagcaatgtagtttatctttgttttaatagctctttctttgtaaaacaacattttgttgtggttattatgcggataagagaacctaaaactacaacactgatgtttgtgtgacataagagaacctaaaacacattgatgacgtttggggccaagaactatagtggggtggttgatgtacttggagaatgagaagttgaagaatggacttaag

SEQ ID NO: 74534 - DNA, 2526 bp, Zea Mays
catccgcatccgccgccagcggccgaatgtcgcgcaggccaacctcgcgccccatccgcatccgccacatgccacacatgtccaacatcgccagcctcgtccgggagccatgagcaacctcccactccccaccaacacgccttcgcctcacctcgtgatgcccgggacctgcagcagtcgccgcctcccctgagcgtctgagatgcagctccacgctcatctgcgtcccccgccgcaggagccacgttgtgcctgccgccagccccgacacctccagatgttgcctccatccatcctccgagcttaccgcctcgcccccgcccccaaaccctagaccccctacaatcacgaggaaggggagaacggccgaggaggatgctccgcaaggaaggggaggacggtcgaggatgacgttgttgctcgtcgctgagcatcttcgcgccctcagtgctgccaaggagccctctctatccctgatggcgtcccaaccgttggccgatcgtcggcgatgatgacccagcctccctctccacgtccctgctccccaactcatacaggaattcacaagagcaatatggtacaccaatgccacacattggacaaacaacagttgaagttgatcttttgaattatggtgtgatagaaggtgatgaatcatgtaaacatttctctgaactaaaagtcttacatccatggatgatcaaagatggcatgaatcttacaaaggaacagagattagagaaaattgagtcacaaaaacttgaaaaatatgaagccaaaggtgacaagagacatgacttgaaagatgatcaaagtgtacaggaagaatacataaatgcatattatgaggccttgaggaaaagttggaagaggaagaagcaaaaagcagaatgcagcatgaaggcaagatttttgtccctgatgctcaaagggaacgccaagttgacaataaatacaagcaggatgatgatgaagaaggcattgaataagtattccagctttcttatatggacagtaggaacccaaggtttgctgtgtaatccattatcaacagttgcactcacattagccttgtggcgattcttttcaaaacaggatgatttaaacccatatgttgttccaatggctatgggcatttaacgtcaactagagagtcccttggatatgactacaagtactatcatcaggaggattgttgctaaccatgaagcttacctgtgtattgtcagctttcaaactcgatgaaccaactgagaaagtactgcttatgaagctagagaagcatggaaggagtgttgctgaatcaaaggcaaaagaagaagctggaagagttttgatttgcatgaaggataggtcctcgacacagttcagcagagatgctggctctatgcccaagctgttgaagacgcttctaaagcactagagtattgtagcactgatggaaggccttcgatgaaatgtttccctgaaagttgcatactacatcgctgaagcactacaatattgtaacactgagggaaggcctttgtatcatgacctaaattcatatagggccctctttgatgagttgattttgagaagtatgaagggatgattaaggtcatggagaaggtggtaatacagttaattctatggagctcactggaggagcactaccttttgccagttgcttgcaagaatgtaattggaatccgatgtgcttcatggcgcatcgtatcctccattgagtatagggaataaggttgtgtcaacatggaccgtgccactctcatcgagggctaccataacaagattgaagttgaactcaacaagatctgcgttggaatcctcaagctctttgcttcccaccttcccccctcattaatagttccaaagtccaaggtcttctacctcaagatgaagggtgattactacaggatattgctttggaggagttggcccccttatcctattaggctttggctgatgcttaacctctcaactctcctgatcttgctcgtggtctccccaaacaggtttggtttctagatccattacatggagtgtgtagtgtttttcctcttttttgcaatcctcatgatgtgccaccaggtctggtctaatcgttcccctaaaattgtggcctataatcagcttcttggcctatgatccttttgtatgtaggcaaagccaacgaatgaaagggactcactcgcagcaacaaccaaaaagctgatcacgcattctccttttcacatttgttgcatttaattaattcatccaatagcataaattggcactccttttgtgttattgctctttggttggtcttattgttgttgttgtactgcttgccatgtgtattttatcataagtgttgttttggctaatccctaacgatgcaatacatttgagcaacaattcaattgttttgttttttgaacagttattctaaatacccaatgttcacagcatatttcacttcccatggttcactgttttgttgtattagtagctctaattctaaggtgtcaatgaatcttaggc

SEQ ID NO: 74535 - DNA, 3850 bp, Zea Mays
gccgaatgtcgcgcaggccaacctcgcgccccatccgcatccgccacatgccacacatgtccaacatcgccagcctcgtccgggagccatgagcaacctcccactccccaccaacacgccttcgcctcacctcgtgatgcccgggacctgcagcagtcgccgcctcccctgagcgtctgagatgcagctccacgctcatctgcgtcccccgccgcaggagccacgttgtgcctgccgccagccccgacacctccagatgttgcctccatccatcctccgagcttaccgcctcgcccccgcccccaaaccctagaccccctacaatcacgaggaaggggagaacggccgaggaggatgctccgcaaggaaggggaggacggtcgaggatgacgttgttgctcgtcgctgagcatcttcgcgccctcagtgctgccaaggagccctctctatccctgatggcgtcccaaccgttggccgatcgtcggcgatgatgacccagcctccctctccacgtccctgctccccaactcatacaggagcaattgaagccattggacattggttgcacaacttgataaagtgaagaatctgcttgcgtctgagtttgggagtctataaacatggggaagagaaaatattggtgcctttgcaattggtgaccctgctgcaactatttttttctaggaattcacaagagcaatatggtacaccaatgccacacattggacaaacaacagttgaagttgatcttttgaattatggtgtgatagaaggtgatgaatcatgtaaacatttctctgaactaaaagtcttacatccatggatgatcaaagatggcatgaatcttacaaaggaacagagattagagaaaattgagtcacaaaaacttgaaaaatatgaagccaaaggtgacaagagacatgacttgaaagatgatcaaagtgtacaggaagaatacataaatgcatattatgaggccttgaggaaaagttggaagaggaagaagcaaaaagcagaatgcagcatgaaggcaagatttttgtccctgatgctcaaagggaacgccaagttgacaataaatacaagcaggatgatgatgaagaaggcattgaataattatacttcacattatcatgtctttacttttggcagtgttgttagtaatgaagttgcttctcatgcaacacttcttattagcaagcagtatgtattggcaatgggttttgcattgctggaacacctgacagaaatttttagtttcccagaagtaaaggcgttctggtttgttagtaatattggccttctaatggtttatgctctatccagagtattccagctttcttatatggacagtaggaacccaaggtttgctgtgtaatccattatcaacagttgcactcacattagccttgtggcgattcttttcaaaacaggatgatttaaacccatatgttgttccaatggctatgggcatttaacgtcaactagagagtcccttggatatgactacaagtactatcatcaggaggattgttgctaaccatgaagcttacctgtgtattgtcagctttcaaactcgatgaaccaactgagaaagtactgcttatgaagctagagaagcatggaaggagtgttgctgaatcaaaggcaaaagaagaagctggaagagttttgatttgcatgaaggataggtcctcgacacagttcagcagagatgctggctctatgcccaaggtgtggacaggaaaggaggacataaaagccataactaaaactgttcgctcagttgtacgccagatgctaatatttaatactctatatatagaatactgttgaagacgcttctaaagcactagagtattgtagcactgatggaaggccttcgatgaaatgtttccctgaaagttgcatactacatcgctgaagcactacaatattgtaacactgagggaaggcctttgtatcatgacctaaattcatatagggccctctttgatgaggtaattgttgctttggttttcacttttccttacaaccttcgaattatgtggctatgtctgaaaacttaatacttctacagttctcgggtcttcataccattccaatttgtgttagctaataaacaagtcaggctatgtctgaaaccagtatctaatagttctccgcccaacaaggaactgtgcaacataaaaacaaatcttaaacaagttacatgttctgaattttagaaactcaaactccactctaagggctaaccggctaaccgaacatgttatagaacaaactcagtcctaaattgtagacatattggaattctgcgtatgttttttccaacctatcttcaaactatacaagaattattatctaatataaacaatacattgacaataatgtacacaaaaatccatgtatttaatgtgtggacatggtatcatcatgtctgactaacccttttttactttcattgaatgaagttcgtacatgtatttgaggtattttttattttcttcctactataagccttgcttagatactgatctaagatcatctccaagggacagacaaaaaatcctagaggttctcacataagtacggtttagagaagggataaaccgaggaaagcctcccccacaaatacagaaaggctgcctcgaacctatgatttggtgactcagtgaaacaaacaactctcactactgcactaggcctgccattgtttacgagcatccccaagggccttacttaaattcactctctaaattttaatttggtgagccattttaataaaaatatgtttgataggttttttatcttctaacaatttttatgtatcttgtacgcactctagagaaccaacccactcactgctctttatttactgcatgctatttaggtctgctaagcaaaaaatgatattctttctcaatcttttgtcatgtttagataaatttggtggttttaggataaagtttgtgaagggcttcactttttttttctataattagaatttaactcaaaagttttcccttgaaattcaagttgattttgagaagtatgaagggatgattaaggtcatggagaaggtggtaatacagttaattctatggagctcactggaggagcactaccttttgccagttgcttgcaagaatgtaattggaatccgatgtgcttcatggcgcatcgtatcctccattgagtatagggaataaggttgtgtcaacatggaccgtgccactctcatcgagggctaccataacaagattgaagttgaactcaacaagatctgcgttggaatcctcaagctctttgcttcccaccttcccccctcattaatagttccaaagtccaaggtcttctacctcaagatgaagggtgattactacaggatattgctttggaggagttggcccccttatcctattaggctttggctgatgcttaacctctcaactctcctgatcttgctcgtggtctccccaaacaggcaaagccaacgaatgaaagggactcactcgcagcaacaaccaaaaagctgatcacgcattctccttttcacatttgttgcatttaattaattcatccaatagcataaattggcactccttttgtgttattgctctttggttggtcttattgttgttgttgtactgcttgccatgtgtattttatcataagtgttgttttggctaatccctaacgatgcaatacatttgagcaacaattcaattgttttgttttttgaacagttattctaaatacccaatgttcacagcatatttcacttcccatggttcactgttttgttgtattagtagctctaattctaaggtgtcaatgaatcttaggc

SEQ ID NO: 74536 - DNA, 2788 bp, Zea Mays
cgcaggccaacctcgcgccccatccgcatccgccacatgccacacatgtccaacatcgccagcctcgtccgggagccatgagcaacctcccactccccaccaacacgccttcgcctcacctcgtgatgcccgggacctgcagcagtcgccgcctcccctgagcgtctgagatgcagctccacgctcatctgcgtcccccgccgcaggagccacgttgtgcctgccgccagccccgacacctccagatgttgcctccatccatcctccgagcttaccgcctcgcccccgcccccaaaccctagaccccctacaatcacgaggaaggggagaacggccgaggaggatgctccgcaaggaaggggaggacggtcgaggatgacgttgttgctcgtcgctgagcatcttcgcgccctcagtgctgccaaggagccctctctatccctgatggcgtcccaaccgttggtaatatctccgcctcggccatgggcattgcaaccctcgattcaatctctcctcttcgatctcagtatttaagattttgaattagatttgtatattatttttctattatattaggagcaattgaagccattggacattggttgcacaacttgataaagtgaagaatctgcttgcgtctgagtttgggagtctataaacatggggaagagaaaatattggtgcctttgcaattggtgaccctgctgcaactatttttttctaggaattcacaagagcaatatggtacaccaatgccacacattggacaaacaacagttgaagttgatcttttgaattatggtgtgatagaaggtgatgaatcatgtaaacatttctctgaactaaaagtcttacatccatggatgatcaaagatggcatgaatcttacaaaggaacagagattagagaaaattgagtcacaaaaacttgaaaaatatgaagccaaaggtgacaagagacatgacttgaaagatgatcaaagtgtacaggaagaatacataaatgcatattatgaggccttgaggaaaagttggaagaggaagaagcaaaaagcagaatgcagcatgaaggcaagatttttgtccctgatgctcaaagggaacgccaagttgacaataaatacaagcaggatgatgatgaagaaggcattgaataagtattccagctttcttatatggacagtaggaacccaaggtttgctgtgtaatccattatcaacagttgcactcacattagccttgtggcgattcttttcaaaacaggatgatttaaacccatatgttgttccaatggctatgggcatttaacgtcaactagagagtcccttggatatgactacaagtactatcatcaggaggattgttgctaaccatgaagcttacctgtgtattgtcagctttcaaactcgatgaaccaactgagaaagtactgcttatgaagctagagaagcatggaaggagtgttgctgaatcaaaggcaaaagaagaagctggaagagttttgatttgcatgaaggataggtcctcgacacagttcagcagagatgctggctctatgcccaaggtgtggacaggaaaggaggacataaaagccataactaaaactgttcgctcagttgtacgccagatgctaatatttaatactctatatatagaatactgttgaagacgcttctaaagcactagagtattgtagcactgatggaaggccttcgatgaaatgtttccctgaaagttgcatactacatcgctgaagcactacaatattgtaacactgagggaaggcctttgtatcatgacctaaattcatatagggccctctttgatgagttgattttgagaagtatgaagggatgattaaggtcatggagaaggtggtaatacagttaattctatggagctcactggaggagcactaccttttgccagttgcttgcaagaatgtaattggaatccgatgtgcttcatggcgcatcgtatcctccattgagtatagggaataaggttgtgtcaacatggaccgtgccactctcatcgagggctaccataacaagattgaagttgaactcaacaagatctgcgttggaatcctcaagctctttgcttcccaccttcccccctcattaatagttccaaagtccaaggtcttctacctcaagatgaagggtgattactacaggatattgctttggaggagttggcccccttatcctattaggctttggctgatgcttaacctctcaactctcctgatcttgctcgtggtctccccaaacaggtttggtttctagatccattacatggagtgtgtagtgtttttcctcttttttgcaatcctcatgatgtgccaccaggtctggtctaatcgttcccctaaaattgtggcctataatcagcttcttggcctatgatccttttgtatgtaggcaaagccaacgaatgaaagggactcactcgcagcaacaaccaaaaagctgatcacgcattctccttttcacatttgttgcatttaattaattcatccaatagcataaattggcactccttttgtgttattgctctttggttggtcttattgttgttgttgtactgcttgccatgtgtattttatcataagtgttgttttggctaatccctaacgatgcaatacatttgagcaacaattcaattgttttgttttttgaacagttattctaaatacccaatgttcacagcatatttcacttcccatggttcactgttttgttgtattagtagctctaattctaaggtgtcaatgaatcttaggc

SEQ ID NO: 74537 - DNA, 3801 bp, Zea Mays
ggccaacctcgcgccccatccgcatccgccacatgccacacatgtccaacatcgccagcctcgtccgggagccatgagcaacctcccactccccaccaacacgccttcgcctcacctcgtgatgcccgggacctgcagcagtcgccgcctcccctgagcgtctgagatgcagctccacgctcatctgcgtcccccgccgcaggagccacgttgtgcctgccgccagccccgacacctccagatgttgcctccatccatcctccgagcttaccgcctcgcccccgcccccaaaccctagaccccctacaatcacgaggaaggggagaacggccgaggaggatgctccgcaaggaaggggaggacggtcgaggatgacgttgttgctcgtcgctgagcatcttcgcgccctcagtgctgccaaggagccctctctatccctgatggcgtcccaaccgttggccgatcgtcggcgatgatgacccagcctccctctccacgtccctgctccccaactcatacaggaattcacaagagcaatatggtacaccaatgccacacattggacaaacaacagtaagacttccatataccttcttggttgtatatctgacatatttatcccaaaatgaacttttgaatcatattaatccgttatctgcacaaaagttctcttctcttccctactatccatcaaaataagaaaaacaccttgaattcaattagaagttttcacatttgtacattttgttaaatgatgttatgacatcccccaaaaaaagttctcactaatgcatttatttgttcaacatggagtcaccccaaatgtgcttatcttgttgcactttacattatgggcatacctttccttgtacagtgagatatgtatttcatttttcaggttgaagttgatcttttgaattatggtgtgatagaaggtgatgaatcatgtaaacatttctctgaactaaaagtcttacatccatggatgatcaaagatggcatgaatcttacaaaggaacagagattagagaaaattgagtcacaaaaacttgaaaaatatgaagccaaaggtgacaagagacatgacttgaaagatgatcaaagtgtacaggaagaatacataaatgcatattatgaggccttgaggaaaagttggaagaggaagaagcaaaaagcagaatgcagcatgaaggcaagatttttgtccctgatgctcaaagggaacgccaagttgacaataaatacaagcaggatgatgatgaagaaggcattgaataagtattccagctttcttatatggacagtaggaacccaaggtttgctgtgtaatccattatcaacagttgcactcacattagccttgtggcgattcttttcaaaacaggatgatttaaacccatatgttgttccaatggctatgggcatttaacgtcaactagagagtcccttggatatgactacaagtactatcatcaggaggattgttgctaaccatgaagcttacctgtgtattgtcagctttcaaactcgatgaaccaactgagaaagtactgcttatgaagctagagaagcatggaaggagtgttgctgaatcaaaggcaaaagaagaagctggaagagttttgatttgcatgaaggataggtcctcgacacagttcagcagagatgctggctctatgcccaaggtgtggacaggaaaggaggacataaaagccataactaaaactgttcgctcagttgtacgccagatgctaatatttaatactctatatatagaatactgttgaagacgcttctaaagcactagagtattgtagcactgatggaaggccttcgatgaaatgtttccctgaaagttgcatactacatcgctgaagcactacaatattgtaacactgagggaaggcctttgtatcatgacctaaattcatatagggccctctttgatgaggtaattgttgctttggttttcacttttccttacaaccttcgaattatgtggctatgtctgaaaacttaatacttctacagttctcgggtcttcataccattccaatttgtgttagctaataaacaagtcaggctatgtctgaaaccagtatctaatagttctccgcccaacaaggaactgtgcaacataaaaacaaatcttaaacaagttacatgttctgaattttagaaactcaaactccactctaagggctaaccggctaaccgaacatgttatagaacaaactcagtcctaaattgtagacatattggaattctgcgtatgttttttccaacctatcttcaaactatacaagaattattatctaatataaacaatacattgacaataatgtacacaaaaatccatgtatttaatgtgtggacatggtatcatcatgtctgactaacccttttttactttcattgaatgaagttcgtacatgtatttgaggtattttttattttcttcctactataagccttgcttagatactgatctaagatcatctccaagggacagacaaaaaatcctagaggttctcacataagtacggtttagagaagggataaaccgaggaaagcctcccccacaaatacagaaaggctgcctcgaacctatgatttggtgactcagtgaaacaaacaactctcactactgcactaggcctgccattgtttacgagcatccccaagggccttacttaaattcactctctaaattttaatttggtgagccattttaataaaaatatgtttgataggttttttatcttctaacaatttttatgtatcttgtacgcactctagagaaccaacccactcactgctctttatttactgcatgctatttaggtctgctaagcaaaaaatgatattctttctcaatcttttgtcatgtttagataaatttggtggttttaggataaagtttgtgaagggcttcactttttttttctataattagaatttaactcaaaagttttcccttgaaattcaagttgattttgagaagtatgaagggatgattaaggtcatggagaaggtggtaatacagttaattctatggagctcactggaggagcactaccttttgccagttgcttgcaagaatgtaattggaatccgatgtgcttcatggcgcatcgtatcctccattgagtatagggaataaggttgtgtcaacatggaccgtgccactctcatcgagggctaccataacaagattgaagttgaactcaacaagatctgcgttggaatcctcaagctctttgcttcccaccttcccccctcattaatagttccaaagtccaaggtcttctacctcaagatgaagggtgattactacaggatattgctttggaggagttggcccccttatcctattaggctttggctgatgcttaacctctcaactctcctgatcttgctcgtggtctccccaaacaggcaaagccaacgaatgaaagggactcactcgcagcaacaaccaaaaagctgatcacgcattctccttttcacatttgttgcatttaattaattcatccaatagcataaattggcactccttttgtgttattgctctttggttggtcttattgttgttgttgtactgcttgccatgtgtattttatcataagtgttgttttggctaatccctaacgatgcaatacatttgagcaacaattcaattgttttgttttttgaacagttattctaaatacccaatgttcacagcatatttcacttcccatggttcactgttttgttgtattagtagctctaattctaaggtgtcaatgaatcttaggc

SEQ ID NO: 74538 - DNA, 1573 bp, Zea Mays
acgggtcaccagtcaccacatccctccctcactgccatttgtttggttgttcctctcgctcgccagtcgccaccaggcagcaggcatcccaatctcgcgagagccagtagcggcggcggcgcttccggcttcccttcccattggcctccgggatggcgctccgcctccacgacgtcgcgctctgcctctccccgccgctcgccgcccgccgccgcagcggcggcagtttcgtcgccgtcgcctccatgacgtccgccgccgtctccaccagggtggagaacaagaagccatttgctcctccgagggaggtacatgtccaggttacacattcaatgccatctcacaagattgaaattttcaagtcacttgatgattgggctagagataatatcttgacacatctcaagccagtcgagaagtgttggcagccacaggatttcctccctgacccagcatctgaaggatttcatgatgaagttaaggagctcagagaacgtgccaaggagatccctgatgattattttgtttgtttggttggagacatgattactgaggaagctctaccaacataccagactatgcttaacaccctcgacggtgtcagagatgagacaggtgcaagccccactgcttgggctgtttggacgagggcatggactgctgaggagaacaggcatggtgatcttctcaacaagtacatgtacctcactgggagggtagatatgaggcaaattgagaagacaattcagtatcttattggctctggaatggatcctaggactgagaataatccttatcttggtttcatctacacctccttccaagagcgggcgaccttcatctcgcatgggaacactgctcgtcatgccaaggactttggcgacttaaagctcgcacaaatctgtggcatcatcgcctcagatgagaagcgacatgaaactgcgtacaccaagatcgtggagaagttgtttgagatcgaccctgatggtacagtggttgctctggctgacatgatgaagaagaagatctcaatgcctgcccacctgatgtttgacggtggaaggtggcggacctgactggtctgtcgggtgaggggaacaaggcgcaggactacctctgcacccttgcttcaaggatccggaggctagacgagagggcccagagcagagccaagaaagcaggcacgctgcctttcagctgggtatatggtagggaagtccaactgtgaaatcggaaacccattgcgactgcttgagttggagcatagtctatcatgcaccctatgacgcatcgcgacgacaagacctggtgtgtcgcgtgacatagttgttcaggttttgaccaaatggtctgggagcatttgttttgccttgtgccgtctcatagagcgttaggatagtgtacgtctgtgttctagctttgttttgtctgctgctttgatgtacaacttgtggccatgaggctggacatggagtgaacatgttgtacattgtcgctggcggtatgtttcggtatgttatttcagttgttgagatctgttaatttttttgtgagctatggaggtcgttctgtt

SEQ ID NO: 74539 - DNA, 2991 bp, Zea Mays
ctgccgcctgcaacccactcagccagcctcggctagttgccctgcagacttctcagtttctcttataacaggacccaatccccaagcctcaagatacagcagtgatggacattgagcgatgcaggatatggtggccacgccaggagctgcagttcaagcagaaacccttctcaccgaggctcatcctgtttggatggttcttcagcagtgctggttctatcgacatcgtcatctctgcagctgtgccccaagttcacatcctgcactcttttgccacactggacaccctccagaccatcatcctttcctcaaataaaaggatgccagtaagcctgcaagaatctgctgcatttaccattcttggggattgtgtccgacacccccctaaagagttagaaggatactgctttaataaattggagcagctgcccttggatgcaaactttgttcagaaagaacattttggcacgagaagaaacaatgtcatgattggatcagttgggaatggggatcagggtccaagttatgatcataggagatggggatgcgattgttgtgtgttggatggttttctggaagtttgcagaaagtctgcagtcaaagagggcagttgggtgcacttgtattggaagtttggagagaactttaagagcaacctgaatcaagttccagttcttcaccatttgtatcttgatggccaacagattgaaaacaatcgttgccatgtatgtcatactgtatgaggttccgaccattggcagaaaccatttctcactgggtttggatgcaccccgtacgttgaatgtttctttcaaaaagccaaattggataaatgatctacaaaagcaaccatcatttcttgatttggattcaattgttttggcgcttaattgttcaaatgcagctagactgccggacactcaggaatgttctactacatgctcaggggcttatttcatctttgcatctgtatacgatgtcttagttcaagtaacatggcattgcgtggggatatttttggcttcatcatcaactattctctacatcatgattctaatgtcccggaaatgtttaagccatatgccccagtacttgatgctaaataaggttttcagacattcatggaacaacattcatcttcgcagctgtcaaattctctactggccaattgtcttccaagatgcttccttaagctccactgtgaatgttgaatatgcacacaaagctgcaattcggaagcatgctttgtggtcaagtatcattgtggatctcctgatgggttttgtccttggagcagcattcttattaaatacagagactatttgtatttggactattgctctcgtccaccacatgacagaagcaatcttgagatccggttgtgtgtggctgatgggtgttccagctggatttaagctgaatacagagttagcagagctcttaggcatgatttctcttaatgcagttcaaatttactctaccctttggtttttcgttggaggctacctgagacatataattcaaggcattgcagtctctggaattattttaggacttacagctccagtttcattctttattgacattatccagcttgctacgttgcatgttaccatccttcactggttaatctcatcgttatattcaagacaaattcagacagtagcatcattgtggcgtcttttcagagggcgcaaatggaatcctcttaggcagaggttagatagttatgactacacagttgaacagcacgtggttggttccctgttgtttacaccaatcctacttcttatacctacaacttctgtattctatgtattcttctctatcttgacaacaacggttatctgggtgtgtgtgatgctggaaattgtcattgctctaatccaatccactccttatgctgagttaactctatgggtgatgaggaggcacagatttcctgctggattatttttctttcatctgccatcaaatgggcatacttttgaagatgacgacctatcatcccattcagtcggatgttgcaatgaaacaagaaaggaggatctaatcgacaaactatcagaatcattagtttcagaacttcattgcagctatgcgacttttgttcaagtaatcagatcaaattacgagagagttttcaacaggactggttactccttttgcaaacaattggcatacgggatccttagcggtgaaagggtgccttcatcgcttcatctgcagacgtctccctcatttccctggatgaacatcggtattacggagtattggatgcactgctatgtttgtgtccttcagtgtgcaccaaagagatacatgatgattgcatttgaacgaaccttggttcttttcggcggttttggtttcaaatagaggttttctatagtggtggttgattattctggaggcaagggaaggtcatctgtacactcatggagccttttccctcgtaacaatagcgatgcgagttttttaagtcagctgtaattttatagttatatgggatttgcacgattatggtgcttctacttgagtacttgacactcgtgtgctagctgtgttttcatgaaagaaactgaatatcagctagactgacgggtgagagaaaaggactcatgctccgctgcaaagatgaacctcattgttgcttcacgataatagcttcttctgcacgtggcaaatagctggcatgtagcaggatattttcttttcaaatatttggggtacctgaccttgcttacccaaaaagccgagtagatttagcttactatgcattggtgatatttttggcaatgaacacgaatcgagaagtcgtagcgttatagcgagctgggccaatgtaagtcagtgttgcacgggatattgtctacatcacatgcagatttttttttcccacgcgaacgatgcagtgaacatgcatttaggttaaactcttaggctcatttggaatgcaacaagtttatagagattgtatttgaattttac

SEQ ID NO: 74540 - DNA, 2989 bp, Zea Mays
ctgccgcctgcaacccactcagccagcctcggctagttgccctgcagacttctcagtttctcttataacaggacccaatccccaagcctcaagatacagcagtgatggacattgagcgatgcaggatatggtggccacgccaggagctgcagttcaagcagaaacccttctcaccgaggctcatcctgtttggatggttcttcagcagtgctggttctatcgacatcgtcatctctgcagctgtgccccaagttcacatcctgcactcttttgccacactggacaccctccagaccatcatcctttcctcaaataaaaggatgccagtaagcctgcaagaatctgctgcatttaccattcttggggattgtgtccgacacccccctaaagagttagaaggatactgctttaataaattggagcagctgcccttggatgcaaactttgttcagaaagaacattttggcacgagaagaaacaatgtcatgattggatcagttgggaatggggatcagggtccaagttatgatcataggagatggggatgcgattgttgtgtgttggatggttttctggaagtttgcagaaagtctgcagtcaaagagggcagttgggtgcacttgtattggaagtttggagagaactttaagagcaacctgaatcaagttccagttcttcaccatttgtatcttgatggccaacagattgaaaacaatcgttgccatgtcatactgtatgaggttccgaccattggcagaaaccatttctcactgggtttggatgcaccccgtacgttgaatgtttctttcaaaaagccaaattggataaatgatctacaaaagcaaccatcatttcttgatttggattcaattgttttggcgcttaattgttcaaatgcagctagactgccggacactcaggaatgttctactacatgctcaggggcttatttcatctttgcatctgtatacgatgtcttagttcaagtaacatggcattgcgtggggatatttttggcttcatcatcaactattctctacatcatgattctaatgtcccggaaatgtttaagccatatgccccagtacttgatgctaaataaggttttcagacattcatggaacaacattcatcttcgcagctgtcaaattctctactggccaattgtcttccaagatgcttccttaagctccactgtgaatgttgaatatgcacacaaagctgcaattcggaagcatgctttgtggtcaagtatcattgtggatctcctgatgggttttgtccttggagcagcattcttattaaatacagagactatttgtatttggactattgctctcgtccaccacatgacagaagcaatcttgagatccggttgtgtgtggctgatgggtgttccagctggatttaagctgaatacagagttagcagagctcttaggcatgatttctcttaatgcagttcaaatttactctaccctttggtttttcgttggaggctacctgagacatataattcaaggcattgcagtctctggaattattttaggacttacagctccagtttcattctttattgacattatccagcttgctacgttgcatgttaccatccttcactggttaatctcatcgttatattcaagacaaattcagacagtagcatcattgtggcgtcttttcagagggcgcaaatggaatcctcttaggcagaggttagatagttatgactacacagttgaacagcacgtggttggttccctgttgtttacaccaatcctacttcttatacctacaacttctgtattctatgtattcttctctatcttgacaacaacggttatctgggtgtgtgtgatgctggaaattgtcattgctctaatccaatccactccttatgctgagttaactctatgggtgatgaggaggcacagatttcctgctggattatttttctttcatctgccatcaaatgggcatacttttgaagatgacgacctatcatcccattcagtcggatgttgcaatgaaacaagaaaggaggatctaatcgacaaactatcagaatcattagtttcagaacttcattgcagctatgcgacttttgttcaagtaatcagatcaaattacgagagagttttcaacaggactggttactccttttgcaaacaattggcatacgggatccttagcggtgaaagggtgccttcatcgcttcatctgcagacgtctccctcatttccctggatgaacatcggtattacggagtattggatgcactgctatgtttgtgtccttcagtgtgcaccaaagagagatacatgatgattgcatttgaacgaaccttggttcttttcggcggttttggtttcaaatagaggttttctatagtggtggttgattattctggaggcaagggaaggtcatctgtacactcatggagccttttccctcgtaacaatagcgatgcgagttttttaagtcagctgtaattttatagttatatgggatttgcacgattatggtgcttctacttgagtacttgacactcgtgtgctagctgtgttttcatgaaagaaactgaatatcagctagactgacgggtgagagaaaaggactcatgctccgctgcaaagatgaacctcattgttgcttcacgataatagcttcttctgcacgtggcaaatagctggcatgtagcaggatattttcttttcaaatatttggggtacctgaccttgcttacccaaaaagccgagtagatttagcttactatgcattggtgatatttttggcaatgaacacgaatcgagaagtcgtagcgttatagcgagctgggccaatgtaagtcagtgttgcacgggatattgtctacatcacatgcagatttttttttcccacgcgaacgatgcagtgaacatgcatttaggttaaactcttaggctcatttggaatgcaacaagtttatagagattgtatttgaattttac

SEQ ID NO: 74541 - DNA, 2942 bp, Zea Mays
caacccactcagccagcctcggctagttgccctgcagacttctcagtttctcttataacaggacccaatccccaagcctcaagatacagcagtgatggacattgagcgatgcaggatatggtggccacgccaggagctgcagttcaagcagaaacccttctcaccgaggctcatcctgtttggatggttcttcagcagtgctggttctatcgacatcgtcatctctgcagctgtgccccaagttcacatcctgcactcttttgccacactggacaccctccagaccatcatcctttcctcaaataaaaggatgccagtaagcctgcaagaatctgctgcatttaccattcttggggattgtgtccgacacccccctaaagagttagaaggatactgctttaataaattggagcagctgcccttggatgcaaactttgttcagaaagaacattttggcacgagaagaaacaatgtcatgattggatcagttgggaatggggatcagggtccaagttatgatcataggagatggggatgcgattgttgtgtgttggatggttttctggaagtttgcagaaagtctgcagtcaaagagggcagttgggtgcacttgtattggaagtttggagagaactttaagagcaacctgaatcaagttccagttcttcaccatttgtatcttgatggccaacagattgaaaacaatcgttgccatgtcatactgtatgaggttccgaccattggcagaaaccatttctcactgggtttggatgcaccccgtacgttgaatgtttctttcaaaaagccaaattggataaatgatctacaaaagcaaccatcatttcttgatttgctagactgccggacactcaggaatgttctactacatgctcaggggcttatttcatctttgcatctgtatacgatgtcttagttcaagtaacatggcattgcgtggggatatttttggcttcatcatcaactattctctacatcatgattctaatgtcccggaaatgtttaagccatatgccccagtacttgatgctaaataaggttttcagacattcatggaacaacattcatcttcgcagctgtcaaattctctactggccaattgtcttccaagatgcttccttaagctccactgtgaatgttgaatatgcacacaaagctgcaattcggaagcatgctttgtggtcaagtatcattgtggatctcctgatgggttttgtccttggagcagcattcttattaaatacagagactatttgtatttggactattgctctcgtccaccacatgacagaagcaatcttgagatccggttgtgtgtggctgatgggtgttccagctggatttaagctgaatacagagttagcagagctcttaggcatgatttctcttaatgcagttcaaatttactctaccctttggtttttcgttggaggctacctgagacatataattcaaggcattgcagtctctggaattattttaggacttacagctccagtttcattctttattgacattatccagcttgctacgttgcatgttaccatccttcactggttaatctcatcgttatattcaagacaaattcagacagtagcatcattgtggcgtcttttcagagggcgcaaatggaatcctcttaggcagaggttagatagttatgactacacagttgaacagcacgtggttggttccctgttgtttacaccaatcctacttcttatacctacaacttctgtattctatgtattcttctctatcttgacaacaacggttatctgggtgtgtgtgatgctggaaattgtcattgctctaatccaatccactccttatgctgagttaactctatgggtgatgaggaggcacagatttcctgctggattatttttctttcatctgccatcaaatgggcatacttttgaagatgacgacctatcatcccattcagtcggatgttgcaatgaaacaagaaaggaggatctaatcgacaaactatcagaatcattagtttcagaacttcattgcagctatgcgacttttgttcaagtaatcagatcaaattacgagagagttttcaacaggactggttactccttttgcaaacaattggcatacgggatccttagcggtgaaagggtgccttcatcgcttcatctgcagacgtctccctcatttccctggatgaacatcggtattacggagtattggatgcactgctatgtttgtgtccttcagtgtgcaccaaagagagatacatgatgattgcatttgaacgaaccttggttcttttcggcggttttggtttcaaatagaggttttctatagtggtggttgattattctggaggcaagggaaggtcatctgtacactcatggagccttttccctcgtaacaatagcgatgcgagttttttaagtcagctgtaattttatagttatatgggatttgcacgattatggtgcttctacttgagtacttgacactcgtgtgctagctgtgttttcatgaaagaaactgaatatcagctagactgacgggtgagagaaaaggactcatgctccgctgcaaagatgaacctcattgttgcttcacgataatagcttcttctgcacgtggcaaatagctggcatgtagcaggatattttcttttcaaatatttggggtacctgaccttgcttacccaaaaagccgagtagatttagcttactatgcattggtgatatttttggcaatgaacacgaatcgagaagtcgtagcgttatagcgagctgggccaatgtaagtcagtgttgcacgggatattgtctacatcacatgcagatttttttttcccacgcgaacgatgcagtgaacatgcatttaggttaaactcttaggctcatttggaatgcaacaagtttatagagattgtatttgaattttac

SEQ ID NO: 74542 - DNA, 3029 bp, Zea Mays
cttcaatactgggttcatgattcattcctcttcctgtccttggatggcgacgtcgttactgggacccacacaggcacaaccacacatccactgagctgttgaggacctgaggacccaatccccaagcctcaagatacagcagtgatggacattgagcgatgcaggatatggtggccacgccaggagctgcagttcaagcagaaacccttctcaccgaggctcatcctgtttggatggttcttcagcagtgctggttctatcgacatcgtcatctctgcagctgtgccccaagttcacatcctgcactcttttgccacactggacaccctccagaccatcatcctttcctcaaataaaaggatgccagtaagcctgcaagaatctgctgcatttaccattcttggggattgtgtccgacacccccctaaagagttagaaggatactgctttaataaattggagcagctgcccttggatgcaaactttgttcagaaagaacattttggcacgagaagaaacaatgtcatgattggatcagttgggaatggggatcagggtccaagttatgatcataggagatggggatgcgattgttgtgtgttggatggttttctggaagtttgcagaaagtctgcagtcaaagagggcagttgggtgcacttgtattggaagtttggagagaactttaagagcaacctgaatcaagttccagttcttcaccatttgtatcttgatggccaacagattgaaaacaatcgttgccatgtcatactgtatgaggttccgaccattggcagaaaccatttctcactgggtttggatgcaccccgtacgttgaatgtttctttcaaaaagccaaattggataaatgatctacaaaagcaaccatcatttcttgatttggattcaattgttttggcgcttaattgttcaaatgcagctagactgccggacactcaggaatgttctactacatgctcaggggcttatttcatctttgcatctgtatacgatgtcttagttcaagtaacatggcattgcgtggggatatttttggcttcatcatcaactattctctacatcatgattctaatgtcccggaaatgtttaagccatatgccccagtacttgatgctaaataaggttttcagacattcatggaacaacattcatcttcgcagctgtcaaattctctactggccaattgtcttccaagatgcttccttaagctccactgtgaatgttgaatatgcacacaaagctgcaattcggaagcatgctttgtggtcaagtatcattgtggatctcctgatgggttttgtccttggagcagcattcttattaaatacagagactatttgtatttggactattgctctcgtccaccacatgacagaagcaatcttgagatccggttgtgtgtggctgatgggtgttccagctggatttaagctgaatacagagttagcagagctcttaggcatgatttctcttaatgcagttcaaatttactctaccctttggtttttcgttggaggctacctgagacatataattcaaggcattgcagtctctggaattattttaggacttacagctccagtttcattctttattgacattatccagcttgctacgttgcatgttaccatccttcactggttaatctcatcgttatattcaagacaaattcagacagtagcatcattgtggcgtcttttcagagggcgcaaatggaatcctcttaggcagaggttagatagttatgactacacagttgaacagcacgtggttggttccctgttgtttacaccaatcctacttcttatacctacaacttctgtattctatgtattcttctctatcttgacaacaacggttatctgggtgtgtgtgatgctggaaattgtcattgctctaatccaatccactccttatgctgagttaactctatgggtgatgaggaggcacagatttcctgctggattatttttctttcatctgccatcaaatgggcatacttttgaagatgacgacctatcatcccattcagtcggatgttgcaatgaaacaagaaaggaggatctaatcgacaaactatcagaatcattagtttcagaacttcattgcagctatgcgacttttgttcaagtaatcagatcaaattacgagagagttttcaacaggactggttactccttttgcaaacaattggcatacgggatccttagcggtgaaagggtgccttcatcgcttcatctgcagacgtctccctcatttccctggatgaacatcggtattacggagtattggatgcactgctatgtttgtgtccttcagtgtgcaccaaagagagatacatgatgattgcatttgaacgaaccttggttcttttcggcggttttggtttcaaatagaggttttctatagtggtggttgattattctggaggcaagggaaggtcatctgtacactcatggagccttttccctcgtaacaatagcgatgcgagttttttaagtcagctgtaattttatagttatatgggatttgcacgattatggtgcttctacttgagtacttgacactcgtgtgctagctgtgttttcatgaaagaaactgaatatcagctagactgacgggtgagagaaaaggactcatgctccgctgcaaagatgaacctcattgttgcttcacgataatagcttcttctgcacgtggcaaatagctggcatgtagcaggatattttcttttcaaatatttggggtacctgaccttgcttacccaaaaagccgagtagatttagcttactatgcattggtgatatttttggcaatgaacacgaatcgagaagtcgtagcgttatagcgagctgggccaatgtaagtcagtgttgcacgggatattgtctacatcacatgcagatttttttttcccacgcgaacgatgcagtgaacatgcatttaggttaaactcttaggctcatttggaatgcaacaagtttatagagattgtatttgaattttac

SEQ ID NO: 74543 - DNA, 2853 bp, Zea Mays
catccacacctgtggtggaataagcatcgcccacagacccaatccccaagcctcaagatacagcagtgatggacattgagcgatgcaggatatggtggccacgccaggagctgcagttcaagcagaaacccttctcaccgaggctcatcctgtttggatggttcttcagcagtgctggttctatcgacatcgtcatctctgcagctgtgccccaagttcacatcctgcactcttttgccacactggacaccctccagaccatcatcctttcctcaaataaaaggatgccagtaagcctgcaagaatctgctgcatttaccattcttggggattgtgtccgacacccccctaaagagttagaaggatactgctttaataaattggagcagctgcccttggatgcaaactttgttcagaaagaacattttggcacgagaagaaacaatgtcatgattggatcagttgggaatggggatcagggtccaagttatgatcataggagatggggatgcgattgttgtgtgttggatggttttctggaagtttgcagaaagtctgcagtcaaagagggcagttgggtgcacttgtattggaagtttggagagaactttaagagcaacctgaatcaagttccagttcttcaccatttgtatcttgatggccaacagattgaaaacaatcgttgccatgtatgtcatactgtatgaggttccgaccattggcagaaaccatttctcactgggtttggatgcaccccgtacgttgaatgtttctttcaaaaagccaaattggataaatgatctacaaaagcaaccatcatttcttgatttggattcaattgttttggcgcttaattgttcaaatgcagctagactgccggacactcaggaatgttctactacatgctcaggggcttatttcatctttgcatctgtatacgatgtcttagttcaagtaacatggcattgcgtggggatatttttggcttcatcatcaactattctctacatcatgattctaatgtcccggaaatgtttaagccatatgccccagtacttgatgctaaataaggttttcagacattcatggaacaacattcatcttcgcagctgtcaaattctctactggccaattgtcttccaagatgcttccttaagcattcttattaaatacagagactatttgtatttggactattgctctcgtccaccacatgacagaagcaatcttgagatccggttgtgtgtggctgatgggtgttccagctggatttaagctgaatacagagttagcagagctcttaggcatgatttctcttaatgcagttcaaatttactctaccctttggtttttcgttggaggctacctgagacatataattcaaggcattgcagtctctggaattattttaggacttacagctccagtttcattctttattgacattatccagcttgctacgttgcatgttaccatccttcactggttaatctcatcgttatattcaagacaaattcagacagtagcatcattgtggcgtcttttcagagggcgcaaatggaatcctcttaggcagaggttagatagttatgactacacagttgaacagcacgtggttggttccctgttgtttacaccaatcctacttcttatacctacaacttctgtattctatgtattcttctctatcttgacaacaacggttatctgggtgtgtgtgatgctggaaattgtcattgctctaatccaatccactccttatgctgagttaactctatgggtgatgaggaggcacagatttcctgctggattatttttctttcatctgccatcaaatgggcatacttttgaagatgacgacctatcatcccattcagtcggatgttgcaatgaaacaagaaaggaggatctaatcgacaaactatcagaatcattagtttcagaacttcattgcagctatgcgacttttgttcaagtaatcagatcaaattacgagagagttttcaacaggactggttactccttttgcaaacaattggcatacgggatccttagcggtgaaagggtgccttcatcgcttcatctgcagacgtctccctcatttccctggatgaacatcggtattacggagtattggatgcactgctatgtttgtgtccttcagtgtgcaccaaagagagatacatgatgattgcatttgaacgaaccttggttcttttcggcggttttggtttcaaatagaggttttctatagtggtggttgattattctggaggcaagggaaggtcatctgtacactcatggagccttttccctcgtaacaatagcgatgcgagttttttaagtcagctgtaattttatagttatatgggatttgcacgattatggtgcttctacttgagtacttgacactcgtgtgctagctgtgttttcatgaaagaaactgaatatcagctagactgacgggtgagagaaaaggactcatgctccgctgcaaagatgaacctcattgttgcttcacgataatagcttcttctgcacgtggcaaatagctggcatgtagcaggatattttcttttcaaatatttggggtacctgaccttgcttacccaaaaagccgagtagatttagcttactatgcattggtgatatttttggcaatgaacacgaatcgagaagtcgtagcgttatagcgagctgggccaatgtaagtcagtgttgcacgggatattgtctacatcacatgcagatttttttttcccacgcgaacgatgcagtgaacatgcatttaggttaaactcttaggctcatttggaatgcaacaagtttatagagattgtatttgaattttac

SEQ ID NO: 74544 - DNA, 2810 bp, Zea Mays
caatccccaagcctcaagatacagcagtgatggacattgagcgatgcaggatatggtggccacgccaggagctgcagttcaagcagaaacccttctcaccgaggctcatcctgtttggatggttcttcagcagtgctggttctatcgacatcgtcatctctgcagctgtgccccaagttcacatcctgcactcttttgccacactggacaccctccagaccatcatcctttcctcaaataaaaggatgccagtaagcctgcaagaatctgctgcatttaccattcttggggattgtgtccgacacccccctaaagagttagaaggatactgctttaataaattggagcagctgcccttggatgcaaactttgttcagaaagaacattttggcacgagaagaaacaatgtcatgattggatcagttgggaatggggatcagggtccaagttatgatcataggagatggggatgcgattgttgtgtgttggatggttttctggaagtttgcagaaagtctgcagtcaaagagggcagttgggtgcacttgtattggaagtttggagagaactttaagagcaacctgaatcaagttccagttcttcaccatttgtatcttgatggccaacagattgaaaacaatcgttgccatgtcatactgtatgaggttccgaccattggcagaaaccatttctcactgggtttggatgcaccccgtacgttgaatgtttctttcaaaaagccaaattggataaatgatctacaaaagcaaccatcatttcttgatttggattcaattgttttggcgcttaattgttcaaatgcagctagactgccggacactcaggaatgttctactacatgctcaggggcttatttcatctttgcatctgtatacgatgtcttagttcaagtaacatggcattgcgtggggatatttttggcttcatcatcaactattctctacatcatgattctaatgtcccggaaatgtttaagccatatgccccagtacttgatgctaaataaggttttcagacattcatggaacaacattcatcttcgcagctgtcaaattctctactggccaattgtcttccaagatgcttccttaagcattcttattaaatacagagactatttgtatttggactattgctctcgtccaccacatgacagaagcaatcttgagatccggttgtgtgtggctgatgggtgttccagctggatttaagctgaatacagagttagcagagctcttaggcatgatttctcttaatgcagttcaaatttactctaccctttggtttttcgttggaggctacctgagacatataattcaaggcattgcagtctctggaattattttaggacttacagctccagtttcattctttattgacattatccagcttgctacgttgcatgttaccatccttcactggttaatctcatcgttatattcaagacaaattcagacagtagcatcattgtggcgtcttttcagagggcgcaaatggaatcctcttaggcagaggttagatagttatgactacacagttgaacagcacgtggttggttccctgttgtttacaccaatcctacttcttatacctacaacttctgtattctatgtattcttctctatcttgacaacaacggttatctgggtgtgtgtgatgctggaaattgtcattgctctaatccaatccactccttatgctgagttaactctatgggtgatgaggaggcacagatttcctgctggattatttttctttcatctgccatcaaatgggcatacttttgaagatgacgacctatcatcccattcagtcggatgttgcaatgaaacaagaaaggaggatctaatcgacaaactatcagaatcattagtttcagaacttcattgcagctatgcgacttttgttcaagtaatcagatcaaattacgagagagttttcaacaggactggttactccttttgcaaacaattggcatacgggatccttagcggtgaaagggtgccttcatcgcttcatctgcagacgtctccctcatttccctggatgaacatcggtattacggagtattggatgcactgctatgtttgtgtccttcagtgtgcaccaaagagagatacatgatgattgcatttgaacgaaccttggttcttttcggcggttttggtttcaaatagaggttttctatagtggtggttgattattctggaggcaagggaaggtcatctgtacactcatggagccttttccctcgtaacaatagcgatgcgagttttttaagtcagctgtaattttatagttatatgggatttgcacgattatggtgcttctacttgagtacttgacactcgtgtgctagctgtgttttcatgaaagaaactgaatatcagctagactgacgggtgagagaaaaggactcatgctccgctgcaaagatgaacctcattgttgcttcacgataatagcttcttctgcacgtggcaaatagctggcatgtagcaggatattttcttttcaaatatttggggtacctgaccttgcttacccaaaaagccgagtagatttagcttactatgcattggtgatatttttggcaatgaacacgaatcgagaagtcgtagcgttatagcgagctgggccaatgtaagtcagtgttgcacgggatattgtctacatcacatgcagatttttttttcccacgcgaacgatgcagtgaacatgcatttaggttaaactcttaggctcatttggaatgcaacaagtttatagagattgtatttgaattttac

SEQ ID NO: 74545 - DNA, 2894 bp, Zea Mays
cagtgatggacattgagcgatgcaggatatggtggccacgccaggagctgcagttcaagcagaaacccttctcaccgaggctcatcctgtttggatggttcttcagcagtgctggttctatcgacatcgtcatctctgcagctgtgccccaagttcacatcctgcactcttttgccacactggacaccctccagaccatcatcctttcctcaaataaaaggatgccagtaagcctgcaagaatctgctgcatttaccattcttggggattgtgtccgacacccccctaaagagttagaaggatactgctttaataaattggagcagctgcccttggatgcaaactttgttcagaaagaacattttggcacgagaagaaacaatgtcatgattggatcagttgggaatggggatcagggtccaagttatgatcataggagatggggatgcgattgttgtgtgttggatggttttctggaagtttgcagaaagtctgcagtcaaagagggcagttgggtgcacttgtattggaagtttggagagaactttaagagcaacctgaatcaagttccagttcttcaccatttgtatcttgatggccaacagattgaaaacaatcgttgccatgtatgtcatactgtatgaggttccgaccattggcagaaaccatttctcactgggtttggatgcaccccgtacgttgaatgtttctttcaaaaagccaaattggataaatgatctacaaaagcaaccatcatttcttgatttggattcaattgttttggcgcttaattgttcaaatgcagctagactgccggacactcaggaatgttctactacatgctcaggggcttatttcatctttgcatctgtatacgatgtcttagttcaagtaacatggcattgcgtggggatatttttggcttcatcatcaactattctctacatcatgattctaatgtcccggaaatgtttaagccatatgccccagtacttgatgctaaataaggttttcagacattcatggaacaacattcatcttcgcagctgtcaaattctctactggccaattgtcttccaagatgcttccttaagctccactgtgaatgttgaatatgcacacaaagctgcaattcggaagcatgctttgtggtcaagtatcattgtggatctcctgatgggttttgtccttggagcagcattcttattaaatacagagactatttgtatttggactattgctctcgtccaccacatgacagaagcaatcttgagatccggttgtgtgtggctgatgggtgttccagctggatttaagctgaatacagagttagcagagctcttaggcatgatttctcttaatgcagttcaaatttactctaccctttggtttttcgttggaggctacctgagacatataattcaaggcattgcagtctctggaattattttaggacttacagctccagtttcattctttattgacattatccagcttgctacgttgcatgttaccatccttcactggttaatctcatcgttatattcaagacaaattcagacagtagcatcattgtggcgtcttttcagagggcgcaaatggaatcctcttaggcagaggttagatagttatgactacacagttgaacagcacgtggttggttccctgttgtttacaccaatcctacttcttatacctacaacttctgtattctatgtattcttctctatcttgacaacaacggttatctgggtgtgtgtgatgctggaaattgtcattgctctaatccaatccactccttatgctgagttaactctatgggtgatgaggaggcacagatttcctgctggattatttttctttcatctgccatcaaatgggcatacttttgaagatgacgacctatcatcccattcagtcggatgttgcaatgaaacaagaaaggaggatctaatcgacaaactatcagaatcattagtttcagaacttcattgcagctatgcgacttttgttcaagtaatcagatcaaattacgagagagttttcaacaggactggttactccttttgcaaacaattggcatacgggatccttagcggtgaaagggtgccttcatcgcttcatctgcagacgtctccctcatttccctggatgaacatcggtattacggagtattggatgcactgctatgtttgtgtccttcagtgtgcaccaaagagagatacatgatgattgcatttgaacgaaccttggttcttttcggcggttttggtttcaaatagaggttttctatagtggtggttgattattctggaggcaagggaaggtcatctgtacactcatggagccttttccctcgtaacaatagcgatgcgagttttttaagtcagctgtaattttatagttatatgggatttgcacgattatggtgcttctacttgagtacttgacactcgtgtgctagctgtgttttcatgaaagaaactgaatatcagctagactgacgggtgagagaaaaggactcatgctccgctgcaaagatgaacctcattgttgcttcacgataatagcttcttctgcacgtggcaaatagctggcatgtagcaggatattttcttttcaaatatttggggtacctgaccttgcttacccaaaaagccgagtagatttagcttactatgcattggtgatatttttggcaatgaacacgaatcgagaagtcgtagcgttatagcgagctgggccaatgtaagtcagtgttgcacgggatattgtctacatcacatgcagatttttttttcccacgcgaacgatgcagtgaacatgcatttaggttaaactcttaggctcatttggaatgcaacaagtttatagagattgtatttgaattttac

SEQ ID NO: 74546 - DNA, 3931 bp, Zea Mays
cctcccttctccgtccgtggcaacggaagcccccctataaccgcggccgccgctgcaactgcatgcacggcacgaacctcccttctttctcaaattctctctccgcctccctgctccgatgccgcggtgacgcgtggtgcatgcgtgcgcgcgcgccttttcccctgcctggatcccccgtcctctctcgatcggttccagttaacactcgcagcctcgttctcgagtctcgactctcgacttgagtcgccagtggccacgcgcgccgggacacgggcgcgctttctcgctgccgcgccaaagcaggaaacagagcaacggccaggaaggactcacgcgcgaggcgaaaagcgaagcgggtgggagaagcgtgggcgcctgggctagtgctcccgcagcgagcgatctacggtagagttccggccgggcgcgcgggagaggaggaggtcggggggaggatccgatggccgggaacgagtggatcaatgggtacctggaggcgatcctcgacagccacacctcgtcgcggggtgccggcggcggcggcggcggcggggaccccaggtcgccgacgaaggcggcgagcccccgcggcgcgcacatgaacttcaacccctctcactacttcgtcgaggaggtggtcaagggcgtcgacgagagcgacctccaccggacgtggatcaaggtcgtcgccacccgcaacgcccgcgagcgcagcaccaggctcgagaacatgtgctggcggatctggcacctcgcgcgcaagaagaagcagctggagctggagggcatccagagaatctcggcaagaaggaaggaacaggagcaggtgcgtcgtgaggcgacggaggacctggccgaggatctgtcagaaggcgagaagggagacaccatcggcgagcttgcgccggttgagacgaccaagaagaagttccagaggaacttctctgaccttaccgtctggtctgacgacaataaggagaagaagctttacattgtgctcatcagcgtgcatggtcttgttcgtggagaaaacatggaactaggtcgtgattctgatacaggtggccaggtgaaatatgtggtcgaacttgcaagagcgatgtcaatgatgcctggagtgtacagggtggacctcttcactcgtcaagtgtcatctcctgacgtggactggagctacggtgagccaaccgagatgttatgcgccggttccaatgatggagaggggatgggtgagagtggcggagcctacattgtgcgcataccgtgtgggccgcgggataaatacctcaagaaggaagcgttgtggccttacctccaagagtttgtcgatggagcccttgcgcatatcctgaacatgtccaaggctctgggagagcaggttggaaatgggaggccagtactgccttacgtgatacatgggcactatgccgatgctggagatgttgctgctctcctttctggtgcgctgaatgtgccaatggtgctcactggccactcacttgggaggaacaagctggaacaactgctgaagcaagggcgcatgtccaaggaggagatcgattcgacatacaagatcatgaggcgtatcgagggtgaggagctggccctggatgcgtcagagcttgtaatcacgagcacaaggcaggagattgatgagcagtggggattgtacgatggatttgatgtcaagcttgagaaagtgctgagggcacgggcgaggcgcggggttagctgccatggtcgttacatgcctaggatggtggtgattcctccgggaatggatttcagcaatgttgtagttcatgaagacattgatggggatggtgacgtcaaagatgatatcgttggtttggagggtgcctcacccaagtcaatgcccccaatttgggccgaagtgatgcggttcctgaccaaccctcacaagccgatgatcctggcgttatcaagaccagacccgaagaagaacatcactaccctcgtcaaagcgtttggagagtgtcgtccactcagggaacttgcaaaccttactctgatcatgggtaacagagatgacatcgacgacatgtctgctggcaatgccagtgtcctcaccacagttctgaagctgattgacaagtatgatctgtacggaagcgtggcgttccctaagcatcacaatcaggctgacgtcccggagatctatcgcctcgcggccaaaatgaagggcgtcttcatcaaccctgctctcgttgagccgtttggtctcaccctgatcgaggctgcggcacacggactcccgatagtcgctaccaagaatggtggtccggtcgacattacaaatgcattaaacaacggactgctcgttgacccacacgaccagaacgccatcgctgatgcactgctgaagcttgtggcagacaagaacctgtggcaggaatgccggagaaacgggctgcgcaacatccacctctactcatggccggagcactgccgcacttacctcaccagggtggccgggtgccggttaaggaacccgaggtggctgaaggacacaccagcagatgccggagccgatgaggaggagttcctggaggattccatggacgctcaggacctgtcactccgtctgtccatcgacggtgagaagagctcgctgaacactaacgatccactgtggttcgacccccaggatcaagtgcagaagatcatgaacaacatcaagcagtcgtcagcgcttcctccgtccatgtcctcagtcgcagccgagggcacaggcagcaccatgaacaaatacccactcctgcgccggcgccggcgcttgttcgtcatagctgtggactgctaccaggacgatggccgtgctagcaagaagatgctgcaggtgatccaggaagttttcagagcagtccgatcggactcccagatgttcaagatctcagggttcacgctgtcgactgccatgccgttgtccgagacactccagcttctgcagctcggcaagatcccagcgaccgacttcgacgccctcatctgtggcagcggcagcgaggtgtactatcctggcacggcgaactgcatggacgctgaaggaaagctgcgcccagatcaggactatctgatgcacatcagccaccgctggtcccatgacggcgcgaggcagaccatagcgaagctcatgggcgctcaggacggttcaggcgacgctgtcgagcaggacgtggcgtccagtaatgcacactgtgtcgcgttcctcatcaaagacccccaaaaggtgaaaacggtcgatgagatgagggagcggctgaggatgcgtggtctccgctgccacatcatgtactgcaggaactcgacaaggcttcaggttgtccctctgctagcatcaaggtcacaggcactcaggtatctttccgtgcgctggggcgtatctgtggggaacatgtatctgatcaccggggaacatggcgacaccgatctagaggagatgctatccgggctacacaagaccgtgatcgtccgtggcgtcaccgagaagggttcggaagcactggtgaggagcccaggaagctacaagagggacgatgtcgtcccgtctgagacccccttggctgcgtacacgactggtgagctgaaggccgacgagatcatgcgggctctgaagcaagtctccaagacttccagcggcatgtgaatttgatgcttcttttacattttgtccttttcttcactgctatataaaataagttgtgaacagtaccgcgggtgtgtatatatatattgcagtgacaaataaaacaggacactgctaactatactggtgaatatacgactgtcaagattgtatgctaagtactccatttctcaatgtatcaatgtatatagaagttaacgtgcatgaggagataatgatgactcagaagttactaacgattaattcagttttaaaaaaaaa

SEQ ID NO: 74547 - DNA, 841 bp, Zea Mays
cggcggttcctctcttcctcattttcttctttcttgtcaactcgccggtggccccccttcctcaccatcttccccgtagcgaggatggcaatgaggtgttctttcgcataaagaggtccacccagctgaagaagctgatgaacgcctattgcgaccgccagtctgtggacatgaatgccattgcattcctgtttgatggccgcaggcttcgcggcgagcagacccctgatgagctggagatggaggacggcgacgagatcgacgccatgcttcaccagaccggaggcagcgttcctagcaccacctaaaagcagcagctgcggagcctcgttttgctctccgccctgcgtagtactaaacaaaagggaaaaagtctttttaaggaacttgtgatgctctggctccttgtgccattgctgagggacatccttagcctttatttagtggtatggtttggtactttgttctgtcatcactcgtttatctatccctaatacatgccgccatgtttgtacttccaatgacgcgccgatcatttgctttgttttgtctgctcgaagtctatgcttttcaggccatctctttgggcctgtttggttttgtctcctgatccttacgttttgtgcactaagttgatggatcccttttggctgattcagtttgtataattccagccggtgatttgcagctgcctgattgttttttagttaaaatctcctcatatttaaaataagtgttacattaaagtaagttaaattgatgggtagtttatcatggctttaatgcctaccgttttctactttttcacagctgcatcaatctaaacatttgtctttaatcc

SEQ ID NO: 74548 - DNA, 905 bp, Zea Mays
gaacaaaggaaatatgaaggatttttttaggattcattctctataggatattttcctacatgaccctttggaacacaggatttaatcccaactttcctatggcttttatctctctactcaaatttctgcatagcatccaaaggcaaagatggcaatgaggtgttctttcgcataaagaggtccacccagctgaagaagctgatgaacgcctattgcgaccgccagtctgtggacatgaatgccattgcattcctgtttgatggccgcaggcttcgcggcgagcagacccctgatgagctggagatggaggacggcgacgagatcgacgccatgcttcaccagaccggaggcagcgttcctagcaccacctaaaagcagcagctgcggagcctcgttttgctctccgccctgcgtagtactaaacaaaagggaaaaagtctttttaaggaacttgtgatgctctggctccttgtgccattgctgagggacatccttagcctttatttagtggtatggtttggtactttgttctgtcatcactcgtttatctatccctaatacatgccgccatgtttgtacttccaatgacgcgccgatcatttgctttgttttgtctgctcgaagtctatgcttttcaggccatctctttgggcctgtttggttttgtctcctgatccttacgttttgtgcactaagttgatggatcccttttggctgattcagtttgtataattccagccggtgatttgcagctgcctgattgttttttagttaaaatctcctcatatttaaaataagtgttacattaaagtaagttaaattgatgggtagtttatcatggctttaatgcctaccgttttctactttttcacagctgcatcaatctaaacatttgtctttaatcc

SEQ ID NO: 74549 - DNA, 784 bp, Zea Mays
tgacaaagcactttattctgagtttggatggcaatgaggtgttctttcgcataaagaggtccacccagctgaagaagctgatgaacgcctattgcgaccgccagtctgtggacatgaatgccattgcattcctgtttgatggccgcaggcttcgcggcgagcagacccctgatgagctggagatggaggacggcgacgagatcgacgccatgcttcaccagaccggaggcagcgttcctagcaccacctaaaagcagcagctgcggagcctcgttttgctctccgccctgcgtagtactaaacaaaagggaaaaagtctttttaaggaacttgtgatgctctggctccttgtgccattgctgagggacatccttagcctttatttagtggtatggtttggtactttgttctgtcatcactcgtttatctatccctaatacatgccgccatgtttgtacttccaatgacgcgccgatcatttgctttgttttgtctgctcgaagtctatgcttttcaggccatctctttgggcctgtttggttttgtctcctgatccttacgttttgtgcactaagttgatggatcccttttggctgattcagtttgtataattccagccggtgatttgcagctgcctgattgttttttagttaaaatctcctcatatttaaaataagtgttacattaaagtaagttaaattgatgggtagtttatcatggctttaatgcctaccgttttctactttttcacagctgcatcaatctaaacatttgtctttaatcc

SEQ ID NO: 74550 - DNA, 1669 bp, Zea Mays
gctgaaatcgccacctgctgcccaacacggcaacaccccggaccccgcgtcccccacttcttcagcttccgccacctcctcaacacatcaaatccactcgtcctctccacccacctgccccccgcttccttccccggcgcggagaaccaaccagccttttgacgctgtcgcccgccgatagagcactagacgcgctagcccccggatctcctccgcggcctcgccgcacgcgtggggatggatttcgacggcgccattggcgatcagggtgagttgtgggaatggcaaagtcaggagtattgtatgcagaaagattcgttagctgctccatgtagcagtttgtgggccgaagcaagcaacaatgtgggtggtgattggagcatatttgaggagcaaacaccaattaaacactgtacagacttcgaatttcagttctgtgatgtaggaggtgaagtcttgttctcatgtaaaaatgcaatctagatatcatcgtcaaggagtttgaagaaaggaaggaaactttacaggcaaaacgcacacgcatgctgcagttctgtccagaaaatcttgagatgacatgttcagtgactgaagatgggctcttggaaagtcttcaggagatgatttttcaggtactgactgtttactgaactctgacgggactgatgaactgccagaagaatggctagttagttgatcacaagatatcgagcccggttttccggcagaagaaatgaataaccctgctgctgcaacggaagaaactgccgatgtcttggcttgagctcttcgcctgtcgtagtccacgacaatcctgcatgctctagacctacttctctgaaaggtgcagctggcaaaatttattatcggagcaaagaaggcgagaccatccgtgtccctcccttttgtgctgatcaaaccatacagcatccatggcgacatcaccctgaacgacatcaacgagaagatccacgccccttcgccgcataagatcaggcacaggagcgacgaggagcccgacccgctccaggcctcagcagcgatctcagggaaacctgtggcccacaagacgaagatccacacggagggggggaagggggaaggggagcatcacgatcaccagaaccaaaggctaggctgatgaccatttgtgtgacgctggcgaagtggctaacagttgattcgcctttgcatttttggcgctctgggctcgttcccaattggttttgtggcccaggtgatgcatggccttagcagcgtgcttgtagcgttttctgttcttgctgtttactagtatcttacgcacgcgccttagcgcacgtcataggcagcgctgaatcgtgtcaatgagttaatataaaaatttaataaaataatccaaagaaaataagaatggttcatatgtagtggtactactaataatgaattgcacaatatactgtatgttttgttttgaaaaggccatctgcctcatcgagcaggctcggctcgttctcgccgacgtgggaggtacctgcaggcccgcggccagcaggacaacaagatggtccggactccggaacatggaggagctgctggcccggatcatggcacacacgacgtggccaggcggtggtgacgccgacagacgacgacgctcggacaagagcgagagcaacgaggttacgag

SEQ ID NO: 74551 - DNA, 1544 bp, Zea Mays
aaatccactcgtcctctccacccacctgccccccgcttccttccccggcgcggagaaccaaccagccttttgacgctgtcgcccgccgatagagcactagacgcgctagcccccggatctcctccgcggcctcgccgcacgcgtggggatggatttcgacggcgccattggcgatcagggctccatgtagcagtttgtgggccgaagcaagcaacaatgtgggtggtgattggagcatatttgaggagcaaacaccaattaaacactgtacagacttcgaatttcagttctgtgatgtaggaggtgaagtcttgttctcatgttgcatttccggactagtaaaaatgcaatctagatatcatcgtcaaggagtttgaagaaaggaaggaaactttacaggcaaaacgcacacgcatgctgcagttctgtccagaaaatcttgagatgacatgttcagtgactgaagatgggctcttggaaagtcttcaggagatgatttttcaggtactgactgtttactgaactctgacgggactgatgaactgccagaagaatggctagttagttgatcacaagatatcgagcccggttttccggcagaagaaattaggaataaccctgctgctgcaacggaagaaactgccgatgtcttggcttgagctcttcgcctgtcgtagtccacgacaatcctgcatgctctagacctacttctctgaaaggtgcagctggcaaaatttattatcggagcaaagaaggcgagaccatccgtgtccctcccttttgtgctgatcaaaccatacagcatccatggcgacatcaccctgaacgacatcaacgagaagatccacgccccttcgccgcataagatcaggcacaggagcgacgaggagcccgacccgctccaggcctcagcagcgatctcagggaaacctgtggcccacaagacgaagatccacacggagggggggaagggggaaggggagcatcacgatcaccagaaccaaaggctaggctgatgaccatttgtgtgacgctggcgaagtggctaacagttgattcgcctttgcatttttggcgctctgggctcgttcccaattggttttgtggcccaggtgatgcatggccttagcagcgtgcttgtagcgttttctgttcttgctgtttactagtatcttacgcacgcgccttagcgcacgtcataggcagcgctgaatcgtgtcaatgagttaatataaaaatttaataaaataatccaaagaaaataagaatggttcatatgtagtggtactactaataatgaattgcacaatatactgtatgttttgttttgaaaaggccatctgcctcatcgagcaggctcggctcgttctcgccgacgtgggaggtacctgcaggcccgcggccagcaggacaacaagatggtccggactccggaacatggaggagctgctggcccggatcatggcacacacgacgtggccaggcggtggtgacgccgacagacgacgacgctcggacaagagcgagagcaacgaggttacgag

SEQ ID NO: 74552 - DNA, 1577 bp, Zea Mays
aaatccactcgtcctctccacccacctgccccccgcttccttccccggcgcggagaaccaaccagccttttgacgctgtcgcccgccgatagagcactagacgcgctagcccccggatctcctccgcggcctcgccgcacgcgtggggatggatttcgacggcgccattggcgatcagggtgagttgtgggaatggcaaagtcaggagtattgtatgcagaaagattcgttagctgctccatgtagcagtttgtgggccgaagcaagcaacaatgtgggtggtgattggagcatatttgaggagcaaacaccaattaaacactgtacagacttcgaatttcagttctgtgatgtaggaggtgaagtcttgttctcatgtaaaaatgcaatctagatatcatcgtcaaggagtttgaagaaaggaaggaaactttacaggcaaaacgcacacgcatgctgcagttctgtccagaaaatcttgagatgacatgttcagtgactgaagatgggctcttggaaagtcttcaggagatgatttttcaggtactgactgtttactgaactctgacgggactgatgaactgccagaagaatggctagttagttgatcacaagatatcgagcccggttttccggcagaagaaattaggaataaccctgctgctgcaacggaagaaactgccgatgtcttggcttgagctcttcgcctgtcgtagtccacgacaatcctgcatgctctagacctacttctctgaaagctggcaaaatttattatcggagcaaagaaggcgagaccatccgtgtccctcccttttgtgctgatcaaaccatacagcatccatggcgacatcaccctgaacgacatcaacgagaagatccacgccccttcgccgcataagatcaggcacaggagcgacgaggagcccgacccgctccaggcctcagcagcgatctcagggaaacctgtggcccacaagacgaagatccacacggagggggggaagggggaaggggagcatcacgatcaccagaaccaaaggctaggctgatgaccatttgtgtgacgctggcgaagtggctaacagttgattcgcctttgcatttttggcgctctgggctcgttcccaattggttttgtggcccaggtgatgcatggccttagcagcgtgcttgtagcgttttctgttcttgctgtttactagtatcttacgcacgcgccttagcgcacgtcataggcagcgctgaatcgtgtcaatgagttaatataaaaatttaataaaataatccaaagaaaataagaatggttcatatgtagtggtactactaataatgaattgcacaatatactgtatgttttgttttgaaaaggccatctgcctcatcgagcaggctcggctcgttctcgccgacgtgggaggtacctgcaggcccgcggccagcaggacaacaagatggtccggactccggaacatggaggagctgctggcccggatcatggcacacacgacgtggccaggcggtggtgacgccgacagacgacgacgctcggacaagagcgagagcaacgaggttacgag

SEQ ID NO: 74553 - DNA, 1369 bp, Zea Mays
aaatccactcgtcctctccacccacctgccccccgcttccttccccggcgcggagaaccaaccagccttttgacgctgtcgcccgccgatagagcactagacgcgctagcccccggatctcctccgcggcctcgccgcacgcgtggggatggatttcgacggcgccattggcgatcagggatatcatcgtcaaggagtttgaagaaaggaaggaaactttacaggcaaaacgcacacgcatgctgcagttctgtccagaaaatcttgagatgacatgttcagtgactgaagatgggctcttggaaagtcttcaggagatgatttttcaggtactgactgtttactgaactctgacgggactgatgaactgccagaagaatggctagttagttgatcacaagatatcgagcccggttttccggcagaagaaattaggaataaccctgctgctgcaacggaagaaactgccgatgtcttggcttgagctcttcgcctgtcgtagtccacgacaatcctgcatgctctagacctacttctctgaaaggtgcagctggcaaaatttattatcggagcaaagaaggcgagaccatccgtgtccctcccttttgtgctgatcaaaccatacagcatccatggcgacatcaccctgaacgacatcaacgagaagatccacgccccttcgccgcataagatcaggcacaggagcgacgaggagcccgacccgctccaggcctcagcagcgatctcagggaaacctgtggcccacaagacgaagatccacacggagggggggaagggggaaggggagcatcacgatcaccagaaccaaaggctaggctgatgaccatttgtgtgacgctggcgaagtggctaacagttgattcgcctttgcatttttggcgctctgggctcgttcccaattggttttgtggcccaggtgatgcatggccttagcagcgtgcttgtagcgttttctgttcttgctgtttactagtatcttacgcacgcgccttagcgcacgtcataggcagcgctgaatcgtgtcaatgagttaatataaaaatttaataaaataatccaaagaaaataagaatggttcatatgtagtggtactactaataatgaattgcacaatatactgtatgttttgttttgaaaaggccatctgcctcatcgagcaggctcggctcgttctcgccgacgtgggaggtacctgcaggcccgcggccagcaggacaacaagatggtccggactccggaacatggaggagctgctggcccggatcatggcacacacgacgtggccaggcggtggtgacgccgacagacgacgacgctcggacaagagcgagagcaacgaggttacgag

SEQ ID NO: 74554 - DNA, 1648 bp, Zea Mays
aaatccactcgtcctctccacccacctgccccccgcttccttccccggcgcggagaaccaaccagccttttgacgctgtcgcccgccgatagagcactagacgcgctagcccccggatctcctccgcggcctcgccgcacgcgtggggatggatttcgacggcgccattggcgatcagggctccatgtagcagtttgtgggccgaagcaagcaacaatgtgggtggtgattggagcatatttgaggagcaaacaccaattaaacactgtacagacttcgaatttcagttctgtgatgtaggaggtgaagtcttgttctcatggtagatgatttgacctaaatatcacaatggattaaactggatatttcctaactctatcccatctgacctttttggcaaacacttaataaggtgctaatacatatcagttgcatttccggactagtaaaaatgcaatctagatatcatcgtcaaggagtttgaagaaaggaaggaaactttacaggcaaaacgcacacgcatgctgcagttctgtccagaaaatcttgagatgacatgttcagtgactgaagatgggctcttggaaagtcttcaggagatgatttttcaggtactgactgtttactgaactctgacgggactgatgaactgccagaagaatggctagttagttgatcacaagatatcgagcccggttttccggcagaagaaatgaataaccctgctgctgcaacggaagaaactgccgatgtcttggcttgagctcttcgcctgtcgtagtccacgacaatcctgcatgctctagacctacttctctgaaaggtgcagctggcaaaatttattatcggagcaaagaaggcgagaccatccgtgtccctcccttttgtgctgatcaaaccatacagcatccatggcgacatcaccctgaacgacatcaacgagaagatccacgccccttcgccgcataagatcaggcacaggagcgacgaggagcccgacccgctccaggcctcagcagcgatctcagggaaacctgtggcccacaagacgaagatccacacggagggggggaagggggaaggggagcatcacgatcaccagaaccaaaggctaggctgatgaccatttgtgtgacgctggcgaagtggctaacagttgattcgcctttgcatttttggcgctctgggctcgttcccaattggttttgtggcccaggtgatgcatggccttagcagcgtgcttgtagcgttttctgttcttgctgtttactagtatcttacgcacgcgccttagcgcacgtcataggcagcgctgaatcgtgtcaatgagttaatataaaaatttaataaaataatccaaagaaaataagaatggttcatatgtagtggtactactaataatgaattgcacaatatactgtatgttttgttttgaaaaggccatctgcctcatcgagcaggctcggctcgttctcgccgacgtgggaggtacctgcaggcccgcggccagcaggacaacaagatggtccggactccggaacatggaggagctgctggcccggatcatggcacacacgacgtggccaggcggtggtgacgccgacagacgacgacgctcggacaagagcgagagcaacgaggttacgag

SEQ ID NO: 74555 - DNA, 747 bp, Zea Mays
agaaaaataacaagaggtccaacctcttggaaactttcctatggcttctatctctctacacaaattcctgcatagcatccaaaggcaaagatggcaatgaggtgttctttcgcataaagaggtccacccagctgaagaagctgatgaacgcttattgtgaccgccagtctgtggacatgaatgccattgcgttcctgtttgatggccgcaggcttcgcggcgagcagacccctgatgagctggagatggaggacggcgacgagatcgacgccatgcttcaccagaccggaggcagcgttcctagcaccacctaaaagcctcgttttgctctccgtcctgcgtagtactaaacaaaagggaaaaagtctttttaaggaacttgtgatgctctggctccttgtgccattgctgagggacatccttagcctttgtttagtagtatggtttggtactttgttctgtcatcactcgtttatctatccctaatacatgccgccatgattgtactcccaatgacgcgcagatcatttgctttgttttgtctgctcgaacctcgaagtcgtctatgcttttcagattattttgggcatgtttggttgtctcctgaatcctgatccatacgttgtcagccgcaccatagtcacattgtgctgctcctgcaattgaggaacgatgataatggagggaaaatgttttagtaagaaattgccggtgattaattatgttgatggatcttgttcagtttgt

SEQ ID NO: 74556 - DNA, 684 bp, Zea Mays
tgacaaagcactttattctgagtttggatggcaatgaggtgttctttcgcataaagaggtccacccagctgaagaagctgatgaacgcttattgtgaccgccagtctgtggacatgaatgccattgcgttcctgtttgatggccgcaggcttcgcggcgagcagacccctgatgagctggagatggaggacggcgacgagatcgacgccatgcttcaccagaccggaggcagcgttcctagcaccacctaaaagcctcgttttgctctccgtcctgcgtagtactaaacaaaagggaaaaagtctttttaaggaacttgtgatgctctggctccttgtgccattgctgagggacatccttagcctttgtttagtagtatggtttggtactttgttctgtcatcactcgtttatctatccctaatacatgccgccatgattgtactcccaatgacgcgcagatcatttgctttgttttgtctgctcgaacctcgaagtcgtctatgcttttcagattattttgggcatgtttggttgtctcctgaatcctgatccatacgttgtcagccgcaccatagtcacattgtgctgctcctgcaattgaggaacgatgataatggagggaaaatgttttagtaagaaattgccggtgattaattatgttgatggatcttgttcagtttgt

SEQ ID NO: 74557 - DNA, 1826 bp, Zea Mays
atatacgaggggcagggccccccctcctctcccttcgtccattccgatcactcgctgctcccctctctcgccggagcgagccccgggccggatggcggcggcagcagcagctcctcccgcctccgcgatcgcgtgatggacgccgacgccgacgccgccgcgatccgccgatggacgacgccggaagggcaccaccacccgcgccagcggcggtgaccgtctccgccaccgccgcacccgcgcctaccccgccctccgccacggccgccgccgacaagtcctccctcgaccccgacgcgctttatgaagaggggatgtggcaacagatggccatgaacagcggtgccacaatgcaacctgggtcatatcctgagcgaccaggtgaaccggactgcacttactacctcaggactggattgtgtcgatttggcatgagctgcaggttcaatcatcctccggataggaatctggctattgcctctgccagaatgaagggagaatatcctgagagagtgggacagccagagtgtcagtattatctgaagaccggaacatgcaagtttggtcctacatgcaaatttcaccatcccagggaaaaggccggaattgcagggagggtgcagctaaacacattaggatatccacttctcccgaatgaaaaggagtgtgcgtattatttaaaaacaggacaatgtaaatatgcaaatacttcgctggtccacagtcatatactggaactatgtcaagctggacttttccacgagcttcttttataccaagccctaggtggcaaagtccttcaaattatgcaccaatggttgtacctcatggccttgtccaagtgccgagctggaattcatatcctggtcagctgcagtcacctggggctcaacaaacttatggaagttcacaacaaggcgaagctagtgcaggaaatcagggaatgctatcaccctatagatccagttcatttcctgtgcctcaatatgcgttgcagagagataatgtatttcctgagagacccgatgaaccagaatgccaatattacatgaagacaggagattgtaaatttggtgcagtgtgcaagttccatcatccccgtgtgagatcacagccccctccggattgtgtcttaagtccaatgggtcttccaatacgtccaggtgaagaactttgcaaattctattctcgttatggcatctgcaagttcggcgccaactgtaaatttgatcatcctacaatggctgctccaatgggagtttatgcatatggtttctctgggtctgcttctgtcgcacccgcttcaactaatgcacctatgacgcgacatcttcttggatctccatcaggcgctgtgaatgtttctcctaacttcccgccgggatgaagttctgtaaattgagttgctgctggagatgtacagcccccccccccccccccccctccccaattaatccagaactttgggaataactgttggaacctaataaacttcagatacagaaacgctggttttcaggtgtttgcactattttgacactgctgcacctatggtccctaacagttgaggtaggaattcttctgaaggagctgaaacctgtagctgcaggtgtgcagtcgaaattatattattgcgtcaatttatttggaacctgtattcagctggtgttggggcagatattggcattcctcttatctgtgaatgctggttttctgatttgaacagtgtatcccagcctacggcttctgccaagacagtaaactcaggacctgtttgggactgttccactattcaaaaaatgaatttgaatctgggattcattatt

SEQ ID NO: 74558 - DNA, 462 bp, Zea Mays
tatacctttctcggccttttggctaagatcaagtgtagtatctgttcttatcagtttaatatctgatatgtgaactatgtgttcactttgatattaaatttattttttgtgggggaggactcactacagtagcttgctactagggtcctcatgtgtcgcttgggcgttgcactactgcccaagcctggcgcgccccaaccaaataaaaaaaaacatactgatctaaatcaatggcacaaaaaaatcgcgaagatgcaataaaaaagaaatcacactcatctttccccttgtatgttattgactcggttatacattgactatcctacagcacagttataatacatacatgggctatcctacataagtcaacatcacaggatttgactgcagttatgtacttggttatacattgtctatcctacagctcggttatgatacatacatgggctatcctacataagt

SEQ ID NO: 74559 - DNA, 2324 bp, Zea Mays
gcaattgtttccaggtaatctcgcatcagcaaacagcaccgggctccgttcaccgccttcccttctcttctccggttcctccctcgcgcgttcgctcgctctcgtggcgcaactcgtagaccgccgccgcctccgctctacgccaggtgcctaggtctagcttcgtcggtcccttcgccaacgacgagcacccacccgattgcgagatctgacgccagaagttcagctaggagtgcatcttgtttacctgttgcttaatcatggacaactctcagaatcaaccaccaccacctggtgttggaacatggccgcagacacctcctagtcacccgccacaatgccatgctgatccacagtcttatcatccacaatttgctgctagacctgacaatgctagtgccaataatagtggtagttcagcaaacattgagtcagctgtccaggaggctgttcttcacgcgcagttgtttatgataaccaggacattgagactcagcaagtcatacagaatcaaagatatgcaaacacaacaagtgaacctacaaaatatggggaagacttactttcgaaccgccgtgaccctaatgcattgaaggagcatttactaaagatgacagctgatcatcgtgcagagatggcaagcaaaagggggaagccacttcatccaaacaatggcaactgtgaaattggcaatggctatggtgtacctggaggcggtgcttattatgctgcaaacttgccaagtcctcaaatgaataaacctagagatgaaactgataaagctaaatgtgcaaacgatctccctgattttttaaagcagaggttaagggcaaggggaattctcaaagatgagactacaaataagaattacacgagtacgcagactgtggattctcaagaaatcgagaacaaatctgcacaagagttgcctcctggttggattgaagtgaaggacccgacaactggagcgccatacttctacaatcaaagcactggagtgagtcaatgggatcgccctgacagtgttgtgaatatcatgcaacatcaagtttctccatccttgccagagaactgggaggaggcaattgacaaatcaacaggccacaaatactattataacacgaagacacagaccacacaatgggaacctcctacttctgtgaacaccagtgttagacctccagcttccaccaacactgcagttgagccagtcgctcaagctgcagatatttggaactctcaaatgcagagatgtttgggctgtggtggatggggagttggtcttgtccagccttggggatactgcaatcactgcacaagggttcaaaatcgtccttttcaacagtacccatcttacacaaataatacgatgcacgccagtggtaacaatgctcccaaagctcaggggaatgtttcagctaagaacagatcaagctcaaagccacctttagggaaaccaaacagaaaagaccaccgcaaaagaaatcgccccgaggatgatgaacttgacccaatggacccgagttcttactcagatgctccacgcgggggctgggttgttggtttgaagggtgttcaaccacgagcagcagatactaccgcagctggacctttgttccaacaaagaccatatccctcaccgggtgctgtgttgagaaaaaatgcagaggtagcaacccatggcaagaaacgtggtggtatggctccgataacaaaaagaggagatggcagcgacggacttggggaggcagattagtcttttggtgaactgaaatgttgtgctatccgaatctccttggtggttgtctctggagctgctaaactatcattgcacgcctgaagaaaatcgaaaaaatattggctgccagatctggaatgaggaaactcactacagttcgcgagtttttgcagcgattaacgctagtgtactcgctggacctcgaggctagagcaatgcgagctcaccccggcttgctgatgacacattcactgagttcactgcggtttgccgatgacattcaatgtgcccttggtgtgaattttatatgaaaatgaactataatctgtaattggaaagagtgatttcaatgtaaggaattaacttttgtggggtgatgaaccatactagcgatgcacttagccaaacaagagaaatttggatttgtaccattaaaagattacaactttagatatatagcattgctatctcactaacatgtgtggtccacatgagacatgagtcaataacatgtggagccattgttatatatttaaagttgcaatcttttaatgatatagatttaattatttctaaaaacattgac

SEQ ID NO: 74560 - DNA, 2287 bp, Zea Mays
gcaattgtttccaggtaatctcgcatcagcaaacagcaccgggctccgttcaccgccttcccttctcttctccggttcctccctcgcgcgttcgctcgctctcgtggcgcaactcgtagaccgccgccgcctccgctctacgccaggtgcctaggtctagcttcgtcggtcccttcgccaacgacgagcacccacccgaagttcagctaggagtgcatcttgtttacctgttgcttaatcatggacaactctcagaatcaaccaccaccacctggtgttggaacatggccgcagacacctcctagtcacccgccacaatgccatgctgatccacagtcttatcatccacaatttgctgctagacctgacaatgctagtgccaataatagtggtagttcagcaaacattgagtcagctgtccaggaggctgttcttcacgcgcaggacattgagactcagcaagtcatacagaatcaaagatatgcaaacacaacaagtgaacctacaaaatatggggaagacttactttcgaaccgccgtgaccctaatgcattgaaggagcatttactaaagatgacagctgatcatcgtgcagagatggcaagcaaaagggggaagccacttcatccaaacaatggcaactgtgaaattggcaatggctatggtgtacctggaggcggtgcttattatgctgcaaacttgccaagtcctcaaatgaataaacctagagatgaaactgataaagctaaatgtgcaaacgatctccctgattttttaaagcagaggttaagggcaaggggaattctcaaagatgagactacaaataagaattacacgagtacgcagactgtggattctcaagaaatcgagaacaaatctgcacaagagttgcctcctggttggattgaagtgaaggacccgacaactggagcgccatacttctacaatcaaagcactggagtgagtcaatgggatcgccctgacagtgttgtgaatatcatgcaacatcaagtttctccatccttgccagagaactgggaggaggcaattgacaaatcaacaggccacaaatactattataacacgaagacacagaccacacaatgggaacctcctacttctgtgaacaccagtgttagacctccagcttccaccaacactgcagttgagccagtcgctcaagctgcagatatttggaactctcaaatgcagagatgtttgggctgtggtggatggggagttggtcttgtccagccttggggatactgcaatcactgcacaagggttcaaaatcgtccttttcaacagtacccatcttacacaaataatacgatgcacgccagtggtaacaatgctcccaaagctcaggggaatgtttcagctaagaacagatcaagctcaaagccacctttagggaaaccaaacagaaaagaccaccgcaaaagaaatcgccccgaggatgatgaacttgacccaatggacccgagttcttactcagatgctccacgcgggggctgggttgttggtttgaagggtgttcaaccacgagcagcagatactaccgcagctggacctttgttccaacaaagaccatatccctcaccgggtgctgtgttgagaaaaaatgcagaggtagcaacccatggcaagaaacgtggtggtatggctccgataacaaaaagaggagatggcagcgacggacttggggaggcagattagtcttttggtgaactgaaatgttgtgctatccgaatctccttggtggttgtctctggagctgctaaactatcattgcacgcctgaagaaaatcgaaaaaatattggctgccagatctggaatgaggaaactcactacagttcgcgagtttttgcagcgattaacgctagtgtactcgctggacctcgaggctagagcaatgcgagctcaccccggcttgctgatgacacattcactgagttcactgcggtttgccgatgacattcaatgtgcccttggtgtgaattttatatgaaaatgaactataatctgtaattggaaagagtgatttcaatgtaaggaattaacttttgtggggtgatgaaccatactagcgatgcacttagccaaacaagagaaatttggatttgtaccattaaaagattacaactttagatatatagcattgctatctcactaacatgtgtggtccacatgagacatgagtcaataacatgtggagccattgttatatatttaaagttgcaatcttttaatgatatagatttaattatttctaaaaacattgac

SEQ ID NO: 74561 - DNA, 2834 bp, Zea Mays
gcaattgtttccaggtaatctcgcatcagcaaacagcaccgggctccgttcaccgccttcccttctcttctccggttcctccctcgcgcgttcgctcgctctcgtggcgcaactcgtagaccgccgccgcctccgctctacgccaggtgcctaggtctagcttcgtcggtcccttcgccaacgacgagcacccacccgattgcgagatctgacgccagaagttcagctaggagtgcatcttgtttacctgttgcttaatcatggacaactctcagaatcaaccaccaccacctggtgttggaacatggccgcagacacctcctagtcacccgccacaatgccatgctgatccacagtcttatcatccacaatttgctgctagacctgacaatgctagtgccaataatagtggtagttcagcaaacattgagtcagctgtccaggaggctgttcttcacgcgcaggacattgagactcagcaagtcatacagaatcaaagatatgcaaacacaacaagtgaacctacaaaatatggggaagacttactttcgaaccgccgtgaccctaatgcattgaaggagcatttactaaagatgacagctgatcatcgtgcagagatggcaagcaaaagggggaagccacttcatccaaacaatggcaactgtgaaattggcaatggctatggtgtacctggaggcggtgcttattatgctgcaaacttgccaagtcctcaaatgaataaacctagagatgaaactgataaagctaaatgtgcaaacgatctccctgattttttaaagcagaggttaagggcaaggggaattctcaaagatgagactacaaataagaattacacgagtacgcagactgtaagttgctaatttctttccaaactgaagtgcgaaggtggaagctaagtactagtagttgggagaaacttgatctagtgccagcacaatcttattattcagcagtaggcaagtatcattaccctgcagttgtgtctgagtgcctgattcaggtctttggtcgtagtccttaggtgtagtcttcttcatttgttccctagttctgttctttacaaacttctgtattttcattttattaatggaaatggggttatccttggatcgaaaagaaaaaaaaatgccacatggatatggaaatctatcatatgaaatgatgaaaactgtatggttgactaaaagtgcacttacctacataaataaaaagaacactgggaaatttgatgatactgaaaaatgttagaaaggatgccttttgtctttagcattagcttgcacatatgacaaacttgatgtgcaattgatattttatccatcacatttttttgtgttaattaatgtgtcattcatttggtgccactgagttacaggtggattctcaagaaatcgagaacaaatctgcacaagagttgcctcctggttggattgaagtgaaggacccgacaactggagcgccatacttctacaatcaaagcactggagtgagtcaatgggatcgccctgacagtgttgtgaatatcatgcaacatcaagtttctccatccttgccagagaactgggaggaggcaattgacaaatcaacaggccacaaatactattataacacgaagacacagaccacacaatgggaacctcctacttctgtgaacaccagtgttagacctccagcttccaccaacactgcagttgagccagtcgctcaagctgcagatatttggaactctcaaatgcagagatgtttgggctgtggtggatggggagttggtcttgtccagccttggggatactgcaatcactgcacaagggttcaaaatcgtccttttcaacagtacccatcttacacaaataatacgatgcacgccagtggtaacaatgctcccaaagctcaggggaatgtttcagctaagaacagatcaagctcaaagccacctttagggaaaccaaacagaaaagaccaccgcaaaagaaatcgccccgaggatgatgaacttgacccaatggacccgagttcttactcagatgctccacgcgggggctgggttgttggtttgaagggtgttcaaccacgagcagcagatactaccgcagctggacctttgttccaacaaagaccatatccctcaccgggtgctgtgttgagaaaaaatgcagaggtagcaacccatggcaagaaacgtggtggtatggctccgataacaaaaagaggagatggcagcgacggacttggggaggcagattagtcttttggtgaactgaaatgttgtgctatccgaatctccttggtggttgtctctggagctgctaaactatcattgcacgcctgaagaaaatcgaaaaaatattggctgccagatctggaatgaggaaactcactacagttcgcgagtttttgcagcgattaacgctagtgtactcgctggacctcgaggctagagcaatgcgagctcaccccggcttgctgatgacacattcactgagttcactgcggtttgccgatgacattcaatgtgcccttggtgtgaattttatatgaaaatgaactataatctgtaattggaaagagtgatttcaatgtaaggaattaacttttgtggggtgatgaaccatactagcgatgcacttagccaaacaagagaaatttggatttgtaccattaaaagattacaactttagatatatagcattgctatctcactaacatgtgtggtccacatgagacatgagtcaataacatgtggagccattgttatatatttaaagttgcaatcttttaatgatatagatttaattatttctaaaaacattgac

SEQ ID NO: 74562 - DNA, 2296 bp, Zea Mays
gcaattgtttccaggtaatctcgcatcagcaaacagcaccgggctccgttcaccgccttcccttctcttctccggttcctccctcgcgcgttcgctcgctctcgtggcgcaactcgtagaccgccgccgcctccgctctacgccaggtgcctaggtctagcttcgtcggtcccttcgccaacgacgagcacccacccgattgcgagatctgacgccagaagttcagctaggagtgcatcttgtttacctgttgcttaatcatggacaactctcagaatcaaccaccaccacctggtgttggaacatggccgcagacacctcctagtcacccgccacaatgccatgctgatccacagtcttatcatccacaatttgctgctagacctgacaatgctagtgccaataatagtggtagttcagcaaacattgagtcagctgtccaggaggctgttcttcacgcgcaggacattgagactcagcaagtcatacagaatcaaagatatgcaaacacaacaagtgaacctacaaaatatggggaagacttactttcgaaccgccgtgaccctaatgcattgaaggagcatttactaaagatgacagctgatcatcgtgcagagatggcaagcaaaagggggaagccacttcatccaaacaatggcaactgtgaaattggcaatggctatggtgtacctggaggcggtgcttattatgctgcaaacttgccaagtcctcaaatgaataaacctagagatgaaactgataaagctaaatgtgcaaacgatctccctgattttttaaagcagaggttaagggcaaggggaattctcaaagatgagactacaaataagaattacacgagtggattctcaagaaatcgagaacaaatctgcacaagagttgcctcctggttggattgaagtgaaggacccgacaactggagcgccatacttctacaatcaaagcactggagtgagtcaatgggatcgccctgacagtgttgtgaatatcatgcaacatcaagtttctccatccttgccagagaactgggaggaggcaattgacaaatcaacaggccacaaatactattataacacgaagacacagaccacacaatgggaacctcctacttctgtgaacaccagtgttagacctccagcttccaccaacactgcagttgagccagtcgctcaagctgcagatatttggaactctcaaatgcagagatgtttgggctgtggtggatggggagttggtcttgtccagccttggggatactgcaatcactgcacaagggttcaaaatcgtccttttcaacagtacccatcttacacaaataatacgatgcacgccagtggtaacaatgctcccaaagctcaggggaatgtttcagctaagaacagatcaagctcaaagccacctttagggaaaccaaacagaaaagaccaccgcaaaagaaatcgccccgaggatgatgaacttgacccaatggacccgagttcttactcagatgctccacgcgggggctgggttgttggtttgaagggtgttcaaccacgagcagcagatactaccgcagctggacctttgttccaacaaagaccatatccctcaccgggtgctgtgttgagaaaaaatgcagaggtagcaacccatggcaagaaacgtggtggtatggctccgataacaaaaagaggagatggcagcgacggacttggggaggcagattagtcttttggtgaactgaaatgttgtgctatccgaatctccttggtggttgtctctggagctgctaaactatcattgcacgcctgaagaaaatcgaaaaaatattggctgccagatctggaatgaggaaactcactacagttcgcgagtttttgcagcgattaacgctagtgtactcgctggacctcgaggctagagcaatgcgagctcaccccggcttgctgatgacacattcactgagttcactgcggtttgccgatgacattcaatgtgcccttggtgtgaattttatatgaaaatgaactataatctgtaattggaaagagtgatttcaatgtaaggaattaacttttgtggggtgatgaaccatactagcgatgcacttagccaaacaagagaaatttggatttgtaccattaaaagattacaactttagatatatagcattgctatctcactaacatgtgtggtccacatgagacatgagtcaataacatgtggagccattgttatatatttaaagttgcaatcttttaatgatatagatttaattatttctaaaaacattgac

SEQ ID NO: 74563 - DNA, 2809 bp, Zea Mays
gcaattgtttccaggtaatctcgcatcagcaaacagcaccgggctccgttcaccgccttcccttctcttctccggttcctccctcgcgcgttcgctcgctctcgtggcgcaactcgtagaccgccgccgcctccgctctacgccaggtgcctaggtctagcttcgtcggtcccttcgccaacgacgagcacccacccgattgcgagatctgacgccagaagttcagctaggagtgcatcttgtttacctgttgcttaatcatggacaactctcagaatcaaccaccaccacctggtgttggaacatggccgcagacacctcctagtcacccgccacaatgccatgctgatccacagtcttatcatccacaatttgctgctagacctgacaatgctagtgccaataatagtggtagttcagcaaacattgagtcagctgtccaggaggctgttcttcacgcgcaggacattgagactcagcaagtcatacagaatcaaagatatgcaaacacaacaagtgaacctacaaaatatggggaagacttactttcgaaccgccgtgaccctaatgcattgaaggagcatttactaaagatgacagctgatcatcgtgcagagatggcaagcaaaagggggaagccacttcatccaaacaatggcaactgtgaaattggcaatggctatggtgtacctggaggcggtgcttattatgctgcaaacttgccaagtcctcaaatgaataaacctagagatgaaactgataaagctaaatgtgcaaacgatctccctgattttttaaagcagaggttaagggcaaggggaattctcaaagatgagactacaaataagaattacacgagtacgcagactgtaagttgctaatttctttccaaactgaagtgcgaaggtggaagctaagtactagtagttgggagaaacttgatctagtgccagcacaatcttattattcagcagtaggcaagtatcattaccctgcagttgtgtctgagtgcctgattcaggtctttggtcgtagtccttaggtgtagtcttcttcatttgttccctagttctgttctttacaaacttctgtattttcattttattaatggaaatggggttatccttggatcgaaaagaaaaaaaaatgccacatggatatggaaatctatcatatgaaatgatgaaaactgtatggttgactaaaagtgcacttacctacataaataaaaagaacactgggaaatttgatgatactgaaaaatgttagaaaggatgccttttgtctttagcattagcttgcacatatgacaaacttgatgtgcaattgatattttatccatcacatttttttgtgttaattaatgtgtcattcatttggtgccactgagttacaggtggattctcaagaaatcgagaacaaatctgcacaagagttgcctcctggttggattgaagtgaaggacccgacaactggagcgccatacttctacaatcaaagcactggagtgagtcaatgggatcgccctgacagtgttgtgaatatcatgcaacatcaagtttctccatccttgccagagaactgggaggaggcaattgacaaatcaacaggccacaaatactattataacacgaagacacagaccacacaatgggaacctcctacttctgtgaacaccagtgttagacctccagcttccaccaacactgcagttgagccagtcgctcaagctgcagatatttggaactctcaaatgcagagatgtttgggctgtggtggatggggagttggtcttgtccagccttggggatactgcaatcactgcacaagtacccatcttacacaaataatacgatgcacgccagtggtaacaatgctcccaaagctcaggggaatgtttcagctaagaacagatcaagctcaaagccacctttagggaaaccaaacagaaaagaccaccgcaaaagaaatcgccccgaggatgatgaacttgacccaatggacccgagttcttactcagatgctccacgcgggggctgggttgttggtttgaagggtgttcaaccacgagcagcagatactaccgcagctggacctttgttccaacaaagaccatatccctcaccgggtgctgtgttgagaaaaaatgcagaggtagcaacccatggcaagaaacgtggtggtatggctccgataacaaaaagaggagatggcagcgacggacttggggaggcagattagtcttttggtgaactgaaatgttgtgctatccgaatctccttggtggttgtctctggagctgctaaactatcattgcacgcctgaagaaaatcgaaaaaatattggctgccagatctggaatgaggaaactcactacagttcgcgagtttttgcagcgattaacgctagtgtactcgctggacctcgaggctagagcaatgcgagctcaccccggcttgctgatgacacattcactgagttcactgcggtttgccgatgacattcaatgtgcccttggtgtgaattttatatgaaaatgaactataatctgtaattggaaagagtgatttcaatgtaaggaattaacttttgtggggtgatgaaccatactagcgatgcacttagccaaacaagagaaatttggatttgtaccattaaaagattacaactttagatatatagcattgctatctcactaacatgtgtggtccacatgagacatgagtcaataacatgtggagccattgttatatatttaaagttgcaatcttttaatgatatagatttaattatttctaaaaacattgac

SEQ ID NO: 74564 - DNA, 2313 bp, Zea Mays
gcaattgtttccaggtaatctcgcatcagcaaacagcaccgggctccgttcaccgccttcccttctcttctccggttcctccctcgcgcgttcgctcgctctcgtggcgcaactcgtagaccgccgccgcctccgctctacgccaggtgcctaggtctagcttcgtcggtcccttcgccaacgacgagcacccacccgattgcgagatctgacgccagaagttcagctaggagtgcatcttgtttacctgttgcttaatcatggacaactctcagaatcaaccaccaccacctggtgttggaacatggccgcagacacctcctagtcacccgccacaatgccatgctgatccacagtcttatcatccacaatttgctgctagacctgacaatgctagtgccaataatagtggtagttcagcaaacattgagtcagctgtccaggaggctgttcttcacgcgcagttgtttatgataaccaggacattgagactcagcaagtcatacagaatcaaagatatgcaaacacaacaagtgaacctacaaaatatggggaagacttactttcgaaccgccgtgaccctaatgcattgaaggagcatttactaaagatgacagctgatcatcgtgcagagatggcaagcaaaagggggaagccacttcatccaaacaatggcaactgtgaaattggcaatggctatggtgtacctggaggcggtgcttattatgctgcaaacttgccaagtcctcaaatgaataaacctagagatgaaactgataaagctaaatgtgcaaacgatctccctgattttttaaagcagaggttaagggcaaggggaattctcaaagatgagactacaaataagaattacacgagtggattctcaagaaatcgagaacaaatctgcacaagagttgcctcctggttggattgaagtgaaggacccgacaactggagcgccatacttctacaatcaaagcactggagtgagtcaatgggatcgccctgacagtgttgtgaatatcatgcaacatcaagtttctccatccttgccagagaactgggaggaggcaattgacaaatcaacaggccacaaatactattataacacgaagacacagaccacacaatgggaacctcctacttctgtgaacaccagtgttagacctccagcttccaccaacactgcagttgagccagtcgctcaagctgcagatatttggaactctcaaatgcagagatgtttgggctgtggtggatggggagttggtcttgtccagccttggggatactgcaatcactgcacaagggttcaaaatcgtccttttcaacagtacccatcttacacaaataatacgatgcacgccagtggtaacaatgctcccaaagctcaggggaatgtttcagctaagaacagatcaagctcaaagccacctttagggaaaccaaacagaaaagaccaccgcaaaagaaatcgccccgaggatgatgaacttgacccaatggacccgagttcttactcagatgctccacgcgggggctgggttgttggtttgaagggtgttcaaccacgagcagcagatactaccgcagctggacctttgttccaacaaagaccatatccctcaccgggtgctgtgttgagaaaaaatgcagaggtagcaacccatggcaagaaacgtggtggtatggctccgataacaaaaagaggagatggcagcgacggacttggggaggcagattagtcttttggtgaactgaaatgttgtgctatccgaatctccttggtggttgtctctggagctgctaaactatcattgcacgcctgaagaaaatcgaaaaaatattggctgccagatctggaatgaggaaactcactacagttcgcgagtttttgcagcgattaacgctagtgtactcgctggacctcgaggctagagcaatgcgagctcaccccggcttgctgatgacacattcactgagttcactgcggtttgccgatgacattcaatgtgcccttggtgtgaattttatatgaaaatgaactataatctgtaattggaaagagtgatttcaatgtaaggaattaacttttgtggggtgatgaaccatactagcgatgcacttagccaaacaagagaaatttggatttgtaccattaaaagattacaactttagatatatagcattgctatctcactaacatgtgtggtccacatgagacatgagtcaataacatgtggagccattgttatatatttaaagttgcaatcttttaatgatatagatttaattatttctaaaaacattgac

SEQ ID NO: 74565 - DNA, 2144 bp, Zea Mays
tggctgtacatgtgtacaccgatgttctttactggattgcgagatctgacgccagaagttcagctaggagtgcatcttgtttacctgttgcttaatcatggacaactctcagaatcaaccaccaccacctggtgttggaacatggccgcagacacctcctagtcacccgccacaatgccatgctgatccacagtcttatcatccacaatttgctgctagacctgacaatgctagtgccaataatagtggtagttcagcaaacattgagtcagctgtccaggaggctgttcttcacgcgcaggacattgagactcagcaagtcatacagaatcaaagatatgcaaacacaacaagtgaacctacaaaatatggggaagacttactttcgaaccgccgtgaccctaatgcattgaaggagcatttactaaagatgacagctgatcatcgtgcagagatggcaagcaaaagggggaagccacttcatccaaacaatggcaactgtgaaattggcaatggctatggtgtacctggaggcggtgcttattatgctgcaaacttgccaagtcctcaaatgaataaacctagagatgaaactgataaagctaaatgtgcaaacgatctccctgattttttaaagcagaggttaagggcaaggggaattctcaaagatgagactacaaataagaattacacgagtacgcagactgtggattctcaagaaatcgagaacaaatctgcacaagagttgcctcctggttggattgaagtgaaggacccgacaactggagcgccatacttctacaatcaaagcactggagtgagtcaatgggatcgccctgacagtgttgtgaatatcatgcaacatcaagtttctccatccttgccagagaactgggaggaggcaattgacaaatcaacaggccacaaatactattataacacgaagacacagaccacacaatgggaacctcctacttctgtgaacaccagtgttagacctccagcttccaccaacactgcagttgagccagtcgctcaagctgcagatatttggaactctcaaatgcagagatgtttgggctgtggtggatggggagttggtcttgtccagccttggggatactgcaatcactgcacaagggttcaaaatcgtccttttcaacagtacccatcttacacaaataatacgatgcacgccagtggtaacaatgctcccaaagctcaggggaatgtttcagctaagaacagatcaagctcaaagccacctttagggaaaccaaacagaaaagaccaccgcaaaagaaatcgccccgaggatgatgaacttgacccaatggacccgagttcttactcagatgctccacgcgggggctgggttgttggtttgaagggtgttcaaccacgagcagcagatactaccgcagctggacctttgttccaacaaagaccatatccctcaccgggtgctgtgttgagaaaaaatgcagaggtagcaacccatggcaagaaacgtggtggtatggctccgataacaaaaagaggagatggcagcgacggacttggggaggcagattagtcttttggtgaactgaaatgttgtgctatccgaatctccttggtggttgtctctggagctgctaaactatcattgcacgcctgaagaaaatcgaaaaaatattggctgccagatctggaatgaggaaactcactacagttcgcgagtttttgcagcgattaacgctagtgtactcgctggacctcgaggctagagcaatgcgagctcaccccggcttgctgatgacacattcactgagttcactgcggtttgccgatgacattcaatgtgcccttggtgtgaattttatatgaaaatgaactataatctgtaattggaaagagtgatttcaatgtaaggaattaacttttgtggggtgatgaaccatactagcgatgcacttagccaaacaagagaaatttggatttgtaccattaaaagattacaactttagatatatagcattgctatctcactaacatgtgtggtccacatgagacatgagtcaataacatgtggagccattgttatatatttaaagttgcaatcttttaatgatatagatttaattatttctaaaaacattgac

SEQ ID NO: 74566 - DNA, 1675 bp, Zea Mays
gtcactgtcttttcatgataatgctgcaactgtgaaattggcaatggctatggtgtacctggaggcggtgcttattatgctgcaaacttgccaagtcctcaaatgaataaacctagagatgaaactgataaagctaaatgtgcaaacgatctccctgattttttaaagcagaggttaagggcaaggggaattctcaaagatgagactacaaataagaattacacgagtacgcagactgtggattctcaagaaatcgagaacaaatctgcacaagagttgcctcctggttggattgaagtgaaggacccgacaactggagcgccatacttctacaatcaaagcactggagtgagtcaatgggatcgccctgacagtgttgtgaatatcatgcaacatcaagtttctccatccttgccagagaactgggaggaggcaattgacaaatcaacaggccacaaatactattataacacgaagacacagaccacacaatgggaacctcctacttctgtgaacaccagtgttagacctccagcttccaccaacactgcagttgagccagtcgctcaagctgcagatatttggaactctcaaatgcagagatgtttgggctgtggtggatggggagttggtcttgtccagccttggggatactgcaatcactgcacaagggttcaaaatcgtccttttcaacagtacccatcttacacaaataatacgatgcacgccagtggtaacaatgctcccaaagctcaggggaatgtttcagctaagaacagatcaagctcaaagccacctttagggaaaccaaacagaaaagaccaccgcaaaagaaatcgccccgaggatgatgaacttgacccaatggacccgagttcttactcagatgctccacgcgggggctgggttgttggtttgaagggtgttcaaccacgagcagcagatactaccgcagctggacctttgttccaacaaagaccatatccctcaccgggtgctgtgttgagaaaaaatgcagaggtagcaacccatggcaagaaacgtggtggtatggctccgataacaaaaagaggagatggcagcgacggacttggggaggcagattagtcttttggtgaactgaaatgttgtgctatccgaatctccttggtggttgtctctggagctgctaaactatcattgcacgcctgaagaaaatcgaaaaaatattggctgccagatctggaatgaggaaactcactacagttcgcgagtttttgcagcgattaacgctagtgtactcgctggacctcgaggctagagcaatgcgagctcaccccggcttgctgatgacacattcactgagttcactgcggtttgccgatgacattcaatgtgcccttggtgtgaattttatatgaaaatgaactataatctgtaattggaaagagtgatttcaatgtaaggaattaacttttgtggggtgatgaaccatactagcgatgcacttagccaaacaagagaaatttggatttgtaccattaaaagattacaactttagatatatagcattgctatctcactaacatgtgtggtccacatgagacatgagtcaataacatgtggagccattgttatatatttaaagttgcaatcttttaatgatatagatttaattatttctaaaaacattgac

SEQ ID NO: 74567 - DNA, 1697 bp, Zea Mays
ttttgcatctgtactgagcattggtcatggagattagtaattcggtctcacgacttctgcaactgtgaaattggcaatggctatggtgtacctggaggcggtgcttattatgctgcaaacttgccaagtcctcaaatgaataaacctagagatgaaactgataaagctaaatgtgcaaacgatctccctgattttttaaagcagaggttaagggcaaggggaattctcaaagatgagactacaaataagaattacacgagtggattctcaagaaatcgagaacaaatctgcacaagagttgcctcctggttggattgaagtgaaggacccgacaactggagcgccatacttctacaatcaaagcactggagtgagtcaatgggatcgccctgacagtgttgtgaatatcatgcaacatcaagtttctccatccttgccagagaactgggaggaggcaattgacaaatcaacaggccacaaatactattataacacgaagacacagaccacacaatgggaacctcctacttctgtgaacaccagtgttagacctccagcttccaccaacactgcagttgagccagtcgctcaagctgcagatatttggaactctcaaatgcagagatgtttgggctgtggtggatggggagttggtcttgtccagccttggggatactgcaatcactgcacaagggttcaaaatcgtccttttcaacagtacccatcttacacaaataatacgatgcacgccagtggtaacaatgctcccaaagctcaggggaatgtttcagctaagaacagatcaagctcaaagccacctttagggaaaccaaacagaaaagaccaccgcaaaagaaatcgccccgaggatgatgaacttgacccaatggacccgagttcttactcagatgctccacgcgggggctgggttgttggtttgaagggtgttcaaccacgagcagcagatactaccgcagctggacctttgttccaacaaagaccatatccctcaccgggtgctgtgttgagaaaaaatgcagaggtagcaacccatggcaagaaacgtggtggtatggctccgataacaaaaagaggagatggcagcgacggacttggggaggcagattagtcttttggtgaactgaaatgttgtgctatccgaatctccttggtggttgtctctggagctgctaaactatcattgcacgcctgaagaaaatcgaaaaaatattggctgccagatctggaatgaggaaactcactacagttcgcgagtttttgcagcgattaacgctagtgtactcgctggacctcgaggctagagcaatgcgagctcaccccggcttgctgatgacacattcactgagttcactgcggtttgccgatgacattcaatgtgcccttggtgtgaattttatatgaaaatgaactataatctgtaattggaaagagtgatttcaatgtaaggaattaacttttgtggggtgatgaaccatactagcgatgcacttagccaaacaagagaaatttggatttgtaccattaaaagattacaactttagatatatagcattgctatctcactaacatgtgtggtccacatgagacatgagtcaataacatgtggagccattgttatatatttaaagttgcaatcttttaatgatatagatttaattatttctaaaaacattgac

SEQ ID NO: 74568 - DNA, 3908 bp, Zea Mays
caaattcagtaaaagaacggagaaaaaaaaaaagagaagtccctcccattcgtcgctaatcacaatcccgatctccaagcaaacccacctcccgtcagttccctactcgccgatccagatctcctacagctttccactccgccactccaaccggacgcctccgccgtcgccggcggcggtcgagccacgcgcgcacgccgctgaggaacccggagagggcggcggcaatggagcagctgcggacgttcgggcgggagctggcgatggggtcgcagggcgggtgggggcagtccaaggatttcctcgacctcgtcaagtctatcggcgaggcgcgctccaaggcggaggaggaccgcatcatcgcgcgcgagctcgagcacctcaagcgccgcctggccgaccccgacgtgccacgccgcaagatgaaggagcttctcctccgcctagtctacgccgagatgctcggccacgacgcttccttcggccacatccacgccgtcaagatgacccacgacgagtcgctaccgctcaagcgtaccggctacctcgccgtcgcactcttcctcgacgagcgccacgacctcgtcatcctcgtggtcaacaccatccagaaggacctcaggtcggacaactacctcgtcgtctgcgcagcactcaccgccgcgtgccgccttattggtgaggaggccatccccgccgtgctgccccaggtcgtagatctgctcgtgcaccccaaggaggctgtgaggaagaaggccgtcatggcattacaccggttctaccagcgatcctcctcctccgtttcccacctcgtctccaacttccgcaagaggctatgtgataatgatccaggggtaatgggtgcaactctatgccccctctatgacctgatttcggaggaaccaaattcgtacaaggatttggttgttagtttcgttaacatcctcaaacaagttgctgagaggaggcttccgacttcctacgattatcaccaaatgcctgcaccatttattcagataaaactattgaagatacttgctgtgcttggcagtggtgataaacaagcaagtggacatatgtacactgtattgggcgacatattcaagaagggtgacactgcgagcaacattggcaatgctatactgtatgaatgcatatgctgcatttcatccattttcccaaaccctaagatgctagtggctgcagctgaaacaacatcaaagtttctgaagagtgatagtcataatcttaagtacatgggcattgatgctcttggcaggttaataaaaataaatccagatattgcagaagagcaccagctggctgtcattgattgcttagaggacccagatgacactttgaagcgcaagacatttgagcttctttataagatgacaaagtcaacaaatgttgaggtgattgttgataggatgattgagtacatgatcaacataactgatcatcattacaagacagaaattgcatcacgttgtgtcgaactcgcagagcaatttgcgcctagcaatcagtggttcatccagaccatgaacagagtttttgagcatgctggagatcttgtcaacatcagagtggcacacaatttgatgcggctaattgctgaaggctttggagatgaggacgaaggtgctgacagtcagctaagatcatcggctgtagattcttatgtccgcattgtcggagagccaaagcttccttcttctttccttcagataatatgctgggtgttgggggaatatggaacagcagatggaaaacattcggcttcttatattattgggaaattgtgtgatgtggcagaggcccacctcactgatgacactgtcaaggcgtatgcaatctcagcaattctgaagatatttgcgtttgaaatcgctcttggaaggaggattgatttgctgcctgagtgtcaaacattggtagatgaattgttagcttcacattcaacagacctgcagcaacgggcatacgagctacatgctttactaggcttgggcaaaaatgatgttgaaagtgttatgcctgcagatgcaagctgtgaagatattgaggtcgacagaaacctctcatttctagacagttatgtgcagcaagccttggaaaacggtgcatcaccttacattccagagagtgaacgctctggtcttacaagtgttggcagctacagaagccaagaacaacaggaaacatctgcccatactcttagattcgaggcctatgagatgcctaaaccttctttgccactagcaacttcacaaaccagcatgtccacaccaaatactgaccttgttccagtttcagagccaggctactataaggaagaccatcaaacatcaaggcctcaaccaccaagcgatgcggtttctggtgagtttggtgtcaaactccgccttgatggggttcaaaagaaatggggaaggtcaacatattcctcttccacaccctcaagctcgatgtccagtcaacaaacaacaaatggggcctctcattctgatgggggagggccaagttcacagccacgggagtcctcatacggttcgaagagacagcagggcacagaagtctcagcagaaaagcaacggctggctgcttcgctttttggttcggcagcagctagagctgacaggaaagcacaagcttctcgaaagacagggaaggacagtccctcaactgagaaagtagctaccactaatgtggctgcccagtctgttaaggagcaagtaatcccagctgctgcaccaccgcctgatctgctggatctgggtgacgagacagttccatcgagccgtccatcggctgaccctttctcacagttggtgggtcttcttggaccagcatctgctgctccggcgctttctgggactccggctaccactaccagtacttccaaagcaccagatcttatgtcaatcttctcagatgatgtaccaactggagtgactagtagtgggtccaccgatcccactccaggtgatgctatttcggtgagctcccacaaaggagcgacggcagtggcaccaaagaagggctcgagccttcaagatgccttgcaaaaggactcgactgcacggcaagtaggtgtgacaccgacagggaacaaccccaatcttttcaaggacttgctaggctaaaggggacagtaaggcacaccgtatgctccgcgtggcctctttgggtagatggagttcatctccgacatgtctcgatcactgaaacagcgatgatctcgctgtttgatcagcgtaggaaaagggttgcaacttgcaagggctatatttgttctcgagtcacaagacacgacctgtcctccttccagttgggaggggggttgcgctgttgagatctgtgaatggttgcgggtatttttcctttaacctcttgtgattttgtgctgagactattgtacatgtgtttacatgacgtgtaatctgtacatgagaccgtggtacagaagcgtgtgccggcgcatttttgttcagctgggctagatacactacaattgctgggcactggaaagtaaaacaatgaaagaattggtgtcattctctggctggaataaaaatataaaacggtaaatgtgtagtgttgtttattgttgatgaaaacagtcgcagatttgtttttgcaacttttaactgttgagaagtaatgcaattctttttttttcggttccattcaaacctacttgctgcgtagggccatggcccatggggcattcagtattttctctcataaaaaggtctactactattcttttctggttctatttagtcgagatcgttgtttttgtctagggagtctctaggtggtcgatggagatctaacggcatcacttcatctgatttcttgcgtcatcgccttgtcgggtaatcgtagccggcagggaccag

SEQ ID NO: 74569 - DNA, 3867 bp, Zea Mays
cagtaaaagaacggagaaaaaaaaaaagagaagtccctcccattcgtcgctaatcacaatcccgatctccaagcaaacccacctcccgtcagttccctactcgccgatccagatctcctacagctttccactccgccactccaaccggacgcctccgccgtcgccggcggcggtcgagccacgcgcgcacgccgctgaggaacccggagagggcggcggcaatggagcagctgcggacgttcgggcgggagctggcgatggggtcgcagggcgggtgggggcagtccaaggatttcctcgacctcgtcaagtctatcggcgaggcgcgctccaaggcggaggaggaccgcatcatcgcgcgcgagctcgagcacctcaagcgccgcctggccgaccccgacgtgccacgccgcaagatgaaggagcttctcctccgcctagtctacgccgagatgctcggccacgacgcttccttcggccacatccacgccgtcaagatgacccacgacgagtcgctaccgctcaagcgtaccggctacctcgccgtcgcactcttcctcgacgagcgccacgacctcgtcatcctcgtggtcaacaccatccagaaggacctcaggtcggacaactacctcgtcgtctgcgcagcactcaccgccgcgtgccgccttattggtgaggaggccatccccgccgtgctgccccaggtcgtagatctgctcgtgcaccccaaggaggctgtgaggaagaaggccgtcatggcattacaccggttctaccagcgatcctcctcctccgtttcccacctcgtctccaacttccgcaagaggctatgtgataatgatccaggggtaatgggtgcaactctatgccccctctatgacctgatttcggaggaaccaaattcgtacaaggatttggttgttagtttcgttaacatcctcaaacaagttgctgagaggaggcttccgacttcctacgattatcaccaaatgcctgcaccatttattcagtggtgataaacaagcaagtggacatatgtacactgtattgggcgacatattcaagaagggtgacactgcgagcaacattggcaatgctatactgtatgaatgcatatgctgcatttcatccattttcccaaaccctaagatgctagtggctgcagctgaaacaacatcaaagtttctgaagagtgatagtcataatcttaagtacatgggcattgatgctcttggcaggttaataaaaataaatccagatattgcagaagagcaccagctggctgtcattgattgcttagaggacccagatgacactttgaagcgcaagacatttgagcttctttataagatgacaaagtcaacaaatgttgaggtgattgttgataggatgattgagtacatgatcaacataactgatcatcattacaagacagaaattgcatcacgttgtgtcgaactcgcagagcaatttgcgcctagcaatcagtggttcatccagaccatgaacagagtttttgagcatgctggagatcttgtcaacatcagagtggcacacaatttgatgcggctaattgctgaaggctttggagatgaggacgaaggtgctgacagtcagctaagatcatcggctgtagattcttatgtccgcattgtcggagagccaaagcttccttcttctttccttcagataatatgctgggtgttgggggaatatggaacagcagatggaaaacattcggcttcttatattattgggaaattgtgtgatgtggcagaggcccacctcactgatgacactgtcaaggcgtatgcaatctcagcaattctgaagatatttgcgtttgaaatcgctcttggaaggaggattgatttgctgcctgagtgtcaaacattggtagatgaattgttagcttcacattcaacagacctgcagcaacgggcatacgagctacatgctttactaggcttgggcaaaaatgatgttgaaagtgttatgcctgcagatgcaagctgtgaagatattgaggtcgacagaaacctctcatttctagacagttatgtgcagcaagccttggaaaacggtgcatcaccttacattccagagagtgaacgctctggtcttacaagtgttggcagctacagaagccaagaacaacaggaaacatctgcccatactcttagattcgaggcctatgagatgcctaaaccttctttgccactagcaacttcacaaaccagcatgtccacaccaaatactgaccttgttccagtttcagagccaggctactataaggaagaccatcaaacatcaaggcctcaaccaccaagcgatgcggtttctggtgagtttggtgtcaaactccgccttgatggggttcaaaagaaatggggaaggtcaacatattcctcttccacaccctcaagctcgatgtccagtcaacaaacaacaaatggggcctctcattctgatgggggagggccaagttcacagccacgggagtcctcatacggttcgaagagacagcagggcacagaagtctcagcagaaaagcaacggctggctgcttcgctttttggttcggcagcagctagagctgacaggaaagcacaagcttctcgaaagacagggaaggacagtccctcaactgagaaagtagctaccactaatgtggctgcccagtctgttaaggagcaagtaatcccagctgctgcaccaccgcctgatctgctggatctgggtgacgagacagttccatcgagccgtccatcggctgaccctttctcacagttggtgggtcttcttggaccagcatctgctgctccggcgctttctgggactccggctaccactaccagtacttccaaagcaccagatcttatgtcaatcttctcagatgatgtaccaactggagtgactagtagtgggtccaccgatcccactccaggtgatgctatttcggtgagctcccacaaaggagcgacggcagtggcaccaaagaagggctcgagccttcaagatgccttgcaaaaggactcgactgcacggcaagtaggtgtgacaccgacagggaacaaccccaatcttttcaaggacttgctaggctaaaggggacagtaaggcacaccgtatgctccgcgtggcctctttgggtagatggagttcatctccgacatgtctcgatcactgaaacagcgatgatctcgctgtttgatcagcgtaggaaaagggttgcaacttgcaagggctatatttgttctcgagtcacaagacacgacctgtcctccttccagttgggaggggggttgcgctgttgagatctgtgaatggttgcgggtatttttcctttaacctcttgtgattttgtgctgagactattgtacatgtgtttacatgacgtgtaatctgtacatgagaccgtggtacagaagcgtgtgccggcgcatttttgttcagctgggctagatacactacaattgctgggcactggaaagtaaaacaatgaaagaattggtgtcattctctggctggaataaaaatataaaacggtaaatgtgtagtgttgtttattgttgatgaaaacagtcgcagatttgtttttgcaacttttaactgttgagaagtaatgcaattctttttttttcggttccattcaaacctacttgctgcgtagggccatggcccatggggcattcagtattttctctcataaaaaggtctactactattcttttctggttctatttagtcgagatcgttgtttttgtctagggagtctctaggtggtcgatggagatctaacggcatcacttcatctgatttcttgcgtcatcgccttgtcgggtaatcgtagccggcagggaccag

SEQ ID NO: 74570 - DNA, 3847 bp, Zea Mays
aaaaaaaaagagaagtccctcccattcgtcgctaatcacaatcccgatctccaagcaaacccacctcccgtcagttccctactcgccgatccagatctcctacagctttccactccgccactccaaccggacgcctccgccgtcgccggcggcggtcgagccacgcgcgcacgccgctgaggaacccggagagggcggcggcaatggagcagctgcggacgttcgggcgggagctggcgatggggtcgcagggcgggtgggggcagtccaaggatttcctcgacctcgtcaagtctatcggcgaggcgcgctccaaggcggaggaggaccgcatcatcgcgcgcgagctcgagcacctcaagcgccgcctggccgaccccgacgtgccacgccgcaagatgaaggagcttctcctccgcctagtctacgccgagatgctcggccacgacgcttccttcggccacatccacgccgtcaagatgacccacgacgagtcgctaccgctcaagcgtaccggctacctcgccgtcgcactcttcctcgacgagcgccacgacctcgtcatcctcgtggtcaacaccatccagaaggacctcaggtcggacaactacctcgtcgtctgcgcagcactcaccgccgcgtgccgccttattggtgaggaggccatccccgccgtgctgccccaggtcgtagatctgctcgtgcaccccaaggaggctgtgaggaagaaggccgtcatggcattacaccggttctaccagcgatcctcctcctccgtttcccacctcgtctccaacttccgcaagaggctatgtgataatgatccaggggtaatgggtgcaactctatgccccctctatgacctgatttcggaggaaccaaattcgtacaaggatttggttgttagtttcgttaacatcctcaaacaagttgctgagaggaggcttccgacttcctacgattatcaccaaatgcctgcaccatttattcagataaaactattgaagatacttgctgtgcttggcagtggtgataaacaagcaagtggacatatgtacactgtattgggcgacatattcaagaagggtgacactgcgagcaacattggcaatgctatactgtatgaatgcatatgctgcatttcatccattttcccaaaccctaagatgctagtggctgcagctgaaacaacatcaaagtttctgaagagtgatagtcataatcttaagtacatgggcattgatgctcttggcaggttaataaaaataaatccagatattgcagaagagcaccagctggctgtcattgattgcttagaggacccagatgacactttgaagcgcaagacatttgagcttctttataagatgacaaagtcaacaaatgttgaggtgattgttgataggatgattgagtacatgatcaacataactgatcatcattacaagacagaaattgcatcacgttgtgtcgaactcgcagagcaatttgcgcctagcaatcagtggttcatccagaccatgaacagagtttttgagcatgctggagatcttgtcaacatcagagtggcacacaatttgatgcggctaattgctgaaggctttggagatgaggacgaaggtgctgacagtcagctaagatcatcggctgtagattcttatgtccgcattgtcggagagccaaagcttccttcttctttccttcagatggaaaacattcggcttcttatattattgggaaattgtgtgatgtggcagaggcccacctcactgatgacactgtcaaggcgtatgcaatctcagcaattctgaagatatttgcgtttgaaatcgctcttggaaggaggattgatttgctgcctgagtgtcaaacattggtagatgaattgttagcttcacattcaacagacctgcagcaacgggcatacgagctacatgctttactaggcttgggcaaaaatgatgttgaaagtgttatgcctgcagatgcaagctgtgaagatattgaggtcgacagaaacctctcatttctagacagttatgtgcagcaagccttggaaaacggtgcatcaccttacattccagagagtgaacgctctggtcttacaagtgttggcagctacagaagccaagaacaacaggaaacatctgcccatactcttagattcgaggcctatgagatgcctaaaccttctttgccactagcaacttcacaaaccagcatgtccacaccaaatactgaccttgttccagtttcagagccaggctactataaggaagaccatcaaacatcaaggcctcaaccaccaagcgatgcggtttctggtgagtttggtgtcaaactccgccttgatggggttcaaaagaaatggggaaggtcaacatattcctcttccacaccctcaagctcgatgtccagtcaacaaacaacaaatggggcctctcattctgatgggggagggccaagttcacagccacgggagtcctcatacggttcgaagagacagcagggcacagaagtctcagcagaaaagcaacggctggctgcttcgctttttggttcggcagcagctagagctgacaggaaagcacaagcttctcgaaagacagggaaggacagtccctcaactgagaaagtagctaccactaatgtggctgcccagtctgttaaggagcaagtaatcccagctgctgcaccaccgcctgatctgctggatctgggtgacgagacagttccatcgagccgtccatcggctgaccctttctcacagttggtgggtcttcttggaccagcatctgctgctccggcgctttctgggactccggctaccactaccagtacttccaaagcaccagatcttatgtcaatcttctcagatgatgtaccaactggagtgactagtagtgggtccaccgatcccactccaggtgatgctatttcggtgagctcccacaaaggagcgacggcagtggcaccaaagaagggctcgagccttcaagatgccttgcaaaaggactcgactgcacggcaagtaggtgtgacaccgacagggaacaaccccaatcttttcaaggacttgctaggctaaaggggacagtaaggcacaccgtatgctccgcgtggcctctttgggtagatggagttcatctccgacatgtctcgatcactgaaacagcgatgatctcgctgtttgatcagcgtaggaaaagggttgcaacttgcaagggctatatttgttctcgagtcacaagacacgacctgtcctccttccagttgggaggggggttgcgctgttgagatctgtgaatggttgcgggtatttttcctttaacctcttgtgattttgtgctgagactattgtacatgtgtttacatgacgtgtaatctgtacatgagaccgtggtacagaagcgtgtgccggcgcatttttgttcagctgggctagatacactacaattgctgggcactggaaagtaaaacaatgaaagaattggtgtcattctctggctggaataaaaatataaaacggtaaatgtgtagtgttgtttattgttgatgaaaacagtcgcagatttgtttttgcaacttttaactgttgagaagtaatgcaattctttttttttcggttccattcaaacctacttgctgcgtagggccatggcccatggggcattcagtattttctctcataaaaaggtctactactattcttttctggttctatttagtcgagatcgttgtttttgtctagggagtctctaggtggtcgatggagatctaacggcatcacttcatctgatttcttgcgtcatcgccttgtcgggtaatcgtagccggcagggaccag

SEQ ID NO: 74571 - DNA, 3794 bp, Zea Mays
aaaaaaaaagagaagtccctcccattcgtcgctaatcacaatcccgatctccaagcaaacccacctcccgtcagttccctactcgccgatccagatctcctacagctttccactccgccactccaaccggacgcctccgccgtcgccggcggcggtcgagccacgcgcgcacgccgctgaggaacccggagagggcggcggcaatggagcagctgcggacgttcgggcgggagctggcgatggggtcgcagggcgggtgggggcagtccaaggatttcctcgacctcgtcaagtctatcggcgaggcgcgctccaaggcggaggaggaccgcatcatcgcgcgcgagctcgagcacctcaagcgccgcctggccgaccccgacgtgccacgccgcaagatgaaggagcttctcctccgcctagtctacgccgagatgctcggccacgacgcttccttcggccacatccacgccgtcaagatgacccacgacgagtcgctaccgctcaagcgtaccggctacctcgccgtcgcactcttcctcgacgagcgccacgacctcgtcatcctcgtggtcaacaccatccagaaggacctcaggtcggacaactacctcgtcgtctgcgcagcactcaccgccgcgtgccgccttattggtgaggaggccatccccgccgtgctgccccaggtcgtagatctgctcgtgcaccccaaggaggctgtgaggaagaaggccgtcatggcattacaccggttctaccagcgatcctcctcctccgtttcccacctcgtctccaacttccgcaagaggctatgtgataatgatccaggggtaatgggtgcaactctatgccccctctatgacctgatttcggaggaaccaaattcgtacaaggatttggttgttagtttcgttaacatcctcaaacaagttgctgagaggaggcttccgacttcctacgattatcaccaaatgcctgcaccatttattcagataaaactattgaagatacttgctgtgcttggcagtggtgataaacaagcaagtggacatatgtacactgtattgggcgacatattcaagaagggtgacactgcgagcaacattggcaatgctatactgtatgaatgcatatgctgcatttcatccattttcccaaaccctaagatgctagtggctgcagctgaaacaacatcaaagtttctgaaggttaataaaaataaatccagatattgcagaagagcaccagctggctgtcattgattgcttagaggacccagatgacactttgaagcgcaagacatttgagcttctttataagatgacaaagtcaacaaatgttgaggtgattgttgataggatgattgagtacatgatcaacataactgatcatcattacaagacagaaattgcatcacgttgtgtcgaactcgcagagcaatttgcgcctagcaatcagtggttcatccagaccatgaacagagtttttgagcatgctggagatcttgtcaacatcagagtggcacacaatttgatgcggctaattgctgaaggctttggagatgaggacgaaggtgctgacagtcagctaagatcatcggctgtagattcttatgtccgcattgtcggagagccaaagcttccttcttctttccttcagataatatgctgggtgttgggggaatatggaacagcagatggaaaacattcggcttcttatattattgggaaattgtgtgatgtggcagaggcccacctcactgatgacactgtcaaggcgtatgcaatctcagcaattctgaagatatttgcgtttgaaatcgctcttggaaggaggattgatttgctgcctgagacctgcagcaacgggcatacgagctacatgctttactaggcttgggcaaaaatgatgttgaaagtgttatgcctgcagatgcaagctgtgaagatattgaggtcgacagaaacctctcatttctagacagttatgtgcagcaagccttggaaaacggtgcatcaccttacattccagagagtgaacgctctggtcttacaagtgttggcagctacagaagccaagaacaacaggaaacatctgcccatactcttagattcgaggcctatgagatgcctaaaccttctttgccactagcaacttcacaaaccagcatgtccacaccaaatactgaccttgttccagtttcagagccaggctactataaggaagaccatcaaacatcaaggcctcaaccaccaagcgatgcggtttctggtgagtttggtgtcaaactccgccttgatggggttcaaaagaaatggggaaggtcaacatattcctcttccacaccctcaagctcgatgtccagtcaacaaacaacaaatggggcctctcattctgatgggggagggccaagttcacagccacgggagtcctcatacggttcgaagagacagcagggcacagaagtctcagcagaaaagcaacggctggctgcttcgctttttggttcggcagcagctagagctgacaggaaagcacaagcttctcgaaagacagggaaggacagtccctcaactgagaaagtagctaccactaatgtggctgcccagtctgttaaggagcaagtaatcccagctgctgcaccaccgcctgatctgctggatctgggtgacgagacagttccatcgagccgtccatcggctgaccctttctcacagttggtgggtcttcttggaccagcatctgctgctccggcgctttctgggactccggctaccactaccagtacttccaaagcaccagatcttatgtcaatcttctcagatgatgtaccaactggagtgactagtagtgggtccaccgatcccactccaggtgatgctatttcggtgagctcccacaaaggagcgacggcagtggcaccaaagaagggctcgagccttcaagatgccttgcaaaaggactcgactgcacggcaagtaggtgtgacaccgacagggaacaaccccaatcttttcaaggacttgctaggctaaaggggacagtaaggcacaccgtatgctccgcgtggcctctttgggtagatggagttcatctccgacatgtctcgatcactgaaacagcgatgatctcgctgtttgatcagcgtaggaaaagggttgcaacttgcaagggctatatttgttctcgagtcacaagacacgacctgtcctccttccagttgggaggggggttgcgctgttgagatctgtgaatggttgcgggtatttttcctttaacctcttgtgattttgtgctgagactattgtacatgtgtttacatgacgtgtaatctgtacatgagaccgtggtacagaagcgtgtgccggcgcatttttgttcagctgggctagatacactacaattgctgggcactggaaagtaaaacaatgaaagaattggtgtcattctctggctggaataaaaatataaaacggtaaatgtgtagtgttgtttattgttgatgaaaacagtcgcagatttgtttttgcaacttttaactgttgagaagtaatgcaattctttttttttcggttccattcaaacctacttgctgcgtagggccatggcccatggggcattcagtattttctctcataaaaaggtctactactattcttttctggttctatttagtcgagatcgttgtttttgtctagggagtctctaggtggtcgatggagatctaacggcatcacttcatctgatttcttgcgtcatcgccttgtcgggtaatcgtagccggcagggaccag

SEQ ID NO: 74572 - DNA, 3802 bp, Zea Mays
aaaaaaaaagagaagtccctcccattcgtcgctaatcacaatcccgatctccaagcaaacccacctcccgtcagttccctactcgccgatccagatctcctacagctttccactccgccactccaaccggacgcctccgccgtcgccggcggcggtcgagccacgcgcgcacgccgctgaggaacccggagagggcggcggcaatggagcagctgcggacgttcgggcgggagctggcgatggggtcgcagggcgggtgggggcagtccaaggatttcctcgacctcgtcaagtctatcggcgaggcgcgctccaaggcggaggaggaccgcatcatcgcgcgcgagctcgagcacctcaagcgccgcctggccgaccccgacgtgccacgccgcaagatgaaggagcttctcctccgcctagtctacgccgagatgctcggccacgacgcttccttcggccacatccacgccgtcaagatgacccacgacgagtcgctaccgctcaagcgtaccggctacctcgccgtcgcactcttcctcgacgagcgccacgacctcgtcatcctcgtggtcaacaccatccagaaggacctcaggtcggacaactacctcgtcgtctgcgcagcactcaccgccgcgtgccgccttattggtgaggaggccatccccgccgtgctgccccaggtcgtagatctgctcgtgcaccccaaggaggctgtgaggaagaaggccgtcatggcattacaccggttctaccagcgatcctcctcctccgtttcccacctcgtctccaacttccgcaagaggctatgtgataatgatccaggggtaatgggtgcaactctatgccccctctatgacctgatttcggaggaaccaaattcgtacaaggatttggttgttagtttcgttaacatcctcaaacaagttgctgagaggaggcttccgacttcctacgattatcaccaaatgcctgcaccatttattcagtggtgataaacaagcaagtggacatatgtacactgtattgggcgacatattcaagaagggtgacactgcgagcaacattggcaatgctatactgtatgaatgcatatgctgcatttcatccattttcccaaaccctaagatgctagtggctgcagctgaaacaacatcaaagtttctgaaggttaataaaaataaatccagatattgcagaagagcaccagctggctgtcattgattgcttagaggacccagatgacactttgaagcgcaagacatttgagcttctttataagatgacaaagtcaacaaatgttgaggtgattgttgataggatgattgagtacatgatcaacataactgatcatcattacaagacagaaattgcatcacgttgtgtcgaactcgcagagcaatttgcgcctagcaatcagtggttcatccagaccatgaacagagtttttgagcatgctggagatcttgtcaacatcagagtggcacacaatttgatgcggctaattgctgaaggctttggagatgaggacgaaggtgctgacagtcagctaagatcatcggctgtagattcttatgtccgcattgtcggagagccaaagcttccttcttctttccttcagataatatgctgggtgttgggggaatatggaacagcagatggaaaacattcggcttcttatattattgggaaattgtgtgatgtggcagaggcccacctcactgatgacactgtcaaggcgtatgcaatctcagcaattctgaagatatttgcgtttgaaatcgctcttggaaggaggattgatttgctgcctgagtgtcaaacattggtagatgaattgttagcttcacattcaacagacctgcagcaacgggcatacgagctacatgctttactaggcttgggcaaaaatgatgttgaaagtgttatgcctgcagatgcaagctgtgaagatattgaggtcgacagaaacctctcatttctagacagttatgtgcagcaagccttggaaaacggtgcatcaccttacattccagagagtgaacgctctggtcttacaagtgttggcagctacagaagccaagaacaacaggaaacatctgcccatactcttagattcgaggcctatgagatgcctaaaccttctttgccactagcaacttcacaaaccagcatgtccacaccaaatactgaccttgttccagtttcagagccaggctactataaggaagaccatcaaacatcaaggcctcaaccaccaagcgatgcggtttctggtgagtttggtgtcaaactccgccttgatggggttcaaaagaaatggggaaggtcaacatattcctcttccacaccctcaagctcgatgtccagtcaacaaacaacaaatggggcctctcattctgatgggggagggccaagttcacagccacgggagtcctcatacggttcgaagagacagcagggcacagaagtctcagcagaaaagcaacggctggctgcttcgctttttggttcggcagcagctagagctgacaggaaagcacaagcttctcgaaagacagggaaggacagtccctcaactgagaaagtagctaccactaatgtggctgcccagtctgttaaggagcaagtaatcccagctgctgcaccaccgcctgatctgctggatctgggtgacgagacagttccatcgagccgtccatcggctgaccctttctcacagttggtgggtcttcttggaccagcatctgctgctccggcgctttctgggactccggctaccactaccagtacttccaaagcaccagatcttatgtcaatcttctcagatgatgtaccaactggagtgactagtagtgggtccaccgatcccactccaggtgatgctatttcggtgagctcccacaaaggagcgacggcagtggcaccaaagaagggctcgagccttcaagatgccttgcaaaaggactcgactgcacggcaagtaggtgtgacaccgacagggaacaaccccaatcttttcaaggacttgctaggctaaaggggacagtaaggcacaccgtatgctccgcgtggcctctttgggtagatggagttcatctccgacatgtctcgatcactgaaacagcgatgatctcgctgtttgatcagcgtaggaaaagggttgcaacttgcaagggctatatttgttctcgagtcacaagacacgacctgtcctccttccagttgggaggggggttgcgctgttgagatctgtgaatggttgcgggtatttttcctttaacctcttgtgattttgtgctgagactattgtacatgtgtttacatgacgtgtaatctgtacatgagaccgtggtacagaagcgtgtgccggcgcatttttgttcagctgggctagatacactacaattgctgggcactggaaagtaaaacaatgaaagaattggtgtcattctctggctggaataaaaatataaaacggtaaatgtgtagtgttgtttattgttgatgaaaacagtcgcagatttgtttttgcaacttttaactgttgagaagtaatgcaattctttttttttcggttccattcaaacctacttgctgcgtagggccatggcccatggggcattcagtattttctctcataaaaaggtctactactattcttttctggttctatttagtcgagatcgttgtttttgtctagggagtctctaggtggtcgatggagatctaacggcatcacttcatctgatttcttgcgtcatcgccttgtcgggtaatcgtagccggcagggaccag

SEQ ID NO: 74573 - DNA, 3806 bp, Zea Mays
aaaaaaaaagagaagtccctcccattcgtcgctaatcacaatcccgatctccaagcaaacccacctcccgtcagttccctactcgccgatccagatctcctacagctttccactccgccactccaaccggacgcctccgccgtcgccggcggcggtcgagccacgcgcgcacgccgctgaggaacccggagagggcggcggcaatggagcagctgcggacgttcgggcgggagctggcgatggggtcgcagggcgggtgggggcagtccaaggatttcctcgacctcgtcaagtctatcggcgaggcgcgctccaaggcggaggaggaccgcatcatcgcgcgcgagctcgagcacctcaagcgccgcctggccgaccccgacgtgccacgccgcaagatgaaggagcttctcctccgcctagtctacgccgagatgctcggccacgacgcttccttcggccacatccacgccgtcaagatgacccacgacgagtcgctaccgctcaagcgtaccggctacctcgccgtcgcactcttcctcgacgagcgccacgacctcgtcatcctcgtggtcaacaccatccagaaggacctcaggtcggacaactacctcgtcgtctgcgcagcactcaccgccgcgtgccgccttattggtgaggaggccatccccgccgtgctgccccaggtcgtagatctgctcgtgcaccccaaggaggctgtgaggaagaaggccgtcatggcattacaccggttctaccagcgatcctcctcctccgtttcccacctcgtctccaacttccgcaagaggctatgtgataatgatccaggggtaatgggtgcaactctatgccccctctatgacctgatttcggaggaaccaaattcgtacaaggatttggttgttagtttcgttaacatcctcaaacaagttgctgagaggaggcttccgacttcctacgattatcaccaaatgcctgcaccatttattcagtggtgataaacaagcaagtggacatatgtacactgtattgggcgacatattcaagaagggtgacactgcgagcaacattggcaatgctatactgtatgaatgcatatgctgcatttcatccattttcccaaaccctaagatgctagtggctgcagctgaaacaacatcaaagtttctgaagagtgatagtcataatcttaagtacatgggcattgatgctcttggcaggttaataaaaataaatccagatattgcagaagagcaccagctggctgtcattgattgcttagaggacccagatgacactttgaagcgcaagacatttgagcttctttataagatgacaaagtcaacaaatgttgaggtgattgttgataggatgattgagtacatgatcaacataactgatcatcattacaagacagaaattgcatcacgttgtgtcgaactcgcagagcaatttgcgcctagcaatcagtggttcatccagaccatgaacagagtttttgagcatgctggagatcttgtcaacatcagagtggcacacaatttgatgcggctaattgctgaaggctttggagatgaggacgaaggtgctgacagtcagctaagatcatcggctgtagattcttatgtccgcattgtcggagagccaaagcttccttcttctttccttcagataatatgctgggtgttgggggaatatggaacagcagatggaaaacattcggcttcttatattattgggaaattgtgtgatgtggcagaggcccacctcactgatgacactgtcaaggcgtatgcaatctcagcaattctgaagatatttgcgtttgaaatcgctcttggaaggaggattgatttgctgcctgagacctgcagcaacgggcatacgagctacatgctttactaggcttgggcaaaaatgatgttgaaagtgttatgcctgcagatgcaagctgtgaagatattgaggtcgacagaaacctctcatttctagacagttatgtgcagcaagccttggaaaacggtgcatcaccttacattccagagagtgaacgctctggtcttacaagtgttggcagctacagaagccaagaacaacaggaaacatctgcccatactcttagattcgaggcctatgagatgcctaaaccttctttgccactagcaacttcacaaaccagcatgtccacaccaaatactgaccttgttccagtttcagagccaggctactataaggaagaccatcaaacatcaaggcctcaaccaccaagcgatgcggtttctggtgagtttggtgtcaaactccgccttgatggggttcaaaagaaatggggaaggtcaacatattcctcttccacaccctcaagctcgatgtccagtcaacaaacaacaaatggggcctctcattctgatgggggagggccaagttcacagccacgggagtcctcatacggttcgaagagacagcagggcacagaagtctcagcagaaaagcaacggctggctgcttcgctttttggttcggcagcagctagagctgacaggaaagcacaagcttctcgaaagacagggaaggacagtccctcaactgagaaagtagctaccactaatgtggctgcccagtctgttaaggagcaagtaatcccagctgctgcaccaccgcctgatctgctggatctgggtgacgagacagttccatcgagccgtccatcggctgaccctttctcacagttggtgggtcttcttggaccagcatctgctgctccggcgctttctgggactccggctaccactaccagtacttccaaagcaccagatcttatgtcaatcttctcagatgatgtaccaactggagtgactagtagtgggtccaccgatcccactccaggtgatgctatttcggtgagctcccacaaaggagcgacggcagtggcaccaaagaagggctcgagccttcaagatgccttgcaaaaggactcgactgcacggcaagtaggtgtgacaccgacagggaacaaccccaatcttttcaaggacttgctaggctaaaggggacagtaaggcacaccgtatgctccgcgtggcctctttgggtagatggagttcatctccgacatgtctcgatcactgaaacagcgatgatctcgctgtttgatcagcgtaggaaaagggttgcaacttgcaagggctatatttgttctcgagtcacaagacacgacctgtcctccttccagttgggaggggggttgcgctgttgagatctgtgaatggttgcgggtatttttcctttaacctcttgtgattttgtgctgagactattgtacatgtgtttacatgacgtgtaatctgtacatgagaccgtggtacagaagcgtgtgccggcgcatttttgttcagctgggctagatacactacaattgctgggcactggaaagtaaaacaatgaaagaattggtgtcattctctggctggaataaaaatataaaacggtaaatgtgtagtgttgtttattgttgatgaaaacagtcgcagatttgtttttgcaacttttaactgttgagaagtaatgcaattctttttttttcggttccattcaaacctacttgctgcgtagggccatggcccatggggcattcagtattttctctcataaaaaggtctactactattcttttctggttctatttagtcgagatcgttgtttttgtctagggagtctctaggtggtcgatggagatctaacggcatcacttcatctgatttcttgcgtcatcgccttgtcgggtaatcgtagccggcagggaccag

SEQ ID NO: 74574 - DNA, 3837 bp, Zea Mays
aaaaaaaaagagaagtccctcccattcgtcgctaatcacaatcccgatctccaagcaaacccacctcccgtcagttccctactcgccgatccagatctcctacagctttccactccgccactccaaccggacgcctccgccgtcgccggcggcggtcgagccacgcgcgcacgccgctgaggaacccggagagggcggcggcaatggagcagctgcggacgttcgggcgggagctggcgatggggtcgcagggcgggtgggggcagtccaaggatttcctcgacctcgtcaagtctatcggcgaggcgcgctccaaggcggaggaggaccgcatcatcgcgcgcgagctcgagcacctcaagcgccgcctggccgaccccgacgtgccacgccgcaagatgaaggagcttctcctccgcctagtctacgccgagatgctcggccacgacgcttccttcggccacatccacgccgtcaagatgacccacgacgagtcgctaccgctcaagcgtaccggctacctcgccgtcgcactcttcctcgacgagcgccacgacctcgtcatcctcgtggtcaacaccatccagaaggacctcaggtcggacaactacctcgtcgtctgcgcagcactcaccgccgcgtgccgccttattggtgaggaggccatccccgccgtgctgccccaggtcgtagatctgctcgtgcaccccaaggaggctgtgaggaagaaggccgtcatggcattacaccggttctaccagcgatcctcctcctccgtttcccacctcgtctccaacttccgcaagaggctatgtgataatgatccaggggtaatgggtgcaactctatgccccctctatgacctgatttcggaggaaccaaattcgtacaaggatttggttgttagtttcgttaacatcctcaaacaagttgctgagaggaggcttccgacttcctacgattatcaccaaatgcctgcaccatttattcagataaaactattgaagatacttgctgtgcttggcagtggtgataaacaagcaagtggacatatgtacactgtattgggcgacatattcaagaagggtgacactgcgagcaacattggcaatgctatactgtatgaatgcatatgctgcatttcatccattttcccaaaccctaagatgctagtggctgcagctgaaacaacatcaaagtttctgaaggttaataaaaataaatccagatattgcagaagagcaccagctggctgtcattgattgcttagaggacccagatgacactttgaagcgcaagacatttgagcttctttataagatgacaaagtcaacaaatgttgaggtgattgttgataggatgattgagtacatgatcaacataactgatcatcattacaagacagaaattgcatcacgttgtgtcgaactcgcagagcaatttgcgcctagcaatcagtggttcatccagaccatgaacagagtttttgagcatgctggagatcttgtcaacatcagagtggcacacaatttgatgcggctaattgctgaaggctttggagatgaggacgaaggtgctgacagtcagctaagatcatcggctgtagattcttatgtccgcattgtcggagagccaaagcttccttcttctttccttcagataatatgctgggtgttgggggaatatggaacagcagatggaaaacattcggcttcttatattattgggaaattgtgtgatgtggcagaggcccacctcactgatgacactgtcaaggcgtatgcaatctcagcaattctgaagatatttgcgtttgaaatcgctcttggaaggaggattgatttgctgcctgagtgtcaaacattggtagatgaattgttagcttcacattcaacagacctgcagcaacgggcatacgagctacatgctttactaggcttgggcaaaaatgatgttgaaagtgttatgcctgcagatgcaagctgtgaagatattgaggtcgacagaaacctctcatttctagacagttatgtgcagcaagccttggaaaacggtgcatcaccttacattccagagagtgaacgctctggtcttacaagtgttggcagctacagaagccaagaacaacaggaaacatctgcccatactcttagattcgaggcctatgagatgcctaaaccttctttgccactagcaacttcacaaaccagcatgtccacaccaaatactgaccttgttccagtttcagagccaggctactataaggaagaccatcaaacatcaaggcctcaaccaccaagcgatgcggtttctggtgagtttggtgtcaaactccgccttgatggggttcaaaagaaatggggaaggtcaacatattcctcttccacaccctcaagctcgatgtccagtcaacaaacaacaaatggggcctctcattctgatgggggagggccaagttcacagccacgggagtcctcatacggttcgaagagacagcagggcacagaagtctcagcagaaaagcaacggctggctgcttcgctttttggttcggcagcagctagagctgacaggaaagcacaagcttctcgaaagacagggaaggacagtccctcaactgagaaagtagctaccactaatgtggctgcccagtctgttaaggagcaagtaatcccagctgctgcaccaccgcctgatctgctggatctgggtgacgagacagttccatcgagccgtccatcggctgaccctttctcacagttggtgggtcttcttggaccagcatctgctgctccggcgctttctgggactccggctaccactaccagtacttccaaagcaccagatcttatgtcaatcttctcagatgatgtaccaactggagtgactagtagtgggtccaccgatcccactccaggtgatgctatttcggtgagctcccacaaaggagcgacggcagtggcaccaaagaagggctcgagccttcaagatgccttgcaaaaggactcgactgcacggcaagtaggtgtgacaccgacagggaacaaccccaatcttttcaaggacttgctaggctaaaggggacagtaaggcacaccgtatgctccgcgtggcctctttgggtagatggagttcatctccgacatgtctcgatcactgaaacagcgatgatctcgctgtttgatcagcgtaggaaaagggttgcaacttgcaagggctatatttgttctcgagtcacaagacacgacctgtcctccttccagttgggaggggggttgcgctgttgagatctgtgaatggttgcgggtatttttcctttaacctcttgtgattttgtgctgagactattgtacatgtgtttacatgacgtgtaatctgtacatgagaccgtggtacagaagcgtgtgccggcgcatttttgttcagctgggctagatacactacaattgctgggcactggaaagtaaaacaatgaaagaattggtgtcattctctggctggaataaaaatataaaacggtaaatgtgtagtgttgtttattgttgatgaaaacagtcgcagatttgtttttgcaacttttaactgttgagaagtaatgcaattctttttttttcggttccattcaaacctacttgctgcgtagggccatggcccatggggcattcagtattttctctcataaaaaggtctactactattcttttctggttctatttagtcgagatcgttgtttttgtctagggagtctctaggtggtcgatggagatctaacggcatcacttcatctgatttcttgcgtcatcgccttgtcgggtaatcgtagccggcagggaccag

SEQ ID NO: 74575 - DNA, 3841 bp, Zea Mays
aaaaaaaaagagaagtccctcccattcgtcgctaatcacaatcccgatctccaagcaaacccacctcccgtcagttccctactcgccgatccagatctcctacagctttccactccgccactccaaccggacgcctccgccgtcgccggcggcggtcgagccacgcgcgcacgccgctgaggaacccggagagggcggcggcaatggagcagctgcggacgttcgggcgggagctggcgatggggtcgcagggcgggtgggggcagtccaaggatttcctcgacctcgtcaagtctatcggcgaggcgcgctccaaggcggaggaggaccgcatcatcgcgcgcgagctcgagcacctcaagcgccgcctggccgaccccgacgtgccacgccgcaagatgaaggagcttctcctccgcctagtctacgccgagatgctcggccacgacgcttccttcggccacatccacgccgtcaagatgacccacgacgagtcgctaccgctcaagcgtaccggctacctcgccgtcgcactcttcctcgacgagcgccacgacctcgtcatcctcgtggtcaacaccatccagaaggacctcaggtcggacaactacctcgtcgtctgcgcagcactcaccgccgcgtgccgccttattggtgaggaggccatccccgccgtgctgccccaggtcgtagatctgctcgtgcaccccaaggaggctgtgaggaagaaggccgtcatggcattacaccggttctaccagcgatcctcctcctccgtttcccacctcgtctccaacttccgcaagaggctatgtgataatgatccaggggtaatgggtgcaactctatgccccctctatgacctgatttcggaggaaccaaattcgtacaaggatttggttgttagtttcgttaacatcctcaaacaagttgctgagaggaggcttccgacttcctacgattatcaccaaatgcctgcaccatttattcagataaaactattgaagatacttgctgtgcttggcagtggtgataaacaagcaagtggacatatgtacactgtattgggcgacatattcaagaagggtgacactgcgagcaacattggcaatgctatactgtatgaatgcatatgctgcatttcatccattttcccaaaccctaagatgctagtggctgcagctgaaacaacatcaaagtttctgaagagtgatagtcataatcttaagtacatgggcattgatgctcttggcaggttaataaaaataaatccagatattgcagaagagcaccagctggctgtcattgattgcttagaggacccagatgacactttgaagcgcaagacatttgagcttctttataagatgacaaagtcaacaaatgttgaggtgattgttgataggatgattgagtacatgatcaacataactgatcatcattacaagacagaaattgcatcacgttgtgtcgaactcgcagagcaatttgcgcctagcaatcagtggttcatccagaccatgaacagagtttttgagcatgctggagatcttgtcaacatcagagtggcacacaatttgatgcggctaattgctgaaggctttggagatgaggacgaaggtgctgacagtcagctaagatcatcggctgtagattcttatgtccgcattgtcggagagccaaagcttccttcttctttccttcagataatatgctgggtgttgggggaatatggaacagcagatggaaaacattcggcttcttatattattgggaaattgtgtgatgtggcagaggcccacctcactgatgacactgtcaaggcgtatgcaatctcagcaattctgaagatatttgcgtttgaaatcgctcttggaaggaggattgatttgctgcctgagacctgcagcaacgggcatacgagctacatgctttactaggcttgggcaaaaatgatgttgaaagtgttatgcctgcagatgcaagctgtgaagatattgaggtcgacagaaacctctcatttctagacagttatgtgcagcaagccttggaaaacggtgcatcaccttacattccagagagtgaacgctctggtcttacaagtgttggcagctacagaagccaagaacaacaggaaacatctgcccatactcttagattcgaggcctatgagatgcctaaaccttctttgccactagcaacttcacaaaccagcatgtccacaccaaatactgaccttgttccagtttcagagccaggctactataaggaagaccatcaaacatcaaggcctcaaccaccaagcgatgcggtttctggtgagtttggtgtcaaactccgccttgatggggttcaaaagaaatggggaaggtcaacatattcctcttccacaccctcaagctcgatgtccagtcaacaaacaacaaatggggcctctcattctgatgggggagggccaagttcacagccacgggagtcctcatacggttcgaagagacagcagggcacagaagtctcagcagaaaagcaacggctggctgcttcgctttttggttcggcagcagctagagctgacaggaaagcacaagcttctcgaaagacagggaaggacagtccctcaactgagaaagtagctaccactaatgtggctgcccagtctgttaaggagcaagtaatcccagctgctgcaccaccgcctgatctgctggatctgggtgacgagacagttccatcgagccgtccatcggctgaccctttctcacagttggtgggtcttcttggaccagcatctgctgctccggcgctttctgggactccggctaccactaccagtacttccaaagcaccagatcttatgtcaatcttctcagatgatgtaccaactggagtgactagtagtgggtccaccgatcccactccaggtgatgctatttcggtgagctcccacaaaggagcgacggcagtggcaccaaagaagggctcgagccttcaagatgccttgcaaaaggactcgactgcacggcaagtaggtgtgacaccgacagggaacaaccccaatcttttcaaggacttgctaggctaaaggggacagtaaggcacaccgtatgctccgcgtggcctctttgggtagatggagttcatctccgacatgtctcgatcactgaaacagcgatgatctcgctgtttgatcagcgtaggaaaagggttgcaacttgcaagggctatatttgttctcgagtcacaagacacgacctgtcctccttccagttgggaggggggttgcgctgttgagatctgtgaatggttgcgggtatttttcctttaacctcttgtgattttgtgctgagactattgtacatgtgtttacatgacgtgtaatctgtacatgagaccgtggtacagaagcgtgtgccggcgcatttttgttcagctgggctagatacactacaattgctgggcactggaaagtaaaacaatgaaagaattggtgtcattctctggctggaataaaaatataaaacggtaaatgtgtagtgttgtttattgttgatgaaaacagtcgcagatttgtttttgcaacttttaactgttgagaagtaatgcaattctttttttttcggttccattcaaacctacttgctgcgtagggccatggcccatggggcattcagtattttctctcataaaaaggtctactactattcttttctggttctatttagtcgagatcgttgtttttgtctagggagtctctaggtggtcgatggagatctaacggcatcacttcatctgatttcttgcgtcatcgccttgtcgggtaatcgtagccggcagggaccag

SEQ ID NO: 74576 - DNA, 3499 bp, Zea Mays
taaagtattgttgggcttcctaggaaatgaatgttcaactttaatggacttgcattttaagatttgacttgttcatgacatatccatactccatcattatcactgttgtttctaaacataattaaaatactgatattagacagtaactaattcttagttttattattatgcaaacataggaatgagctcaccttataatgagcagctgtatccgaagttttcatgtcgtcatcagtatgtcactgtagataccacagcaactttggactgaatatgcatggacttccaaagatgaaaattttgcatgtgcagtacatttttacttacgttcttaatttcttgcaagctagaatgattattcttattttaatctctgcatggagcagtgaggttcctaatattgttggttcttgctgtgtagaggctatgtgataatgatccaggggtaatgggtgcaactctatgccccctctatgacctgatttcggaggaaccaaattcgtacaaggatttggttgttagtttcgttaacatcctcaaacaagttgctgagaggaggcttccgacttcctacgattatcaccaaatgcctgcaccatttattcagataaaactattgaagatacttgctgtgcttggcagtggtgataaacaagcaagtggacatatgtacactgtattgggcgacatattcaagaagggtgacactgcgagcaacattggcaatgctatactgtatgaatgcatatgctgcatttcatccattttcccaaaccctaagatgctagtggctgcagctgaaacaacatcaaagtttctgaagagtgatagtcataatcttaagtacatgggcattgatgctcttggcaggttaataaaaataaatccagatattgcagaagagcaccagctggctgtcattgattgcttagaggacccagatgacactttgaagcgcaagacatttgagcttctttataagatgacaaagtcaacaaatgttgaggtgattgttgataggatgattgagtacatgatcaacataactgatcatcattacaagacagaaattgcatcacgttgtgtcgaactcgcagagcaatttgcgcctagcaatcagtggttcatccagaccatgaacagagtttttgagcatgctggagatcttgtcaacatcagagtggcacacaatttgatgcggctaattgctgaaggctttggagatgaggacgaaggtgctgacagtcagctaagatcatcggctgtagattcttatgtccgcattgtcggagagccaaagcttccttcttctttccttcagataatatgctgggtgttgggggaatatggaacagcagatggaaaacattcggcttcttatattattgggaaattgtgtgatgtggcagaggcccacctcactgatgacactgtcaaggcgtatgcaatctcagcaattctgaagatatttgcgtttgaaatcgctcttggaaggaggattgatttgctgcctgagtgtcaaacattggtagatgaattgttagcttcacattcaacagacctgcagcaacgggcatacgagctacatgctttactaggcttgggcaaaaatgatgttgaaagtgttatgcctgcagatgcaagctgtgaagatattgaggtcgacagaaacctctcatttctagacagttatgtgcagcaagccttggaaaacggtgcatcaccttacattccagagagtgaacgctctggtcttacaagtgttggcagctacagaagccaagaacaacaggaaacatctgcccatactcttagattcgaggcctatgagatgcctaaaccttctttgccactagcaacttcacaaaccagcatgtccacaccaaatactgaccttgttccagtttcagagccaggctactataaggaagaccatcaaacatcaaggcctcaaccaccaagcgatgcggtttctggtgagtttggtgtcaaactccgccttgatggggttcaaaagaaatggggaaggtcaacatattcctcttccacaccctcaagctcgatgtccagtcaacaaacaacaaatggggcctctcattctgatgggggagggccaagttcacagccacgggagtcctcatacggttcgaagagacagcagggcacagaagtctcagcagaaaagcaacggctggctgcttcgctttttggttcggcagcagctagagctgacaggaaagcacaagcttctcgaaagacagggaaggacagtccctcaactgagaaagtagctaccactaatgtggctgcccagtctgttaaggagcaagtaatcccagctgctgcaccaccgcctgatctgctggatctgggtgacgagacagttccatcgagccgtccatcggctgaccctttctcacagttggtgggtcttcttggaccagcatctgctgctccggcgctttctgggactccggctaccactaccagtacttccaaagcaccagatcttatgtcaatcttctcagatgatgtaccaactggagtgactagtagtgggtccaccgatcccactccaggtgatgctatttcggtgagctcccacaaaggagcgacggcagtggcaccaaagaagggctcgagccttcaagatgccttgcaaaaggactcgactgcacggcaagtaggtgtgacaccgacagggaacaaccccaatcttttcaaggacttgctaggctaaaggggacagtaaggcacaccgtatgctccgcgtggcctctttgggtagatggagttcatctccgacatgtctcgatcactgaaacagcgatgatctcgctgtttgatcagcgtaggaaaagggttgcaacttgcaagggctatatttgttctcgagtcacaagacacgacctgtcctccttccagttgggaggggggttgcgctgttgagatctgtgaatggttgcgggtatttttcctttaacctcttgtgattttgtgctgagactattgtacatgtgtttacatgacgtgtaatctgtacatgagaccgtggtacagaagcgtgtgccggcgcatttttgttcagctgggctagatacactacaattgctgggcactggaaagtaaaacaatgaaagaattggtgtcattctctggctggaataaaaatataaaacggtaaatgtgtagtgttgtttattgttgatgaaaacagtcgcagatttgtttttgcaacttttaactgttgagaagtaatgcaattctttttttttcggttccattcaaacctacttgctgcgtagggccatggcccatggggcattcagtattttctctcataaaaaggtctactactattcttttctggttctatttagtcgagatcgttgtttttgtctagggagtctctaggtggtcgatggagatctaacggcatcacttcatctgatttcttgcgtcatcgccttgtcgggtaatcgtagccggcagggaccag

SEQ ID NO: 74577 - DNA, 3464 bp, Zea Mays
taaagtattgttgggcttcctaggaaatgaatgttcaactttaatggacttgcattttaagatttgacttgttcatgacatatccatactccatcattatcactgttgtttctaaacataattaaaatactgatattagacagtaactaattcttagttttattattatgcaaacataggaatgagctcaccttataatgagcagctgtatccgaagttttcatgtcgtcatcagtatgtcactgtagataccacagcaactttggactgaatatgcatggacttccaaagatgaaaattttgcatgtgcagtacatttttacttacgttcttaatttcttgcaagctagaatgattattcttattttaatctctgcatggagcagtgaggttcctaatattgttggttcttgctgtgtagaggctatgtgataatgatccaggggtaatgggtgcaactctatgccccctctatgacctgatttcggaggaaccaaattcgtacaaggatttggttgttagtttcgttaacatcctcaaacaagttgctgagaggaggcttccgacttcctacgattatcaccaaatgcctgcaccatttattcagtggtgataaacaagcaagtggacatatgtacactgtattgggcgacatattcaagaagggtgacactgcgagcaacattggcaatgctatactgtatgaatgcatatgctgcatttcatccattttcccaaaccctaagatgctagtggctgcagctgaaacaacatcaaagtttctgaagagtgatagtcataatcttaagtacatgggcattgatgctcttggcaggttaataaaaataaatccagatattgcagaagagcaccagctggctgtcattgattgcttagaggacccagatgacactttgaagcgcaagacatttgagcttctttataagatgacaaagtcaacaaatgttgaggtgattgttgataggatgattgagtacatgatcaacataactgatcatcattacaagacagaaattgcatcacgttgtgtcgaactcgcagagcaatttgcgcctagcaatcagtggttcatccagaccatgaacagagtttttgagcatgctggagatcttgtcaacatcagagtggcacacaatttgatgcggctaattgctgaaggctttggagatgaggacgaaggtgctgacagtcagctaagatcatcggctgtagattcttatgtccgcattgtcggagagccaaagcttccttcttctttccttcagataatatgctgggtgttgggggaatatggaacagcagatggaaaacattcggcttcttatattattgggaaattgtgtgatgtggcagaggcccacctcactgatgacactgtcaaggcgtatgcaatctcagcaattctgaagatatttgcgtttgaaatcgctcttggaaggaggattgatttgctgcctgagtgtcaaacattggtagatgaattgttagcttcacattcaacagacctgcagcaacgggcatacgagctacatgctttactaggcttgggcaaaaatgatgttgaaagtgttatgcctgcagatgcaagctgtgaagatattgaggtcgacagaaacctctcatttctagacagttatgtgcagcaagccttggaaaacggtgcatcaccttacattccagagagtgaacgctctggtcttacaagtgttggcagctacagaagccaagaacaacaggaaacatctgcccatactcttagattcgaggcctatgagatgcctaaaccttctttgccactagcaacttcacaaaccagcatgtccacaccaaatactgaccttgttccagtttcagagccaggctactataaggaagaccatcaaacatcaaggcctcaaccaccaagcgatgcggtttctggtgagtttggtgtcaaactccgccttgatggggttcaaaagaaatggggaaggtcaacatattcctcttccacaccctcaagctcgatgtccagtcaacaaacaacaaatggggcctctcattctgatgggggagggccaagttcacagccacgggagtcctcatacggttcgaagagacagcagggcacagaagtctcagcagaaaagcaacggctggctgcttcgctttttggttcggcagcagctagagctgacaggaaagcacaagcttctcgaaagacagggaaggacagtccctcaactgagaaagtagctaccactaatgtggctgcccagtctgttaaggagcaagtaatcccagctgctgcaccaccgcctgatctgctggatctgggtgacgagacagttccatcgagccgtccatcggctgaccctttctcacagttggtgggtcttcttggaccagcatctgctgctccggcgctttctgggactccggctaccactaccagtacttccaaagcaccagatcttatgtcaatcttctcagatgatgtaccaactggagtgactagtagtgggtccaccgatcccactccaggtgatgctatttcggtgagctcccacaaaggagcgacggcagtggcaccaaagaagggctcgagccttcaagatgccttgcaaaaggactcgactgcacggcaagtaggtgtgacaccgacagggaacaaccccaatcttttcaaggacttgctaggctaaaggggacagtaaggcacaccgtatgctccgcgtggcctctttgggtagatggagttcatctccgacatgtctcgatcactgaaacagcgatgatctcgctgtttgatcagcgtaggaaaagggttgcaacttgcaagggctatatttgttctcgagtcacaagacacgacctgtcctccttccagttgggaggggggttgcgctgttgagatctgtgaatggttgcgggtatttttcctttaacctcttgtgattttgtgctgagactattgtacatgtgtttacatgacgtgtaatctgtacatgagaccgtggtacagaagcgtgtgccggcgcatttttgttcagctgggctagatacactacaattgctgggcactggaaagtaaaacaatgaaagaattggtgtcattctctggctggaataaaaatataaaacggtaaatgtgtagtgttgtttattgttgatgaaaacagtcgcagatttgtttttgcaacttttaactgttgagaagtaatgcaattctttttttttcggttccattcaaacctacttgctgcgtagggccatggcccatggggcattcagtattttctctcataaaaaggtctactactattcttttctggttctatttagtcgagatcgttgtttttgtctagggagtctctaggtggtcgatggagatctaacggcatcacttcatctgatttcttgcgtcatcgccttgtcgggtaatcgtagccggcagggaccag

SEQ ID NO: 74578 - DNA, 1886 bp, Zea Mays
ccgccaagagcatgaatttcattttacacacatttcacacatacgtggtcgacagaaacctctcatttctagacagttatgtgcagcaagccttggaaaacggtgcatcaccttacattccagagagtgaacgctctggtcttacaagtgttggcagctacagaagccaagaacaacaggaaacatctgcccatactcttagattcgaggcctatgagatgcctaaaccttctttgccactagcaacttcacaaaccagcatgtccacaccaaatactgaccttgttccagtttcagagccaggctactataaggaagaccatcaaacatcaaggcctcaaccaccaagcgatgcggtttctggtgagtttggtgtcaaactccgccttgatggggttcaaaagaaatggggaaggtcaacatattcctcttccacaccctcaagctcgatgtccagtcaacaaacaacaaatggggcctctcattctgatgggggagggccaagttcacagccacgggagtcctcatacggttcgaagagacagcagggcacagaagtctcagcagaaaagcaacggctggctgcttcgctttttggttcggcagcagctagagctgacaggaaagcacaagcttctcgaaagacagggaaggacagtccctcaactgagaaagtagctaccactaatgtggctgcccagtctgttaaggagcaagtaatcccagctgctgcaccaccgcctgatctgctggatctgggtgacgagacagttccatcgagccgtccatcggctgaccctttctcacagttggtgggtcttcttggaccagcatctgctgctccggcgctttctgggactccggctaccactaccagtacttccaaagcaccagatcttatgtcaatcttctcagatgatgtaccaactggagtgactagtagtgggtccaccgatcccactccaggtgatgctatttcggtgagctcccacaaaggagcgacggcagtggcaccaaagaagggctcgagccttcaagatgccttgcaaaaggactcgactgcacggcaagtaggtgtgacaccgacagggaacaaccccaatcttttcaaggacttgctaggctaaaggggacagtaaggcacaccgtatgctccgcgtggcctctttgggtagatggagttcatctccgacatgtctcgatcactgaaacagcgatgatctcgctgtttgatcagcgtaggaaaagggttgcaacttgcaagggctatatttgttctcgagtcacaagacacgacctgtcctccttccagttgggaggggggttgcgctgttgagatctgtgaatggttgcgggtatttttcctttaacctcttgtgattttgtgctgagactattgtacatgtgtttacatgacgtgtaatctgtacatgagaccgtggtacagaagcgtgtgccggcgcatttttgttcagctgggctagatacactacaattgctgggcactggaaagtaaaacaatgaaagaattggtgtcattctctggctggaataaaaatataaaacggtaaatgtgtagtgttgtttattgttgatgaaaacagtcgcagatttgtttttgcaacttttaactgttgagaagtaatgcaattctttttttttcggttccattcaaacctacttgctgcgtagggccatggcccatggggcattcagtattttctctcataaaaaggtctactactattcttttctggttctatttagtcgagatcgttgtttttgtctagggagtctctaggtggtcgatggagatctaacggcatcacttcatctgatttcttgcgtcatcgccttgtcgggtaatcgtagccggcagggaccag

SEQ ID NO: 74579 - DNA, 2367 bp, Zea Mays
ccagtgccacccagagccggcactcgcaatgtctacttgtctaccgtcgctgcgctagccctcctccctgcttcttgcttttgcctgagcctgcagcctgctgcaagcttttgctttggtttaggtgcttcttttccacccctttactgttccccccacttttgcttgctttgtcacgcacacgaaaagctcctgcctttaccttatctccgcacccgtagtgggatttggtgggagctgcgctgctcgcccctcgcgtttctttgctcaattgggggtcacggtcacggcccgcgggtgctgcgcgtgctcgtgggcgggcggaattcggggttcttgcgcggtcccggtcccctcggcgattgcggacgctctctgcagatcttcgcgtaactccgggagcgcgccggagatgaactgcgggccgcccgaccagctgccgccggggtcggcgccgtcgtgcttcctcaacctgaactgggaccagtctatggccgccgaccagctcgacccggcgctcagctcgatggtctcctccccggcgtccaactcgacggccgccgccgcggttactgacggccgcgctctccacgggatctctccgcagcagcagtacggaggcactccgctcagctcgccccccaagctcaacctgttccaccaaactcgcccccagttccaccacttcccgccgccgcaggtcggcggcctgccaatcctggagaacctgatgccgatgggccatctagaccagttcctcgccgacccaggcttcgccgagcgcgcggcgcggctgtccggcttcgacggccgccccggtggaagtggctatggaggcgtcggcgtcccgggacagtttggcatcccggacgccggccccatcggcgcattgaaggagctggagctcgggaacggccgggacgagtcgtcggtgtccgatccggcgtccggcagcgcggagatggcgctcaacaaggggccttccgacggcaatgcgaagaaacggaaggctagcgggaagggcaaaggcaaggacggccccgggtccgccgccgccggcgccgccaaggaggagtcgagtgggaagcggtgccgatcggcggacgagagcagtggcgcggaggacaacaaccccaccaccaagggcaaggccgcgcagagcagtagcgagaatggtggtggcaggaagcagcaggggaaggagagcgcgacgaagccccccgccgaggcgcccaaggactacatccatgtccgggcgcggcgcggcgaggcgacggacagccacagcctcgcggagagggtgagaagggagaagatcagccagcggatgaagctgctgcaggatctcgtgccgggttgcaacaaggtggtgggcaaggcagtgatgctggacgaaatcataaactacgtgcagtccctgcaacggcaagtcgagttcctgtccatgaaactggccaccgtgaacccgcagctggacttcaacagcctgcccaacctcctcctccctaaagacatacaccagccctgtgggccgccgcatttcccgctggagacctcaggcgctccgctgccgtacctgagccagcctcaccatgggagccctctaggctgctgcatggacacccaggggggctctatgcacccgctcgacgcggcgttctgccggccgatgaaccctcagcatcctttcctcaacggtgctagcgacgcggcgtctcaggtcgggactttctggcaagacgaccttcaaagcgtggttcacatggacatcggccaaagccaggagatcgctcccacctcttccaacagctacaacgacagtccacatgaaaatggagctttgaggcatggccggggaaaaagaaagaaagaaaaccccagtccgaagctcgacgccgtcgtcccccctgtacatacggagaagagaggacacagctcgcaccggaagcagcgggctcttggggggtccaatccaacctaacgacgttggcccctagcagtgtttcagcctctaattttccccacccccgcccaatggtgtgacgattctttctttgaacaagatgcggaagaccgccgcgccggcagctgctcgcaccatccccgtcgcctgtttcgtttcagctttagcaagatcccgccggcgcggtgcgtcccagactctcccccagtatattccttcccgatcagagaccccccgcacgtaatgtcatttgtattgccgtcatatttgtagctgatatatatatagtgtatatttaagatcgccatttctcgtcttctccctgtggggttggttctggaaatgaattctgccgagatgcgggacatggacagaaggaagaagaagcaggttgtgctgggagt

SEQ ID NO: 74580 - DNA, 408 bp, Zea Mays
tagttcaatcgaaactcgatcactcgttcaaatttatatagaaactgaataatcataattcgggatctctggtgaacaaaacagcatgatttgttatagaagcacagcgatttaattattctctctcagtctcagactcttgtctcctctatttatggaacagcctttcaaaaaaaaacatcgatctgcgcgcggcagcgcagagttcgtccatcttcactctctagtacgcttcgcttatacaaaacacacaagactttattcagcgtccatggtctccgagaagggtagaccagagatactacactacaccggcggtagcgccgcgcttacttggcgctgccggttgtactcggcgacggagaaccggccgagctcctgcacctcgccgtcgccctccacgtcccg

SEQ ID NO: 74581 - DNA, 2070 bp, Zea Mays
ctcctctctgttaattccggggagcaccagccaagctcctcccctgcggctcgcctccctcacggcgccgcctgctccccattgccgacctccactccagcacctgagcaagcgctcctgaggtcatcttccccatcttcctctagtgccggccgccaggtcatcttccccatcttcctctagtgccggccgccaggtcgtcttccccatccctcccatggcgccctcacctctgctcctcccagcgccctggctctgttcaaccttcacagtgagctcgccctcagccatggcggatgccgcctccacctcccccttggtgctcgccgagctcgccctcagccctgccgcgcccctgctttctgttcccagtgcgccctctgttctgttccaatcgttctccacgccgtgttcccccatggctccccttgcctctccggtcagcactagcccgaacggtacagcagcataccggtgccaaacccgtgtccgcgacgctcgccaagtgctcgatgaaataccgcagtgagctccacctcgacctgtgcagccccaacccgcgacgtcgcaacacccttgccctccgtcgatgtcgcgcttcgcccattgctcctcgacgaagagccagaaccgtgataaactacgcctatgctcgtgacactgaaacactatttgatattattagtgtgaagatgaacctctcaattgacaagcgatgcaggataaataatttgtccacaagcatgattgcattatcccaggtgcttatgaaagtttttaccttttcttcaatatgaagtctgaatgtgtggtttggcctgtctgatctatctagcaggtttagtggtactcgcatcagctaaaccttaaacttgttttcttcttaatgtaatataattatacatggttctactacttgtttgaaaaaaaacttaaacttatttctacatatggaatcactaaatggtcgtgttttccaataccaattgcagatcccttcgttttgataagtaaacatgagaccccttttgctaggatgtttgtatatcttctgttttaaactatattatgtaaacagtgcaagcgatgagtgaagggtgactaataggcttctttaatcagcactgcagtatcttttgttgaattaacctatactcactttattttatttatataatacagtccatttagctaattttgtttgatgtgcagtgacacgaccttgacagtcaagatgctcttttaggttattttctcctgaaaccacttcttttgccatctcctaatgttatggtcccattacatctccattcattgcaggagatggtcccaattaccttacatggttctgttggacacaatgaagccatccagatatgctattaaaaatcctgctagtcattatggctttaaattgtaccatgtatgttctattttcagctaggcagagcatgttctatttacagcaagccagcagacaccaggcagtaaggtgatgtatgagtcaattatcaggtgacaaaatggttatatttaattatgcatgttatcttcctggctctctatgttttttgaggaattcaactacttgtagtaccagtgtgtcactgatatgtatatatgtgttgatgttcgtcatccaagatcaaatacatcctgctaggtcattacttgctaatgtgcatttgattttgctgttgccaggatggaaatttttttggcagctttctcagtgaatcagtatcaccgcagaacctttttggacacccagatgtcgaaagatgcccattcgtgaggaatatcaatggagctacaaccttttcccctcacttctgctttgccagtagctgctcaaggaggcaagggtccaatttttgaggaagggtcaggctttgagtcagcattcaagcttttctatggccgagatggaatagtccccctttaagaaagatcatatgtatctgatgaaaaccacaatttagagtacacttatgtatgagttatttgacaatgcttatttatgagatattgaatgttatttatctatattatattaattatagtgttatt

SEQ ID NO: 74582 - DNA, 2011 bp, Zea Mays
ctctctgttaattccggggagcaccagccaagctcctcccctgcggctcgcctccctcacggcgccgcctgctccccattgccgacctccactccagcacctgagcaagcgctcctgaggtcatcttccccatcttcctctagtgccggccgccaggtcatcttccccatcttcctctagtgccggccgccaggtcgtcttccccatccctcccatggcgccctcacctctgctcctcccagcgccctggctctgttcaaccttcacagtgagctcgccctcagccatggcggatgccgcctccacctcccccttggtgctcgccgagctcgccctcagccctgccgcgcccctgctttctgttcccagtgcgccctctgttctgttccaatcgttctccacgccgtgttcccccatggctccccttgcctctccggtcagcactagcccgaacggtacagcagcataccggtgccaaacccgtgtccgcgacgctcgccaagtgctcgatgaaataccgcagtgagctccacctcgacctgtgcagccccaacccgcgacgtcgcaacacccttgataaactacgcctatgctcgtgacactgaaacactatttgatattattagtgtgaagatgaacctctcaattgacaagcgatgcaggataaataatttgtccacaagcatgattgcattatcccaggtgcttatgaaagtttttaccttttcttcaatatgaagtctgaatgtgtggtttggcctgtctgatctatctagcaggtttagtggtactcgcatcagctaaaccttaaacttgttttcttcttaatgtaatataattatacatggttctactacttgtttgaaaaaaaacttaaacttatttctacatatggaatcactaaatggtcgtgttttccaataccaattgcagatcccttcgttttgataagtaaacatgagaccccttttgctaggatgtttgtatatcttctgttttaaactatattatgtaaacagtgcaagcgatgagtgaagggtgactaataggcttctttaatcagcactgcagtatcttttgttgaattaacctatactcactttattttatttatataatacagtccatttagctaattttgtttgatgtgcagtgacacgaccttgacagtcaagatgctcttttaggttattttctcctgaaaccacttcttttgccatctcctaatgttatggtcccattacatctccattcattgcaggagatggtcccaattaccttacatggttctgttggacacaatgaagccatccagatatgctattaaaaatcctgctagtcattatggctttaaattgtaccatgtatgttctattttcagctaggcagagcatgttctatttacagcaagccagcagacaccaggcagtaaggtgatgtatgagtcaattatcaggtgacaaaatggttatatttaattatgcatgttatcttcctggctctctatgttttttgaggaattcaactacttgtagtaccagtgtgtcactgatatgtatatatgtgttgatgttcgtcatccaagatcaaatacatcctgctaggtcattacttgctaatgtgcatttgattttgctgttgccaggatggaaatttttttggcagctttctcagtgaatcagtatcaccgcagaacctttttggacacccagatgtcgaaagatgcccattcgtgaggaatatcaatggagctacaaccttttcccctcacttctgctttgccagtagctgctcaaggaggcaagggtccaatttttgaggaagggtcaggctttgagtcagcattcaagcttttctatggccgagatggaatagtccccctttaagaaagatcatatgtatctgatgaaaaccacaatttagagtacacttatgtatgagttatttgacaatgcttatttatgagatattgaatgttatttatctatattatattaattatagtgttatt

SEQ ID NO: 74583 - DNA, 1990 bp, Zea Mays
tagtcaaatgagattatgtaatatttgatgatgctctacttgctaggacaaatagtgtgatgtgttagctatgctagttaatccgatgaaatggattgtttggctaagttaaaatgagaatcaatcattagcaattataggagaattgtagtactttccttaagatttccaacaaattttggatcaccctttttggtgatctataaattaagttacagctgtttgagtttgaatatctgaatctgtcccaatttggaagcagagcctttctcatgttttttgaccttgatatatattaaattaacctgggatgttcataaatgaattttagagaattctattagttttctaaaaagtctaggatcacctgatttggatgtctgaaactccagttatgattttttgaagtaagtagtcgaattctgtccaaatctggacagaatttacgtttagcattgtttgaccattctaagtgtcaagtctcactgtgatgataatacaaaggttgtagaggacttcttaagctttctacaaagtcttagttcacgatttttggatgaatattttgtaagttatgagcaaaactgctgactgcgctgtccaaaatcagcaagtattaaaatggttgtttagagaagtcggtgctttgctcttgttgtcgtgttctatattgagtgatcggttagatcccgtagatgaatatcgatcgtttagattaataattctgaatagctatttatcgtggtccaaatcagttgaaggtaagcagcatcggttggtccgctttagttaaaatccaaaagctcttgcgaggtttccttaagctgttcctagtttggcatcaagtttgtctgtgttctctgctcctcctcccctcctgttccgtttgaaattggtcgtctcattttaccaggactcgctcttaaaagaagacttgccattatatgtcctactcagttagggaggaaaagaaggggaatgctggggccaactgccaagctagtcatgcattttgcctgtagtcaaggatggtgaaggtccaatcatgtgcatatcattggtttcctcttgttatgatgaagagatctggattcaatacttgatttttcatttgttttaaaatatttgttaattgttatggtgtatgtcaatggaatttgggcattggttgctttgactgtttcttggaatgcagataaactacgcctatgctcgtgacactgaaacactatttgatattattagtgtgaagatgaacctctcaattgacaagcgatgcaggataaataatttgtccacaagcatgattgcattatcccagtgacacgaccttgacagtcaagatgctcttttaggttattttctcctgaaaccacttcttttgccatctcctaatgttatggtcccattacatctccattcattgcaggagatggtcccaattaccttacatggttctgttggacacaatgaagccatccagatatgctattaaaaatcctgctagtcattatggctttaaattgtaccatgtatgttctattttcagctaggcagagcatgttctatttacagcaagccagcagacaccaggcagtaaggtgatgtatgagtcaattatcaggatggaaatttttttggcagctttctcagtgaatcagtatcaccgcagaacctttttggacacccagatgtcgaaagatgcccattcgtgaggaatatcaatggagctacaaccttttcccctcacttctgctttgccagtagctgctcaaggaggcaagggtccaatttttgaggaagggtcaggctttgagtcagcattcaagcttttctatggccgagatggaatagtccccctttaagaaagatcatatgtatctgatgaaaaccacaatttagagtacacttatgtatgagttatttgacaatgcttatttatgagatattgaatgttatttatctatattatattaattatagtgttatt

SEQ ID NO: 74584 - DNA, 2232 bp, Zea Mays
tagtcaaatgagattatgtaatatttgatgatgctctacttgctaggacaaatagtgtgatgtgttagctatgctagttaatccgatgaaatggattgtttggctaagttaaaatgagaatcaatcattagcaattataggagaattgtagtactttccttaagatttccaacaaattttggatcaccctttttggtgatctataaattaagttacagctgtttgagtttgaatatctgaatctgtcccaatttggaagcagagcctttctcatgttttttgaccttgatatatattaaattaacctgggatgttcataaatgaattttagagaattctattagttttctaaaaagtctaggatcacctgatttggatgtctgaaactccagttatgattttttgaagtaagtagtcgaattctgtccaaatctggacagaatttacgtttagcattgtttgaccattctaagtgtcaagtctcactgtgatgataatacaaaggttgtagaggacttcttaagctttctacaaagtcttagttcacgatttttggatgaatattttgtaagttatgagcaaaactgctgactgcgctgtccaaaatcagcaagtattaaaatggttgtttagagaagtcggtgctttgctcttgttgtcgtgttctatattgagtgatcggttagatcccgtagatgaatatcgatcgtttagattaataattctgaatagctatttatcgtggtccaaatcagttgaaggtaagcagcatcggttggtccgctttagttaaaatccaaaagctcttgcgaggtttccttaagctgttcctagtttggcatcaagtttgtctgtgttctctgctcctcctcccctcctgttccgtttgaaattggtcgtctcattttaccaggactcgctcttaaaagaagacttgccattatatgtcctactcagttagggaggaaaagaaggggaatgctggggccaactgccaagctagtcatgcattttgcctgtagtcaaggatggtgaaggtccaatcatgtgcatatcattgataaactacgcctatgctcgtgacactgaaacactatttgatattattagtgtgaagatgaacctctcaattgacaagcgatgcaggataaataatttgtccacaagcatgattgcattatcccaggtgcttatgaaagtttttaccttttcttcaatatgaagtctgaatgtgtggtttggcctgtctgatctatctagcaggtttagtggtactcgcatcagctaaaccttaaacttgttttcttcttaatgtaatataattatacatggttctactacttgtttgaaaaaaaacttaaacttatttctacatatggaatcactaaatggtcgtgttttccaataccaattgcagatcccttcgttttgataagtaaacatgagaccccttttgctaggatgtttgtatatcttctgttttaaactatattatgtaaacagtgcaagcgatgagtgaagggtgactaataggcttctttaatcagcactgcagtatcttttgttgaattaacctatactcactttattttatttatataatacagtccatttagctaattttgtttgatgtgcagtgacacgaccttgacagtcaagatgctcttttaggagatggtcccaattaccttacatggttctgttggacacaatgaagccatccagatatgctattaaaaatcctgctagtcattatggctttaaattgtaccatgtatgttctattttcagctaggcagagcatgttctatttacagcaagccagcagacaccaggcagtaaggtgatgtatgagtcaattatcaggatggaaatttttttggcagctttctcagtgaatcagtatcaccgcagaacctttttggacacccagatgtcgaaagatgcccattcgtgaggaatatcaatggagctacaaccttttcccctcacttctgctttgccagtagctgctcaaggaggcaagggtccaatttttgaggaagggtcaggctttgagtcagcattcaagcttttctatggccgagatggaatagtccccctttaagaaagatcatatgtatctgatgaaaaccacaatttagagtacacttatgtatgagttatttgacaatgcttatttatgagatattgaatgttatttatctatattatattaattatagtgttatt

SEQ ID NO: 74585 - DNA, 616 bp, Zea Mays
gagcaattgagccgatcaacattctccttgcatactttgacagtatgcccttgtttagaccctaatatcaaggcatgtgaaaatatcacgctaactatacttgctttaaggtcactgagcactttgtgggttaacttaatacaaggttttattgcactttttttaaaaaaaaacattagttccattccttgtttctattctaaggttcttctagtgatattacaggagtaatcttggaggcaagtggttggcattttctccttctaatgttttcgttgcatacatgtgtaaaagaataaaaaagtaccgcaagcctttgaatcttgagaaccctgcagaacactacttagctacagttaagagagagagagagagagagagagagagagagagaggtaccttgatgaccttcggcaaaattatatgcttagtagtcaattcttggtgaggaaattgcaccacataatcagcatcttcaactcaaattagattgaaatgagtgaataagcagtgaaagcaaacaaaaagcaagggccaaaagaaagaagggactagtctcgtgcaaggaaagaggaaataaacaagtcagggtttgtgtgtaaggaggggaagggcc

SEQ ID NO: 74586 - DNA, 618 bp, Zea Mays
ctttgggcgctcgcttttcctcgaccgcttttctctgaacagtttgggtacgtgtgcccccgcattctcttcggccggctatgtatagatgagcgaccccctgctacccaattccaacactcaggcaacccagctttggctgcccttgcttgctgctcagttctttgccccctgttcctcctcctcctcttttcgcacctcggcgcctgcttcggcatcaactgcgaccgagatggaggcgcaagacgactgcaagtggcgccaagtcccggcgttcggcgactggaacctgtgggacgacatgcccgtcacccagtactttcaggcagggaccttcttcttcgccgcgccgacgacagagaaggacgacgacgaggatctcttcaaggtgccccagttccctgccacgccctacagctacaagaagtgcgttgttcgagtgaagggggagaaaggaactgctgtgcctccggcggcgaggaagggaggaaggaggcgccgcgtgaacgagcaacagaagtggaagcccaagggagctgtggacgaggacctctacaagatatccccgcagcttctctgcaagcaagtggagctttgccaaagatcatgagcaataaa

SEQ ID NO: 74587 - DNA, 678 bp, Zea Mays
gaccgcttttctctgaacagtttgggtacgtgtgcccccgcattctcttcggccggctatgtatagatgagcgaccccctgctacccaattccaacactcaggcaacccagctttggctgcccttgcttgctgctcagttctttgccccctgttcctcctcctcctcttttcgcacctcggcgcctgcttcggcatcaactgcgaccgagatggaggcgcaagacgactgcaagtggcgccaagtcccggcgttcggcgactggaacctgtgggacgacatgcccgtcacccagtactttcaggcagggaccttcttcttcgccgcgccgacgacagagaaggacgacgacgaggatctcttcaaggtgccccagttccctgccacgccctacagctacaagaagtgcgttgttcgagtgaagggggagaaaggaactgctgtgcctccggcggcgaggaagggaggaaggaggcgccgcgtgaacgagcaacagaagtggaagcccaagggagctgtggacgaggacctctacaagatatccccgcagcttctctgcaagaagaagctcctgaggaatctgctgggagggtgcctgggcctgagctgcatcgcatgaccgagagacgcatcgcttaataagtttctggggagtttgttcggtaaaaaaaaaacaaaa

SEQ ID NO: 74588 - DNA, 1257 bp, Zea Mays
ctacattggttttttgtgttgacgcatagggcgaacagattggtttttttttgtgttgacgcattatgatttgacgacgtaatccatttctacagactacagaccacaagttagccgaccccgactgtcattcgcgagcaccgccgccgctcgccagaatgacacttcgggtgatcctctcccgcctgcgcctcacccctctcatccacgacggccaccacctgcgacgctctctatccgccgccgctgccaaactacctgacgagttgcctcctggcgcgccggcgccaacctccgactccaggctcttcgtcgcagggctgtcgtggtccgtggacgagcgctccctcacggacgccttctcctccttcggcaccgtcaccgaagatggtgcacagtgtaggtcttcggctaaatgccgtggaggccgtgagccactccatcgcccccaggcctgcagcctgttcgacgaaattcctgttagggacgtggtcacctgctcagctgcaatttaccgacatgcgaggagcgggctgttccatgagtcagctgagctgtttgttggcatgatgagggcagttagaataatgtatgacaaaaactctggaaggtcaagaggctttggatttgttcatttctcaaatgataatgaagctaagtgtgccaaggatgctatggatgggaaggtaatgctagggcggccattgcgaataagttttgcccttggaagagttcgtggcgcatcagttattgttcctcgactttctacggtgaaatgagcagaagcattggtcgtggcatactggcatggaccgatggacatatcaggagggttgcgaagtacccatataggctagtgtttttaatcttgcaaggtagggatcttagtcgaaggcgcctggcaatggcgtgaagggcagcgtggcaaagaagatgatggctatgtttgtcgccccaatttgctcgatgttgaagcatttcacgaggtgcattgtagctttgcagccacctcgtgtgaggccgccttttcgaatgtctcgtttgatgtgtgtgagtgagagagagagactcttcttgaattgattcatgtcaaatgtatccagtaggggcttttcgccccctcctgtttcataaaaaaaaatcatgtaaactgtaaatttgtggtggcaaccgtcactacgcactagtacaacgcagttaaactgtcttcgattcttcatgtcgaagtgaagcatagctacatccgatttttaggat

SEQ ID NO: 74589 - DNA, 1222 bp, Zea Mays
tgacgacgtaatccatttctacagactacagaccacaagttagccgaccccgactgtcattcgcgagcaccgccgccgctcgccagaatgacacttcgggtgatcctctcccgcctgcgcctcacccctctcatccacgacggccaccacctgcgacgctctctatccgccgccgctgccaaactacctgacgagttgcctcctggcgcgccggcgccaacctccgactccaggctcttcgtcgcagggctgtcgtggtccgtggacgagcgctccctcacggacgccttctcctccttcggcaccgtcaccgaagatggtgcacagtgtaggtcttcggctaaatgccgtggaggccgtgagccactccatcgcccccaggcctgcagcctgttcgacgaaattcctgttagggacgtggtcacctgctcagctgcaatttaccgacatgcgaggagcgggctgttccatgagtcagctgagctgtttgttggcatgatgagggcagttagaataatgtatgacaaaaactctggaaggtcaagaggctttggatttgttcatttctcaaatgataatgaagctaagtgtgccaaggatgctatggatgggaagttggaaatgaagcatggaccggtattaattctacaggtaatgctagggcggccattgcgaataagttttgcccttggaagagttcgtggcgcatcagttattgttcctcgactttctacggtgaaatgagcagaagcattggtcgtggcatactggcatggaccgatggacatatcaggagggttgcgaagtacccatataggctagtgtttttaatcttgcaaggtagggatcttagtcgaaggcgcctggcaatggcgtgaagggcagcgtggcaaagaagatgatggctatgtttgtcgccccaatttgctcgatgttgaagcatttcacgaggtgcattgtagctttgcagccacctcgtgtgaggccgccttttcgaatgtctcgtttgatgtgtgtgagtgagagagagagactcttcttgaattgattcatgtcaaatgtatccagtaggggcttttcgccccctcctgtttcataaaaaaaaatcatgtaaactgtaaatttgtggtggcaaccgtcactacgcactagtacaacgcagttaaactgtcttcgattcttcatgtcgaagtgaagcatagctacatccgatttttaggat

SEQ ID NO: 74590 - DNA, 1142 bp, Zea Mays
cagaccacaagttagccgaccccgactgtcattcgcgagcaccgccgccgctcgccagaatgacacttcgggtgatcctctcccgcctgcgcctcacccctctcatccacgacggccaccacctgcgacgctctctatccgccgccgctgccaaactacctgacgagttgcctcctggcgcgccggcgccaacctccgactccaggctcttcgtcgcagggctgtcgtggtccgtggacgagcgctccctcacggacgccttctcctccttcggcaccgtcaccgaaggtcttcggctaaatgccgtggaggccgtgagccactccatcgcccccaggcctgcagcctgttcgacgaaattcctgttagggacgtggtcacctgctcagctgcaatttaccgacatgcgaggagcgggctgttccatgagtcagctgagctgtttgttggcatgatgagggcagttagaataatgtatgacaaaaactctggaaggtcaagaggctttggatttgttcatttctcaaatgataatgaagctaagtgtgccaaggatgctatggatgggaaggtaatgctagggcggccattgcgaataagttttgcccttggaagagttcgtggcgcatcagttattgttcctcgactttctacggtgaaatgagcagaagcattggtcgtggcatactggcatggaccgatggacatatcaggagggttgcgaagtacccatataggctagtgtttttaatcttgcaaggtagggatcttagtcgaaggcgcctggcaatggcgtgaagggcagcgtggcaaagaagatgatggctatgtttgtcgccccaatttgctcgatgttgaagcatttcacgaggtgcattgtagctttgcagccacctcgtgtgaggccgccttttcgaatgtctcgtttgatgtgtgtgagtgagagagagagactcttcttgaattgattcatgtcaaatgtatccagtaggggcttttcgccccctcctgtttcataaaaaaaaatcatgtaaactgtaaatttgtggtggcaaccgtcactacgcactagtacaacgcagttaaactgtcttcgattcttcatgtcgaagtgaagcatagctacatccgatttttaggat

SEQ ID NO: 74591 - DNA, 770 bp, Zea Mays
cacaagttagccgaccccgactgtcattcgcgagcaccgccgccgctcgccagaatgacacttcgggtgatcctctcccgcctgcgcctcacccctctcatccacgacggccaccacctgcgacgctctctatccgccgccgctgccaaactacctgacgagttgcctcctggcgcgccggcgccaacctccgactccaggctcttcgtcgcagggctgtcgtggtccgtggacgagcgctccctcacggacgccttctcctccttcggcaccgtcaccgaaggtgaaatgagcagaagcattggtcgtggcatactggcatggaccgatggacatatcaggagggttgcgaagtacccatataggctagtgtttttaatcttgcaaggtagggatcttagtcgaaggcgcctggcaatggcgtgaagggcagcgtggcaaagaagatgatggctatgtttgtcgccccaatttgctcgatgttgaagcatttcacgaggtgcattgtagctttgcagccacctcgtgtgaggccgccttttcgaatgtctcgtttgatgtgtgtgagtgagagagagagactcttcttgaattgattcatgtcaaatgtatccagtaggggcttttcgccccctcctgtttcataaaaaaaaatcatgtaaactgtaaatttgtggtggcaaccgtcactacgcactagtacaacgcagttaaactgtcttcgattcttcatgtcgaagtgaagcatagctacatccgatttttaggat

SEQ ID NO: 74592 - DNA, 980 bp, Zea Mays
gttagccgaccccgactgtcattcgcgagcaccgccgccgctcgccagaatgacacttcgggtgatcctctcccgcctgcgcctcacccctctcatccacgacggccaccacctgcgacgctctctatccgccgccgctgccaaactacctgacgagttgcctcctggcgcgccggcgccaacctccgactccaggctcttcgtcgcagggctgtcgtggtccgtggacgagcgctccctcacggacgccttctcctccttcggcaccgtcaccgaagttagaataatgtatgacaaaaactctggaaggtcaagaggctttggatttgttcatttctcaaatgataatgaagctaagtgtgccaaggatgctatggatgggaagcatggaccggtattaattctacaggtaatgctagggcggccattgcgaataagttttgcccttggaagagttcgtggcgcatcagttattgttcctcgactttctacggtgaaatgagcagaagcattggtcgtggcatactggcatggaccgatggacatatcaggagggttgcgaagtacccatataggctagtgtttttaatcttgcaaggtagggatcttagtcgaaggcgcctggcaatggcgtgaagggcagcgtggcaaagaagatgatggctatgtttgtcgccccaatttgctcgatgttgaagcatttcacgaggtgcattgtagctttgcagccacctcgtgtgaggccgccttttcgaatgtctcgtttgatgtgtgtgagtgagagagagagactcttcttgaattgattcatgtcaaatgtatccagtaggggcttttcgccccctcctgtttcataaaaaaaaatcatgtaaactgtaaatttgtggtggcaaccgtcactacgcactagtacaacgcagttaaactgtcttcgattcttcatgtcgaagtgaagcatagctacatccgatttttaggat

SEQ ID NO: 74593 - DNA, 1172 bp, Zea Mays
gttagccgaccccgactgtcattcgcgagcaccgccgccgctcgccagaatgacacttcgggtgatcctctcccgcctgcgcctcacccctctcatccacgacggccaccacctgcgacgctctctatccgccgccgctgccaaactacctgacgagttgcctcctggcgcgccggcgccaacctccgactccaggctcttcgtcgcagggctgtcgtggtccgtggacgagcgctccctcacggacgccttctcctccttcggcaccgtcaccgaagatggtgcacagtgtaggtcttcggctaaatgccgtggaggccgtgagccactccatcgcccccaggcctgcagcctgttcgacgaaattcctgttagggacgtggtcacctgctcagctgcaatttaccgacatgcgaggagcgggctgttccatgagtcagctgagctgtttgttggcatgatgagggcagttagaataatgtatgacaaaaactctggaaggtcaagaggctttggatttgttcatttctcaaatgataatgaagctaagtgtgccaaggatgctatggatgggaagcatggaccggtattaattctacaggtaatgctagggcggccattgcgaataagttttgcccttggaagagttcgtggcgcatcagttattgttcctcgactttctacggtgaaatgagcagaagcattggtcgtggcatactggcatggaccgatggacatatcaggagggttgcgaagtacccatataggctagtgtttttaatcttgcaaggtagggatcttagtcgaaggcgcctggcaatggcgtgaagggcagcgtggcaaagaagatgatggctatgtttgtcgccccaatttgctcgatgttgaagcatttcacgaggtgcattgtagctttgcagccacctcgtgtgaggccgccttttcgaatgtctcgtttgatgtgtgtgagtgagagagagagactcttcttgaattgattcatgtcaaatgtatccagtaggggcttttcgccccctcctgtttcataaaaaaaaatcatgtaaactgtaaatttgtggtggcaaccgtcactacgcactagtacaacgcagttaaactgtcttcgattcttcatgtcgaagtgaagcatagctacatccgatttttaggat

SEQ ID NO: 74594 - DNA, 946 bp, Zea Mays
gttagccgaccccgactgtcattcgcgagcaccgccgccgctcgccagaatgacacttcgggtgatcctctcccgcctgcgcctcacccctctcatccacgacggccaccacctgcgacgctctctatccgccgccgctgccaaactacctgacgagttgcctcctggcgcgccggcgccaacctccgactccaggctcttcgtcgcagggctgtcgtggtccgtggacgagcgctccctcacggacgccttctcctccttcggcaccgtcaccgaagttagaataatgtatgacaaaaactctggaaggtcaagaggctttggatttgttcatttctcaaatgataatgaagctaagtgtgccaaggatgctatggatgggaagggcggccattgcgaataagttttgcccttggaagagttcgtggcgcatcagttattgttcctcgactttctacggtgaaatgagcagaagcattggtcgtggcatactggcatggaccgatggacatatcaggagggttgcgaagtacccatataggctagtgtttttaatcttgcaaggtagggatcttagtcgaaggcgcctggcaatggcgtgaagggcagcgtggcaaagaagatgatggctatgtttgtcgccccaatttgctcgatgttgaagcatttcacgaggtgcattgtagctttgcagccacctcgtgtgaggccgccttttcgaatgtctcgtttgatgtgtgtgagtgagagagagagactcttcttgaattgattcatgtcaaatgtatccagtaggggcttttcgccccctcctgtttcataaaaaaaaatcatgtaaactgtaaatttgtggtggcaaccgtcactacgcactagtacaacgcagttaaactgtcttcgattcttcatgtcgaagtgaagcatagctacatccgatttttaggat

SEQ ID NO: 74595 - DNA, 625 bp, Zea Mays
atcgcccccaggcctgcagcctgttcgacgaaattcctgttagggacgtggtcacctgctcagctgcaatttaccgacatgcgaggagcgggctgttccatgagtcagctgagctgtttgttggcatgatgagggcaggtgaaatgagcagaagcattggtcgtggcatactggcatggaccgatggacatatcaggagggttgcgaagtacccatataggctagtgtttttaatcttgcaaggtagggatcttagtcgaaggcgcctggcaatggcgtgaagggcagcgtggcaaagaagatgatggctatgtttgtcgccccaatttgctcgatgttgaagcatttcacgaggtgcattgtagctttgcagccacctcgtgtgaggccgccttttcgaatgtctcgtttgatgtgtgtgagtgagagagagagactcttcttgaattgattcatgtcaaatgtatccagtaggggcttttcgccccctcctgtttcataaaaaaaaatcatgtaaactgtaaatttgtggtggcaaccgtcactacgcactagtacaacgcagttaaactgtcttcgattcttcatgtcgaagtgaagcatagctacatccgatttttaggat

SEQ ID NO: 74596 - DNA, 735 bp, Zea Mays
gtgcacttctgggtgatgcaaggagaggaaaaatggttcacaaccaaatgatcaccgttagaataatgtatgacaaaaactctggaaggtcaagaggctttggatttgttcatttctcaaatgataatgaagctaagtgtgccaaggatgctatggatgggaaggtaatgctagggcggccattgcgaataagttttgcccttggaagagttcgtggcgcatcagttattgttcctcgactttctacggtgaaatgagcagaagcattggtcgtggcatactggcatggaccgatggacatatcaggagggttgcgaagtacccatataggctagtgtttttaatcttgcaaggtagggatcttagtcgaaggcgcctggcaatggcgtgaagggcagcgtggcaaagaagatgatggctatgtttgtcgccccaatttgctcgatgttgaagcatttcacgaggtgcattgtagctttgcagccacctcgtgtgaggccgccttttcgaatgtctcgtttgatgtgtgtgagtgagagagagagactcttcttgaattgattcatgtcaaatgtatccagtaggggcttttcgccccctcctgtttcataaaaaaaaatcatgtaaactgtaaatttgtggtggcaaccgtcactacgcactagtacaacgcagttaaactgtcttcgattcttcatgtcgaagtgaagcatagctacatccgatttttaggat

SEQ ID NO: 74597 - DNA, 1867 bp, Zea Mays
cactatgtattccaaatgcaaggatttaagttctgctagagtgttgtttgatggaatgaggaagaaaagtttagtttcttggactgcaatggtgtctgggtatataggaagtggaagagccctagaggggatgcttctatttggtaagatgagacatgagaataattttgtgattgattctgtggcattagtcagcttattgactggatgctacgagactgctaagtttgatctatgtgttcaacttcatgggtatagctacaagtcaggtttatatctttatagacctgtccctaataccttcatagcagtttatggtaagtgtggatatgccattttagctcataaagtatttgatgacatgatttctcgagatgttgtttcatggaataccctgatattatcctatggtataaatggccaaggagagcaagcagtagcactttttaatgacatggaggaatctagtgaaaagcgagacagtgtaacatacttgaatgcaatgctggcgtgcagccattctggacaagttgatgatgggttgatcatattcaggagaatgattattgagaagcgtgtaaatccttgccaggagcacatcggatgcctagtagatatgttggcaagagctggtcgcttggatgaagcagccgaagtggctagcttgactagcaatgagggagcaaatccttggaaggctttgatgggaggaggtcacctgtatagtcagacagaattaactgaagttgctgctgagaaagtgctgaatgcggactcatttgataacggccatgtggtgttactttctaacacttgtgcatcggctggaaagtatagtgatgctgaatctatccgatcctgttattcgaaacaaacacgaaagaaaattctagggcttagttccattgagattatgctatccagcacaagataggcactatatttctcacaatggaaggggaaagatgcatgagacaattgccatacactatctgtctatctcaaagtattggagatctgttttaggcatgaaagatggaattttactttgcagactgcaaggttcactgattaaaagagaaacctcaagaatgaggtttcagatagcacatttgatgcattgggaaattgcatcagtctttatattgtggtagactaagtttctagtaattcaggagccttatatcaattagaataatgtatgacaaaaactctggaaggtcaagaggctttggatttgttcatttctcaaatgataatgaagctaagtgtgccaaggatgctatggatgggaaggtaatgctagggcggccattgcgaataagttttgcccttggaagagttcgtggcgcatcagttattgttcctcgactttctacggtgaaatgagcagaagcattggtcgtggcatactggcatggaccgatggacatatcaggagggttgcgaagtacccatataggctagtgtttttaatcttgcaaggtagggatcttagtcgaaggcgcctggcaatggcgtgaagggcagcgtggcaaagaagatgatggctatgtttgtcgccccaatttgctcgatgttgaagcatttcacgaggtgcattgtagctttgcagccacctcgtgtgaggccgccttttcgaatgtctcgtttgatgtgtgtgagtgagagagagagactcttcttgaattgattcatgtcaaatgtatccagtaggggcttttcgccccctcctgtttcataaaaaaaaatcatgtaaactgtaaatttgtggtggcaaccgtcactacgcactagtacaacgcagttaaactgtcttcgattcttcatgtcgaagtgaagcatagctacatccgatttttaggat

SEQ ID NO: 74598 - DNA, 1155 bp, Zea Mays
gatgggaggaggtcacctgtatagtcagacagaattaactgaagttgctgctgagaaagtgctgaatgcggactcatttgataacggccatgtggtgttactttctaacacttgtgcatcggctggaaagtatagtgatgctgaatctatccgatcctgttattcgaaacaaacacgaaagaaaattctagggcttagttccattgagattatgctatccagcacaagataggcactatatttctcacaatggaaggggaaagatgcatgagacaattgccatacactatctgtctatctcaaagtattggagatctgttttaggcatgaaagatggaattttactttgcagactgcaaggttcactgattaaaagagaaacctcaagaatgaggtttcagatagcacatttgatgcattgggaaattgcatcagtctttatattgtggtagactaagtttctagtaattcaggagccttatatcaattagaataatgtatgacaaaaactctggaaggtcaagaggctttggatttgttcatttctcaaatgataatgaagctaagtgtgccaaggatgctatggatgggaagggcggccattgcgaataagttttgcccttggaagagttcgtggcgcatcagttattgttcctcgactttctacggtgaaatgagcagaagcattggtcgtggcatactggcatggaccgatggacatatcaggagggttgcgaagtacccatataggctagtgtttttaatcttgcaaggtagggatcttagtcgaaggcgcctggcaatggcgtgaagggcagcgtggcaaagaagatgatggctatgtttgtcgccccaatttgctcgatgttgaagcatttcacgaggtgcattgtagctttgcagccacctcgtgtgaggccgccttttcgaatgtctcgtttgatgtgtgtgagtgagagagagagactcttcttgaattgattcatgtcaaatgtatccagtaggggcttttcgccccctcctgtttcataaaaaaaaatcatgtaaactgtaaatttgtggtggcaaccgtcactacgcactagtacaacgcagttaaactgtcttcgattcttcatgtcgaagtgaagcatagctacatccgatttttaggat

SEQ ID NO: 74599 - DNA, 854 bp, Zea Mays
ggaattttactttgcagactgcaaggttcactgattaaaagagaaacctcaagaatgaggtttcagatagcacatttgatgcattgggaaattgcatcagtctttatattgtggtagactaagtttctagtaattcaggagccttatatcaattagaataatgtatgacaaaaactctggaaggtcaagaggctttggatttgttcatttctcaaatgataatgaagctaagtgtgccaaggatgctatggatgggaagcatggaccggtattaattctacaggtaatgctagggcggccattgcgaataagttttgcccttggaagagttcgtggcgcatcagttattgttcctcgactttctacggtgaaatgagcagaagcattggtcgtggcatactggcatggaccgatggacatatcaggagggttgcgaagtacccatataggctagtgtttttaatcttgcaaggtagggatcttagtcgaaggcgcctggcaatggcgtgaagggcagcgtggcaaagaagatgatggctatgtttgtcgccccaatttgctcgatgttgaagcatttcacgaggtgcattgtagctttgcagccacctcgtgtgaggccgccttttcgaatgtctcgtttgatgtgtgtgagtgagagagagagactcttcttgaattgattcatgtcaaatgtatccagtaggggcttttcgccccctcctgtttcataaaaaaaaatcatgtaaactgtaaatttgtggtggcaaccgtcactacgcactagtacaacgcagttaaactgtcttcgattcttcatgtcgaagtgaagcatagctacatccgatttttaggat

SEQ ID NO: 74600 - DNA, 242 bp, Zea Mays
tacgaattaaaccaagcgaacagttgaaaggcgcgctataactagacattcggggaaaaaaaactcaccagtcaaccagtcagataaaaagaaaaacatgtctgactttggttgtgcggtggctatactcttttggttatcggaaaaccaaattagagaagttccttcggtttttcctactgagcactaactttacagagtgatagattcaaacgaattttgtaatttcacaaaaccgcctc

SEQ ID NO: 74601 - DNA, 154 bp, Zea Mays
tgcgtattcgactcgtataatgaaagaaattgttccatacttcaatggatacaaaagggtctattctttgcgactattcttttccttgccaaaacaggctgccgcccgcaccatactccagggaattacattatcttctgtcaaaaataaataa

SEQ ID NO: 74602 - DNA, 1942 bp, Zea Mays
caccagtacaccacgcgacgcaaacaacagagctgccagcctgccactgaggagtgaggaaccctaagcggcgcactgtgcaggcgaaggcggcgcgctaccggcgacggccgacgggggatacggcgacatcgtccccctcgacccctcctccatccccgacgcggcggcgccagactgcaggtgttgaatgctgatttgttgtggcctgttgcgtcttcaccagttcatacattaaacttgaagaaccacgtggttgaagaaaagcccactgaaaatgagtaatacatcatcttcgtcaagtggtgagcgtgctatgcagtgacagaggggatgtgatatatgctgatattccaaagctcattccatttattgatctgttgggctgttccctccctaaaccccagcgtcgcctccgacgagtcaccgctccgtcggctgcttgctgcagtccacgccacgcgctacgccgtcacggtcgctcctcccgtgacgcagccgtcgctaggcgccgcctatttctcggacaaagtcgctcgccaccatggcggcagcgtcggctgccgcagaagccagcggcgagagtaaaaacgaattcctcatacgcgacgacgcgccagggctactcgccgctctcaaggagatgaaggacggactggacctcgtcaggggcaaggtcgaggccatcacgcggaaggtcaaggcgaaccagttgccggcggccaacgggatcgggtacctagaagcgaagaaccacctgctccttggctattgccaggacatcgtctactacctgctccgcaaggccaaggggctctcggtggatggccaccccgtcgtacggagccttgtcgagattaggctgtttctggagaagattcgtccgattgacaagaaggcagagtaccaaatccagaagctcaccgatgccgctgacaatgccactgttcgagagaaaccaggaaatgcacaggcgaaggggaaggacgggcattcggatgaggaagacctcctgaagtataggccaaacccagatatgatggacacaaagcctggtcctgatgggcaggatactgatggtgtttaccgtcctccgaaatttatgcctactagcatggatgatgaagagaaacgtcgtaaaaatgattcaaggagagataaagcgatagcccgagtggcaatagaaaacccttatattaaagagataattgatgatgctgcagacagacctgaagagtggaaggaaacagtgggcgatgaaagcagagaatttgggaggtacatgcgacagagagaagagcaagagaagcaggaagaggagttgttcactcgggctcctgtaaccaaacgtgataagcagatcgagaagcgcataaggagacaacttcatgggctaggaggcttaactgacggtttcgaccttgggatgaacatgctgttgggaggagacaaggaagatgatggcggttcaagcaagtcgcatggcaagagcggaaaccgaaagaagcacctgaagagcagcaagaagaggaagaggcattagccttggacccacactgctgtagcacttcaacataccgatacagcctagagacggttcaagcaatccacacggaaagttgaagctggagaaaatacaagaaaccaagtagagaaaaaaagctttggttcctgtaggcgtattatttctgaaacagaaaacttgatctgagcgactgatcctgagccaatggaacagtatgaattatatggcttgaacatggtaggtgtaccaagttttgttctgatagtcgaatgattgttgtattattgattaacaagaccaacaatatatagactaggctccaaccggttcatagaaacagtgcccggtagagatggacggtgatcacctgattagtaccttctaagtatagtcatgcactagagatggaaggtgatc

SEQ ID NO: 74603 - DNA, 1975 bp, Zea Mays
caccagtacaccacgcgacgcaaacaacagagctgccagcctgccactgaggagtgaggaaccctaagcggcgcactgtgcaggcgaaggcggcgcgctaccggcgacggccgacgggggatacggcgacatcgtccccctcgacccctcctccatccccgacgcggcggcgccagactgcaggtgttgaatgctgatttgttgtggcctgttgcgtcttcaccagttcatacattaaacttgaagaaccacgtggttgaagaaaagcccactgaaaatgagtaatacatcatcttcgtcaagtggtgagcgtgctatgcagtgacagagggctgtggagatcataaggatgtgatatatgctgatattccaaagctcattccatttattgatctgccgtgccaatttgccagttgggctgttccctccctaaaccccagcgtcgcctccgacgagtcaccgctccgtcggctgcttgctgcagtccacgccacgcgctacgccgtcacggtcgctcctcccgtgacgcagccgtcgctaggcgccgcctatttctcggacaaagtcgctcgccaccatggcggcagcgtcggctgccgcagaagccagcggcgagagtaaaaacgaattcctcatacgcgacgacgcgccagggctactcgccgctctcaaggagatgaaggacggactggacctcgtcaggggcaaggtcgaggccatcacgcggaaggtcaaggcgaaccagttgccggcggccaacgggatcgggtacctagaagcgaagaaccacctgctccttggctattgccaggacatcgtctactacctgctccgcaaggccaaggggctctcggtggatggccaccccgtcgtacggagccttgtcgagattaggctgtttctggagaagattcgtccgattgacaagaaggcagagtaccaaatccagaagctcaccgatgccgctgacaatgccactgttcgagagaaaccaggaaatgcacaggcgaaggggaaggacgggcattcggatgaggaagacctcctgaagtataggccaaacccagatatgatggacacaaagcctggtcctgatgggcaggatactgatggtgtttaccgtcctccgaaatttatgcctactagcatggatgatgaagagaaacgtcgtaaaaatgattcaaggagagataaagcgatagcccgagtggcaatagaaaacccttatattaaagagataattgatgatgctgcagacagacctgaagagtggaaggaaacagtgggcgatgaaagcagagaatttgggaggtacatgcgacagagagaagagcaagagaagcaggaagaggagttgttcactcgggctcctgtaaccaaacgtgataagcagatcgagaagcgcataaggagacaacttcatgggctaggaggcttaactgacggtttcgaccttgggatgaacatgctgttgggaggagacaaggaagatgatggcggttcaagcaagtcgcatggcaagagcggaaaccgaaagaagcacctgaagagcagcaagaagaggaagaggcattagccttggacccacactgctgtagcacttcaacataccgatacagcctagagacggttcaagcaatccacacggaaagttgaagctggagaaaatacaagaaaccaagtagagaaaaaaagctttggttcctgtaggcgtattatttctgaaacagaaaacttgatctgagcgactgatcctgagccaatggaacagtatgaattatatggcttgaacatggtaggtgtaccaagttttgttctgatagtcgaatgattgttgtattattgattaacaagaccaacaatatatagactaggctccaaccggttcatagaaacagtgcccggtagagatggacggtgatcacctgattagtaccttctaagtatagtcatgcactagagatggaaggtgatc

SEQ ID NO: 74604 - DNA, 1837 bp, Zea Mays
caccacgcgacgcaaacaacagagctgccagcctgccactgaggagtgaggaaccctaagcggcgcactgtgcaggcgaaggcggcgcgctaccggcgacggccgacgggggatacggcgacatcgtccccctcgacccctcctccatccccgacgcggcggcgccagactgcaggtgttgaatgctgatttgttgtggcctgttgcgtcttcaccagttcatacattaaacttgaagaaccacgtggttgaagaaaagcccactgaaaatgagtaatacatcatcttcgtcaagtgggatgtgatatatgctgatattccaaagctcattccatttattgatctgtccacgccacgcgctacgccgtcacggtcgctcctcccgtgacgcagccgtcgctaggcgccgcctatttctcggacaaagtcgctcgccaccatggcggcagcgtcggctgccgcagaagccagcggcgagagtaaaaacgaattcctcatacgcgacgacgcgccagggctactcgccgctctcaaggagatgaaggacggactggacctcgtcaggggcaaggtcgaggccatcacgcggaaggtcaaggcgaaccagttgccggcggccaacgggatcgggtacctagaagcgaagaaccacctgctccttggctattgccaggacatcgtctactacctgctccgcaaggccaaggggctctcggtggatggccaccccgtcgtacggagccttgtcgagattaggctgtttctggagaagattcgtccgattgacaagaaggcagagtaccaaatccagaagctcaccgatgccgctgacaatgccactgttcgagagaaaccaggaaatgcacaggcgaaggggaaggacgggcattcggatgaggaagacctcctgaagtataggccaaacccagatatgatggacacaaagcctggtcctgatgggcaggatactgatggtgtttaccgtcctccgaaatttatgcctactagcatggatgatgaagagaaacgtcgtaaaaatgattcaaggagagataaagcgatagcccgagtggcaatagaaaacccttatattaaagagataattgatgatgctgcagacagacctgaagagtggaaggaaacagtgggcgatgaaagcagagaatttgggaggtacatgcgacagagagaagagcaagagaagcaggaagaggagttgttcactcgggctcctgtaaccaaacgtgataagcagatcgagaagcgcataaggagacaacttcatgggctaggaggcttaactgacggtttcgaccttgggatgaacatgctgttgggaggagacaaggaagatgatggcggttcaagcaagtcgcatggcaagagcggaaaccgaaagaagcacctgaagagcagcaagaagaggaagaggcattagccttggacccacactgctgtagcacttcaacataccgatacagcctagagacggttcaagcaatccacacggaaagttgaagctggagaaaatacaagaaaccaagtagagaaaaaaagctttggttcctgtaggcgtattatttctgaaacagaaaacttgatctgagcgactgatcctgagccaatggaacagtatgaattatatggcttgaacatggtaggtgtaccaagttttgttctgatagtcgaatgattgttgtattattgattaacaagaccaacaatatatagactaggctccaaccggttcatagaaacagtgcccggtagagatggacggtgatcacctgattagtaccttctaagtatagtcatgcactagagatggaaggtgatc

SEQ ID NO: 74605 - DNA, 1590 bp, Zea Mays
accacgcgacgcaaacaacagagctgccagcctgccactgaggagtgaggaaccctaagcggcgcactgtgcaggcgaaggcggcgcgctaccggcgacggccgacgggggatacggcgacatcgtccccctcgacccctcctccatccccgacgcggcggcgccagactgcaggtgttgaatgctgatttgttgtggcctgttgcgtcttcaccagttcatacattaaacttgaagaaccacgtggttgaagaaaagcccactgaaaatgagtaatacatcatcttcgtcaagtgggatgtgatatatgctgatattccaaagctcattccatttattgatctggtcaaggcgaaccagttgccggcggccaacgggatcgggtacctagaagcgaagaaccacctgctccttggctattgccaggacatcgtctactacctgctccgcaaggccaaggggctctcggtggatggccaccccgtcgtacggagccttgtcgagattaggctgtttctggagaagattcgtccgattgacaagaaggcagagtaccaaatccagaagctcaccgatgccgctgacaatgccactgttcgagagaaaccaggaaatgcacaggcgaaggggaaggacgggcattcggatgaggaagacctcctgaagtataggccaaacccagatatgatggacacaaagcctggtcctgatgggcaggatactgatggtgtttaccgtcctccgaaatttatgcctactagcatggatgatgaagagaaacgtcgtaaaaatgattcaaggagagataaagcgatagcccgagtggcaatagaaaacccttatattaaagagataattgatgatgctgcagacagacctgaagagtggaaggaaacagtgggcgatgaaagcagagaatttgggaggtacatgcgacagagagaagagcaagagaagcaggaagaggagttgttcactcgggctcctgtaaccaaacgtgataagcagatcgagaagcgcataaggagacaacttcatgggctaggaggcttaactgacggtttcgaccttgggatgaacatgctgttgggaggagacaaggaagatgatggcggttcaagcaagtcgcatggcaagagcggaaaccgaaagaagcacctgaagagcagcaagaagaggaagaggcattagccttggacccacactgctgtagcacttcaacataccgatacagcctagagacggttcaagcaatccacacggaaagttgaagctggagaaaatacaagaaaccaagtagagaaaaaaagctttggttcctgtaggcgtattatttctgaaacagaaaacttgatctgagcgactgatcctgagccaatggaacagtatgaattatatggcttgaacatggtaggtgtaccaagttttgttctgatagtcgaatgattgttgtattattgattaacaagaccaacaatatatagactaggctccaaccggttcatagaaacagtgcccggtagagatggacggtgatcacctgattagtaccttctaagtatagtcatgcactagagatggaaggtgatc

SEQ ID NO: 74606 - DNA, 1778 bp, Zea Mays
accacgcgacgcaaacaacagagctgccagcctgccactgaggagtgaggaaccctaagcggcgcactgtgcaggcgaaggcggcgcgctaccggcgacggccgacgggggatacggcgacatcgtccccctcgacccctcctccatccccgacgcggcggcgccagactgcaggtgttgaatgctgatttgttgtggcctgttgcgtcttcaccagttcatacattaaacttgaagaaccacgtggttgaagaaaagcccactgaaaatgagtaatacatcatcttcgtcaagtgggatgtgatatatgctgatattccaaagctcattccatttattgatctgcgtcgcctccgacgagtcaccgctccgtcggctgcttgctgcagtccacgccacgcgctacgccgtcacggtcgctcctcccgtgacgcagccgtcgctaggcgccgcctatttctcggacaaagtcgctcgccaccatggcggcagcgtcggctgccgcagaagccagcggcgagagtaaaaacgaattcctcatacgcgacgacgcgccagggctactcgccgctctcaaggagatgaaggacggactggacctcgtcaggggcaaggtcgaggccatcacgcggaaggtcaaggcgaaccagttgccggcggccaacgggatcgggtacctagaagcgaagaaccacctgctccttggctattgccaggacatcgtctactacctgctccgcaaggccaaggggctctcggtggatggccaccccgtcgtacggagccttgtcgagattaggctgtttctggagaaggggaaggacgggcattcggatgaggaagacctcctgaagtataggccaaacccagatatgatggacacaaagcctggtcctgatgggcaggatactgatggtgtttaccgtcctccgaaatttatgcctactagcatggatgatgaagagaaacgtcgtaaaaatgattcaaggagagataaagcgatagcccgagtggcaatagaaaacccttatattaaagagataattgatgatgctgcagacagacctgaagagtggaaggaaacagtgggcgatgaaagcagagaatttgggaggtacatgcgacagagagaagagcaagagaagcaggaagaggagttgttcactcgggctcctgtaaccaaacgtgataagcagatcgagaagcgcataaggagacaacttcatgggctaggaggcttaactgacggtttcgaccttgggatgaacatgctgttgggaggagacaaggaagatgatggcggttcaagcaagtcgcatggcaagagcggaaaccgaaagaagcacctgaagagcagcaagaagaggaagaggcattagccttggacccacactgctgtagcacttcaacataccgatacagcctagagacggttcaagcaatccacacggaaagttgaagctggagaaaatacaagaaaccaagtagagaaaaaaagctttggttcctgtaggcgtattatttctgaaacagaaaacttgatctgagcgactgatcctgagccaatggaacagtatgaattatatggcttgaacatggtaggtgtaccaagttttgttctgatagtcgaatgattgttgtattattgattaacaagaccaacaatatatagactaggctccaaccggttcatagaaacagtgcccggtagagatggacggtgatcacctgattagtaccttctaagtatagtcatgcactagagatggaaggtgatc

SEQ ID NO: 74607 - DNA, 1889 bp, Zea Mays
accacgcgacgcaaacaacagagctgccagcctgccactgaggagtgaggaaccctaagcggcgcactgtgcaggcgaaggcggcgcgctaccggcgacggccgacgggggatacggcgacatcgtccccctcgacccctcctccatccccgacgcggcggcgccagactgcaggtgttgaatgctgatttgttgtggcctgttgcgtcttcaccagttcatacattaaacttgaagaaccacgtggttgaagaaaagcccactgaaaatgagtaatacatcatcttcgtcaagtggtgagcgtgctatgcagtgacagagggctgtggagatcataagttcataacatcctatcgtcgcctccgacgagtcaccgctccgtcggctgcttgctgcagtccacgccacgcgctacgccgtcacggtcgctcctcccgtgacgcagccgtcgctaggcgccgcctatttctcggacaaagtcgctcgccaccatggcggcagcgtcggctgccgcagaagccagcggcgagagtaaaaacgaattcctcatacgcgacgacgcgccagggctactcgccgctctcaaggagatgaaggacggactggacctcgtcaggggcaaggtcgaggccatcacgcggaaggtcaaggcgaaccagttgccggcggccaacgggatcgggtacctagaagcgaagaaccacctgctccttggctattgccaggacatcgtctactacctgctccgcaaggccaaggggctctcggtggatggccaccccgtcgtacggagccttgtcgagattaggctgtttctggagaagattcgtccgattgacaagaaggcagagtaccaaatccagaagctcaccgatgccgctgacaatgccactgttcgagagaaaccaggaaatgcacaggcgaaggggaaggacgggcattcggatgaggaagacctcctgaagtataggccaaacccagatatgatggacacaaagcctggtcctgatgggcaggatactgatggtgtttaccgtcctccgaaatttatgcctactagcatggatgatgaagagaaacgtcgtaaaaatgattcaaggagagataaagcgatagcccgagtggcaatagaaaacccttatattaaagagataattgatgatgctgcagacagacctgaagagtggaaggaaacagtgggcgatgaaagcagagaatttgggaggtacatgcgacagagagaagagcaagagaagcaggaagaggagttgttcactcgggctcctgtaaccaaacgtgataagcagatcgagaagcgcataaggagacaacttcatgggctaggaggcttaactgacggtttcgaccttgggatgaacatgctgttgggaggagacaaggaagatgatggcggttcaagcaagtcgcatggcaagagcggaaaccgaaagaagcacctgaagagcagcaagaagaggaagaggcattagccttggacccacactgctgtagcacttcaacataccgatacagcctagagacggttcaagcaatccacacggaaagttgaagctggagaaaatacaagaaaccaagtagagaaaaaaagctttggttcctgtaggcgtattatttctgaaacagaaaacttgatctgagcgactgatcctgagccaatggaacagtatgaattatatggcttgaacatggtaggtgtaccaagttttgttctgatagtcgaatgattgttgtattattgattaacaagaccaacaatatatagactaggctccaaccggttcatagaaacagtgcccggtagagatggacggtgatcacctgattagtaccttctaagtatagtcatgcactagagatggaaggtgatc

SEQ ID NO: 74608 - DNA, 1518 bp, Zea Mays
accacgcgacgcaaacaacagagctgccagcctgccactgaggagtgaggaaccctaagcggcgcactgtgcaggcgaaggcggcgcgctaccggcgacggccgacgggggatacggcgacatcgtccccctcgacccctcctccatccccgacgcggcggcgccagactgcaggtgttgaatgctgatttgttgtggcctgttgcgtcttcaccagttcatacattaaacttgaagaaccacgtggttgaagaaaagcccactgaaaatgagtaatacatcatcttcgtcaagtggtgagcgtgctatgcagtgacagagggctgtggagatcataagttcataacatcctatgttagcctttcacttgatcataagttcataacatccttatattcatgcagggatgtgatatatgctgatattccaaagctcattccatttattgatctgattcgtccgattgacaagaaggcagagtaccaaatccagaagctcaccgatgccgctgacaatgccactgttcgagagaaaccaggaaatgcacaggcgaaggggaaggacgggcattcggatgaggaagacctcctgaagtataggccaaacccagatatgatggacacaaagcctggtcctgatgggcaggatactgatggtgtttaccgtcctccgaaatttatgcctactagcatggatgatgaagagaaacgtcgtaaaaatgattcaaggagagataaagcgatagcccgagtggcaatagaaaacccttatattaaagagataattgatgatgctgcagacagacctgaagagtggaaggaaacagtgggcgatgaaagcagagaatttgggaggtacatgcgacagagagaagagcaagagaagcaggaagaggagttgttcactcgggctcctgtaaccaaacgtgataagcagatcgagaagcgcataaggagacaacttcatgggctaggaggcttaactgacggtttcgaccttgggatgaacatgctgttgggaggagacaaggaagatgatggcggttcaagcaagtcgcatggcaagagcggaaaccgaaagaagcacctgaagagcagcaagaagaggaagaggcattagccttggacccacactgctgtagcacttcaacataccgatacagcctagagacggttcaagcaatccacacggaaagttgaagctggagaaaatacaagaaaccaagtagagaaaaaaagctttggttcctgtaggcgtattatttctgaaacagaaaacttgatctgagcgactgatcctgagccaatggaacagtatgaattatatggcttgaacatggtaggtgtaccaagttttgttctgatagtcgaatgattgttgtattattgattaacaagaccaacaatatatagactaggctccaaccggttcatagaaacagtgcccggtagagatggacggtgatcacctgattagtaccttctaagtatagtcatgcactagagatggaaggtgatc

SEQ ID NO: 74609 - DNA, 1410 bp, Zea Mays
accacgcgacgcaaacaacagagctgccagcctgccactgaggagtgaggaaccctaagcggcgcactgtgcaggcgaaggcggcgcgctaccggcgacggccgacgggggatacggcgacatcgtccccctcgacccctcctccatccccgacgcggcggcgccagactgcaggtgttgaatgctgatttgttgtggcctgttgcgtcttcaccagttcatacattaaacttgaagaaccacgtggttgaagaaaagcccactgaaaatgagtaatacatcatcttcgtcaagtgggatgtgatatatgctgatattccaaagctcattccatttattgatctgattcgtccgattgacaagaaggcagagtaccaaatccagaagctcaccgatgccgctgacaatgccactgttcgagagaaaccaggaaatgcacaggcgaaggggaaggacgggcattcggatgaggaagacctcctgaagtataggccaaacccagatatgatggacacaaagcctggtcctgatgggcaggatactgatggtgtttaccgtcctccgaaatttatgcctactagcatggatgatgaagagaaacgtcgtaaaaatgattcaaggagagataaagcgatagcccgagtggcaatagaaaacccttatattaaagagataattgatgatgctgcagacagacctgaagagtggaaggaaacagtgggcgatgaaagcagagaatttgggaggtacatgcgacagagagaagagcaagagaagcaggaagaggagttgttcactcgggctcctgtaaccaaacgtgataagcagatcgagaagcgcataaggagacaacttcatgggctaggaggcttaactgacggtttcgaccttgggatgaacatgctgttgggaggagacaaggaagatgatggcggttcaagcaagtcgcatggcaagagcggaaaccgaaagaagcacctgaagagcagcaagaagaggaagaggcattagccttggacccacactgctgtagcacttcaacataccgatacagcctagagacggttcaagcaatccacacggaaagttgaagctggagaaaatacaagaaaccaagtagagaaaaaaagctttggttcctgtaggcgtattatttctgaaacagaaaacttgatctgagcgactgatcctgagccaatggaacagtatgaattatatggcttgaacatggtaggtgtaccaagttttgttctgatagtcgaatgattgttgtattattgattaacaagaccaacaatatatagactaggctccaaccggttcatagaaacagtgcccggtagagatggacggtgatcacctgattagtaccttctaagtatagtcatgcactagagatggaaggtgatc

SEQ ID NO: 74610 - DNA, 1871 bp, Zea Mays
gtcgaatgctaggcggctgctagctgctaggtgttgaatgctgatttgttgtggcctgttgcgtcttcaccagttcatacattaaacttgaagaaccacgtggttgaagaaaagcccactgaaaatgagtaatacatcatcttcgtcaagtggtgagcgtgctatgcagtgacagagggctgtggagatcataagttcataacatcctatgttagcctttcacttgatcataagttcataacatccttatattcatgcagggatgtgatatatgctgatattccaaagctcattccatttattgatctgttgggctgttccctccctaaaccccagcgtcgcctccgacgagtcaccgctccgtcggctgcttgctgcagtccacgccacgcgctacgccgtcacggtcgctcctcccgtgacgcagccgtcgctaggcgccgcctatttctcggacaaagtcgctcgccaccatggcggcagcgtcggctgccgcagaagccagcggcgagagtaaaaacgaattcctcatacgcgacgacgcgccagggctactcgccgctctcaaggagatgaaggacggactggacctcgtcaggggcaaggtcgaggccatcacgcggaaggtcaaggcgaaccagttgccggcggccaacgggatcgggtacctagaagcgaagaaccacctgctccttggctattgccaggacatcgtctactacctgctccgcaaggccaaggggctctcggtggatggccaccccgtcgtacggagccttgtcgagattaggctgtttctggagaagattcgtccgattgacaagaaggcagagtaccaaatccagaagctcaccgatgccgctgacaatgccactgttcgagagaaaccaggaaatgcacaggcgaaggggaaggacgggcattcggatgaggaagacctcctgaagtataggccaaacccagatatgatggacacaaagcctggtcctgatgggcaggatactgatggtgtttaccgtcctccgaaatttatgcctactagcatggatgatgaagagaaacgtcgtaaaaatgattcaaggagagataaagcgatagcccgagtggcaatagaaaacccttatattaaagagataattgatgatgctgcagacagacctgaagagtggaaggaaacagtgggcgatgaaagcagagaatttgggaggtacatgcgacagagagaagagcaagagaagcaggaagaggagttgttcactcgggctcctgtaaccaaacgtgataagcagatcgagaagcgcataaggagacaacttcatgggctaggaggcttaactgacggtttcgaccttgggatgaacatgctgttgggaggagacaaggaagatgatggcggttcaagcaagtcgcatggcaagagcggaaaccgaaagaagcacctgaagagcagcaagaagaggaagaggcattagccttggacccacactgctgtagcacttcaacataccgatacagcctagagacggttcaagcaatccacacggaaagttgaagctggagaaaatacaagaaaccaagtagagaaaaaaagctttggttcctgtaggcgtattatttctgaaacagaaaacttgatctgagcgactgatcctgagccaatggaacagtatgaattatatggcttgaacatggtaggtgtaccaagttttgttctgatagtcgaatgattgttgtattattgattaacaagaccaacaatatatagactaggctccaaccggttcatagaaacagtgcccggtagagatggacggtgatcacctgattagtaccttctaagtatagtcatgcactagagatggaaggtgatc

SEQ ID NO: 74611 - DNA, 682 bp, Zea Mays
atgccgacgctgcacgcgaatatggccgagatgccgtctgctgcgatggcgaaggcgcgtagcctgctgcggcgcacggacagggggtccagttccatccccaccaggaagaggaagaagaggaggcccggttgtgaagaggagcagcaacgacacgaggcgaggaagacgagaggacggagcggaacaggtgaagaagttaagccaggagccacggtctcttgcatagtttgtgatggtttggttatccacctgtcacaggctgcactaggggaaccaaagaaagcgagtgagaatgtcattgtgtctgtgaaaattaacgataagaaactagtgcttggaaccttatcagttgagaagcatcctcagatctcttgtgatctgttttttgataaagaattttccgcggcaaagtttcccgtgaaggatgtcatacaaaatgctgatgaaactagtggtgatgatgatgatttcactgatagtgagagtgaaatgtctttggaagatgactctagttcagaagaacagactcctagcccaaacaagactgatgtagtagttggcaagaagagggcaattgaagctgaggcaccttctggtaagaaggctaagtctgaacaatctgctcagaaaacagcccaacttgggagccatgcctgcaagtcatgcaacaagtcctttg

SEQ ID NO: 74612 - DNA, 2495 bp, Zea Mays
atgagcaaacggccgatgatgacaacgccggcgggcggagaagacggtgagccatccagcggcgctcgcggagccggtgcgccgccgccgtctcagccggtcggtaccggccgctacgcaagactgcagagcgccggcaccgggaccagtgccgccgacggcgaccggcccagacgtcgtgtgacctatatggaaggccgttttgaagcggcggagcagccgccaaccgatgacggttacggtgccggggacactgccccgccccagacgcgcacgcaacgccccaggccgacctacacgcctgtgtcgcagaggagacgagagccggcgattgatgagcagccacggttgtacggagattacccgcgccggggcagcccggcggaaccgccggcgcgaacgccaacgcggccccggggtagccgtgccgggctgggaggagctgcgggaggggcgctgccaccggggagcagcagcctccccagccccgaaacggctgtttcgacaactggtgggatccccggctcgtcgggaggagcaccaccggtgcaaccccggcgtggtggcctgaagaccaataagaccatcgagcgcgtcagcacgctgggggacgagccggtaggactgggtgggagtgggagttcggagccgccgccgccgccaacgcaaacgcaaccgaagccggagccacgtttttctcttcctcagcagccggaggaggggccgtatgtcgaccagccgccgaagcagccgtcttcgtcggggtcggggacgaagaggccagctggagcgtcgccgacgctgatcaggaggaaggagaaggcgacgaagctgatgacggtctgcttgacctgctgctgcatcctgttctggctcctggtggtctgcgtcggcctcgccatcctggtggtgtacctcctgtaccaccccagggcgccgcggatccacgtgagcacggccaccctcaacgccgggtacatcgacgagctcccgccaccgcacctgggcaaggcgctcaactcagacctctacgtgctggcggccatctacaacccgaacaccaaggtcgacgtcgtcctgcgctacatgcagctggacctctacttccaggggaggctgatcgggacgcaggcggtgtggccgccgctgtacgagaagcccggcgactcggcgctccgcagcgtgcacctggtggtcagcgaggtggtcatgacgcaggaggacgccgaggtgtggaagaacgtcaccaccggcggcggcctcgtggagatgcacctccagggcaaattccacgtccagctcaacttcggccgctggctcccgttcagcctaagagatacttcccttgcccctccagaaacacacatctccttactaaaaccttgcaatattagccttgaccgacaaccatgttgtgacataataccatcctattggcactgggacacctctgtctctggcaagaaccgacatcaggtgactttaagtcccgtcgtagaaacctcacagactgtccacggtccatgccgagcccagctaccggcataattatgatgtctttggtttaagatcaaattaggaagagacgaaggtggcaccgtattctcgatttttttgggaccatgtcaccataaaaaattgatctactatgtgactctcatctaaacatcatagaaaacgtaacgtggctgccccctttcatctctatttgttcgtccaaccaaatagtcacgacgcccggaagggcagcggataccaatccctgcctccgctgtcaaggccacgcacaaacggcacttctgcgaagtacgacggcacttctaccaatccaattatcccgtgatgccgctgcctcctctgtcatcaaactaaatgggctcagcatgacataatataacagcaaatatgtaaaacaaggaaaatggtgtaacattcagtcattcacatctattcagcctagaaagagattttcgttcgatggtagttacttccaaacattggttgatgacaaatacgatgacaacatcaagggtgccacatcgctagagaaaccattggatatgccttataagacacagacaaaaaaaagcacatgaacgtcaatctaagttgacatgataccctgatgaaattcatctgaaggtaaagatggccattgtagagccgagacaaggaaaaaagatctgtgggcagatggttgctaataaaatgtatatgacagaattttcatgaaacattcatcactttaaattcccagctttaaaataggcaaaaagcaccaaccttagaccgatcaatccaagaaatctttcaatccaaacaaaattgggaagcctctcttccaatgtccactgcagtctgcaggccaataaatcattttcgtgtagaacatttctcaaatacttcacaaacacccccatcctagatcatttcgcagtgacggctgcaagactacattggaagcagtcccactcccaccgtagcagttgagttcc

SEQ ID NO: 74613 - DNA, 1464 bp, Zea Mays
gtagaagccaccactggcaccaccagtgttgctgcccatggccccaaaatagggcgggccttgttcaaaaatcctagaagaattcgtactaaagactacataacagttgattgtggcaataagtcatgtgaggctacagttgaaacccaacagaaaaaaaatgagaaaagatgagcttgaaaacatgaataaaattcaacagcatcctgagaatacgattacaatactaaataatcaactcagaggcagtaaccatacaacagaacagaaccaaactttcatatcagatgctcatatgaccggaggacatgtgggaaaccaaataaccaattctccagcttccatctcgataatattgggatccaacagtcgccctgtctcagcagaatatacaggcaatagaagctacagcctacaattgacctcaactgaaaaaggtcccttccaattgcaatgcacagtaaactaaatttaaccaatctagctatctcgctgaaaagggttgccagcacagcagttgcctaataaaaaaaagtgcatcgagcgaacactgaattgaaaacgcaattccataccacgaaagcgagcaaacgaggagaaacgtagaaattcgagaactccgagtcacaaatggaacaaccagagcgacaagcaagctccaaattaactaatgaaacacaccgcaccaaatgatttgttgctccagttcgaactactaaactgctaccttcgctggtctgctcagatcccaccgcacttgagcatcgccagaagctcaagttaatcccgagcagctgccaagcaacccaacagctcaaatgagctacaacacaacgttgaactggagctccggataacccggataacccaatttctcagacccagcaaaatcgagtcccagtacgaccaattggagctcaagagaagcaaaaaaatcctcagaacaaataagcatgcaaatcgcccaaacccaaggtcaacaccgccctcaaagctcctcaaaccagatgcaacggaaacagataaagcctaccacagccgagcctacgacgatggtacacaatcgagctctgctacgggttggggggattacctcttaggtgtgaaccaggaaggcttgtcgccgtcccggtcgttggtactcgtgtccagacccgtctcaacgtcccgcactacggtgaccgccatggcctgcacacctcctgccgctgctgctgctgctgccaccgcctgcttagtttcctccgtctccaacaccgactcctgcttggcctccgccgcagaagcaggagtctccgcaacagaaggagggaggggatcagaggcggaatcgacgggtgaacgaatattaagtctcggggccgcgcgcgggggattgagctcggggctgggtgcgcgggggattgagctcggagcgcgcggcggagtatgcggcggtcgcgctccgcccgcccgattgcggtg

SEQ ID NO: 74614 - DNA, 2337 bp, Zea Mays
gtgaaccagtgcagcgctgcaggccagcgtggaaactggaaaagctgcctccgccaaatccaaaccaaacgggacggtcgccggaggaagcatacccgaaactcccctcccctctccttacaataccgcgaggcggcggctgacgtcgcttagccgctttcccacaccttcgccgccgcctatactcctgcagaaatagccccagggagggcggttgctgctgcttcgtgtgcggtgttccttcccccgccgcacgcgggatccatttgacggacggaccgaccgagcgacccacccgtccaccgagagccatggggcagaggcagagccacagcaagcgggacgggagcagccacgggcggcggtcgcgctcctttcagcagcagccgtcggcgcagtggggcgccggaggaggagggtactaccagcaggacccaagcaccggctactacggcgcgccggtgccacaacagggaggagggtactaccaacaggacccaggcaccggctactacggcgcgccggtgccacagcagggaggagggtacgccgcgccgtaccgggacaagcccgccgccgccgccgccgttgctgctccggcgccgcaggctgcgaagccgcggcagctggatcgccggtactcgcggatcgccgacgagtatcactcggtggaccaggttactgatgctctagctcaagcaggacttgaatcatcaaatcttattgttggcattgatttcacaaagagcaacgagtggacaggcaaattctcgttccatggacgcagtctacatcacattagcaacacaccaaatccgtatgaacaagccatctcgattattgggcgaacactatcgaaattcgatgaagataatctgattccatgtttcggatttggagatgcatcaacacacgatcaagatgtcttctgtttctctcctgacgagaaaccttgtaatggatttgaagaagctctcgatcgatatagggaacttgtaccacatttgcgcttagctggaccaacatcctttgcaccaattattgagatggctatgaccattgtggagcaaagtggcgggcaataccacgtcctattgataattgcagatgggcaggttacgaggagtgtagatactgcatctggacagctgagttcgcaagagcaaaaaactgttgatgccattgtgaaggccagtgaattgcctttgtccattgtgttagtaggagttggtgatggcccctgggacatgatgaaggaatttgatgacaacattcctgctcgagcttttgacaatttccaaagataatgtccaaaaacatggcacaatcaaggaaagaggctgcatttgctctttcagcattgatggagataccaccacagtataaagcaaccgtggaattagggattttgggtcgtcgctctttcaagtctcctgacagggttcctctgcctcccccttccggaagtcatggcgcttattcctactattcatctaaaggatttagcaaaccgagcacctaccctcagagttcttcatcctcatcaccctatcctcactatgaaactccacatacagccaccccagctgcgccttcagccacttatgacaaccaggtctgtcctatctgcctcgtgaaccccaaggacatggcgtttggttgtggacaccagacctgctgtgactgcggacagatcctggagtcgtgcccaatctgtcgcactcccatcaccacaaggataaagctatactagcaagtagtggtttggatcattgtcaatgggtggtatactggaggagccacccagcgtcacactggaggatcgtgtcagcatgcccatagatcgattgcaatcggaaagctggagcggcactccatagatcgatcgattggatctaaggattgcagggacaaagcatggatcaattggagcgaggattgcagggccgttgattcatcgctcagggttgtcccagtattcatatccaccaggaatgatccgaatctcatatcgcaataaataataaaaaataataaacgagcagaaagatgagaaacacacacaaaaaaagtggtggcgtggaggatcagacgattgcgtgtagggtcatcacacgcaactcagcttggttactactctaatctgcaactttagttgtacatacccaactttaggatcagaggattccttatttgtgcgtgtgcccgtgtttttttgtttgtttcgtgatttcgtccgagatatgttgatttgttctttgctagcaattgtgtaaaaatccaatccgcattttttggcgccatcgaaataaatgctatgttgtaaatttggccatc

SEQ ID NO: 74615 - DNA, 2312 bp, Zea Mays
agcgctgcaggccagcgtggaaactggaaaagctgcctccgccaaatccaaaccaaacgggacggtcgccggaggaagcatacccgaaactcccctcccctctccttacaataccgcgaggcggcggctgacgtcgcttagccgctttcccacaccttcgccgccgcctatactcctgcagaaatagccccagggagggcggttgctgctgcttcgtgtgcggtgttccttcccccgccgcacgcgggatccatttgacggacggaccgaccgagcgacccacccgtccaccgagagccatggggcagaggcagagccacagcaagcgggacgggagcagccacgggcggcggtcgcgctcctttcagcagcagccgtcggcgcagtggggcgccggaggaggagggtactaccagcaggacccaagcaccggctactacggcgcgccggtgccacaacagggaggagggtactaccaacaggacccaggcaccggctactacggcgcgccggtgccacagcagggaggagggtacgccgcgccgtaccgggacaagcccgccgccgccgccgccgttgctgctccggcgccgcaggctgcgaagccgcggcagctggatcgccggtactcgcggatcgccgacgagtatcactcggtggaccaggttactgatgctctagctcaagcaggacttgaatcatcaaatcttattgttggcattgatttcacaaagagcaacgagtggacaggcaaattctcgttccatggacgcagtctacatcacattagcaacacaccaaatccgtatgaacaagccatctcgattattgggcgaacactatcgaaattcgatgaagataatctgattccatgtttcggatttggagatgcatcaacacacgatcaagatgtcttctgtttctctcctgacgagaaaccttgtaatggatttgaagaagctctcgatcgatatagggaacttgtaccacatttgcgcttagctgatggctatgaccattgtggagcaaagtggcgggcaataccacgtcctattgataattgcagatgggcaggttacgaggagtgtagatactgcatctggacagctgagttcgcaagagcaaaaaactgttgatgccattgtgaaggccagtgaattgcctttgtccattgtgttagtaggagttggtgatggcccctgggacatgatgaaggaatttgatgacaacattcctgctcgagcttttgacaatttccaatttgtaaatttttcagagataatgtccaaaaacatggcacaatcaaggaaagaggctgcatttgctctttcagcattgatggagataccaccacagtataaagcaaccgtggaattagggattttgggtcgtcgctctttcaagtctcctgacagggttcctctgcctcccccttccggaagtcatggcgcttattcctactattcatctaaaggatttagcaaaccgagcacctaccctcagagttcttcatcctcatcaccctatcctcactatgaaactccacatacagccaccccagctgcgccttcagccacttatgacaaccaggtctgtcctatctgcctcgtgaaccccaaggacatggcgtttggttgtggacaccagacctgctgtgactgcggacagatcctggagtcgtgcccaatctgtcgcactcccatcaccacaaggataaagctatactagcaagtagtggtttggatcattgtcaatgggtggtatactggaggagccacccagcgtcacactggaggatcgtgtcagcatgcccatagatcgattgcaatcggaaagctggagcggcactccatagatcgatcgattggatctaaggattgcagggacaaagcatggatcaattggagcgaggattgcagggccgttgattcatcgctcagggttgtcccagtattcatatccaccaggaatgatccgaatctcatatcgcaataaataataaaaaataataaacgagcagaaagatgagaaacacacacaaaaaaagtggtggcgtggaggatcagacgattgcgtgtagggtcatcacacgcaactcagcttggttactactctaatctgcaactttagttgtacatacccaactttaggatcagaggattccttatttgtgcgtgtgcccgtgtttttttgtttgtttcgtgatttcgtccgagatatgttgatttgttctttgctagcaattgtgtaaaaatccaatccgcattttttggcgccatcgaaataaatgctatgttgtaaatttggccatc

SEQ ID NO: 74616 - DNA, 1553 bp, Zea Mays
aagtttgaaaatagggctaaattcgtaattatgaataaagagtaattgcggtcgtggttccggattccccgccgccgccgcaagaccggagccctaattccaagcggtaaacgatgaggccgcacgcggtgggtatgggtggcggtggcgtggggaggcggaaggcgggggccgccgccgccgcggctagccgggagtggttggtggtgccggcgtcgggcccggcgcgggtggaggaagcagggaagcacgcggtgatggcgcgtacggggcttcccgcgcgcgatctcagggtgctcgacccgttactctcgtacccgtccacgatcctgggccgcgagcgcgccatcgtggtcaacttggagcgcgtcaaagctctgatcacagccgcggaggtgctgcttcctaacaccaaggatcccgccttcgcgcgcttcgttcgcgacctccagacccgcgtcctcgcatcttcgtctgaccaggcagctgaactcactgacatggaaggtgaatcacctattgttgcttcaccatttcctgtaccaagttcatccaaagggcatgaaatggagatgactaagaagactgctgctgttgtgcctgaaatgactagcagcagcagtatgcccaatttagctgttgcaaaagatggaaataccaaggttttgcctttcgaatttcgagctcttgaagtgtgccttgaatcagcctgcagatctttggaagaggaagtatgtgcttgcatctggaattgtttgtctggttatatgttgtttatctggccgcaattgaattcatacctctaacatcagacttctactctggagctagaggcatatccagcattagatgagctgacatcaaagatcagcacattaaaccttgaacgagttaggcaaatcaagagtcgtctggttgcgatatctggtcgagtacagaaggtagtcaattgaaattctttgatctactttgtgttagtcttctttcggatttgtcaatgtcagtctttgttgctgattgcattatcctatatatgtttctttttatggtgagataaatgaggggtgtctggtgcgtacataccatcaaacatattatgttgttaagtgctatttctgtcatatactaggtggtacccacttcaattttcttgcaagaaactttctttactaatctagtttccgcttgtgaaaacattatgttcctcaaggtgagggatgagcttgagcatttactggatgatgaaatggatatggctgaaatgtacttgacagagaagcttactcaacaagaaatcagtgaggcttcatctagagctgaggttgatgatgcatctcttacagaagacgatagggatgaagattatagaagtgaaccagatggaagcaatggtagtgttataggttataagcccaatattgaagagctagagatgcttctagaggcttactttgtgcaaattgatggcacacttaacaagctatcacattgacacaaggacactagtgtggggagctgagcttcacattcataagatgtcttattcgcatgtt

SEQ ID NO: 74617 - DNA, 2035 bp, Zea Mays
aagtttgaaaatagggctaaattcgtaattatgaataaagagtaattgcggtcgtggttccggattccccgccgccgccgcaagaccggagccctaattccaagcggtaaacgatgaggccgcacgcggtgggtatgggtggcggtggcgtggggaggcggaaggcgggggccgccgccgccgcggctagccgggagtggttggtggtgccggcgtcgggcccggcgcgggtggaggaagcagggaagcacgcggtgatggcgcgtacggggcttcccgcgcgcgatctcagggtgctcgacccgttactctcgtacccgtccacgatcctgggccgcgagcgcgccatcgtggtcaacttggagcgcgtcaaagctctgatcacagccgcggaggtgctgcttcctaacaccaaggatcccgccttcgcgcgcttcgttcgcgacctccagacccgcgtcctcgcatcttcgtctgaccagctgaactcactgacatggaaggtgaatcacctattgttgcttcaccatttcctgtaccaagttcatccaaagggcatgaaatggagatgactaagaagactgctgctgttgtgcctgaaatgactagcagcagcagtatgcccaatttagctgttgcaaaagatggaaataccaaggttttgcctttcgaatttcgagctcttgaagtgtgccttgaatcagcctgcagatctttggaagaggaagtatgtgcttgcatctggaattgtttgtctggttatatgttgtttatctggccgcaattgaattcatacctctaacatcagacttctactctggagctagaggcatatccagcattagatgagctgacatcaaagatcagcacattaaaccttgaacgagttaggcaaatcaagagtcgtctggttgcgatatctggtcgagtacagaagagaagcttactcaacaagaaatcagtgaggcttcatctagagctgaggttgatgatgcatctcttacagaagacgatagggatgaagattatagaagtgaaccagatggaagcaatggtagtgttataggttataagcccaatattgaagagctagagatgcttctagaggcttactttgtgcaaattgatggcacacttaacaagctatcacatctgagggagtacgtcgatgacacagaagattatatcaatataatgttggacgacaagcagaatcagctgctgcagatgggagttatgctgtcaactgctactgtcgtcatcactgctggagtggctgtagttggtctttttggtatgaatattggcatatcactttacgcagacccaacaaccgaggaggaaactcgagcagcaaataggaaattttgggaaactactttcgggaccgttgctggctgcgtgattttgtacatcatagccatgggttggggaaagagaagtggattactgcaatgatgcggaagcatgactgcatgagtgttctgtacccagtgaatactgggttcacaaaaatctccaaaatgagagattattgtattggcatgctgctcgatcatactgctgccagaaaatacgcctcgttccactatgctggaaaagaaacatcttgtgtaccgctagtagctgctaatgcgtgaagtatattttacaatctgttgcccatcgtctgtcatggcaactcagcagttttgtacctgtttaccatgctaggtgctgtttttgctcttgttattgtgatcattcctgtaactgtatctagcggcctgtaatatgtatgccgctgattggttgagtgcctcccgcagtcccgcgtgcaggcctcccgcgcgcctggctcatcagcgattgtcatccgcgccatctccacacgcccagacgggtagtgaaaaaaatgcctagcctgcacacccgcatgctggccagcattctcatatctaagcaactaattagaatctcgtgcttggtcaaagcacgctggagcctcgttatctctatgcaagcaaccaatcacgtactatatgtacttgctctg

SEQ ID NO: 74618 - DNA, 2014 bp, Zea Mays
aagtttgaaaatagggctaaattcgtaattatgaataaagagtaattgcggtcgtggttccggattccccgccgccgccgcaagaccggagccctaattccaagcggtaaacgatgaggccgcacgcggtgggtatgggtggcggtggcgtggggaggcggaaggcgggggccgccgccgccgcggctagccgggagtggttggtggtgccggcgtcgggcccggcgcgggtggaggaagcagggaagcacgcggtgatggcgcgtacggggcttcccgcgcgcgatctcagggtgctcgacccgttactctcgtacccgtccacgatcctgggccgcgagcgcgccatcgtggtcaacttggagcgcgtcaaagctctgatcacagccgcggaggtgctgcttcctaacaccaaggatcccgccttcgcgcgcttcgttcgcgacctccagacccgcgtcctcgcatcttcgtctgaccaggcagctgaactcactgacatggaaggtgaatcacctattgttgcttcaccatttcctgtaccaagttcatccaaagggcatgaaatggagatgactaagaagactgctgctgttgtgcctgaaatgactagcagcagcagtatgcccaatttagctgttgcaaaagatggaaataccaaggttttgcctttcgaatttcgagctcttgaagtgtgccttgaatcagcctgcagatctttggaagaggaaacttctactctggagctagaggcatatccagcattagatgagctgacatcaaagatcagcacattaaaccttgaacgagttaggcaaatcaagagtcgtctggttgcgatatctggtcgagtacagaaggtgagggatgagcttgagcatttactggatgatgaaatggatatggctgaaatgtacttgacagagaagcttactcaacaagaaatcagtgaggcttcatctagagctgaggttgatgatgcatctcttacagaagacgatagattatagaagtgaaccagatggaagcaatggtagtgttataggttataagcccaatattgaagagctagagatgcttctagaggcttactttgtgcaaattgatggcacacttaacaagctatcacatctgagggagtacgtcgatgacacagaagattatatcaatataatgttggacgacaagcagaatcagctgctgcagatgggagttatgctgtcaactgctactgtcgtcatcactgctggagtggctgtagttggtctttttggtatgaatattggcatatcactttacgcagacccaacaaccgaggaggaaactcgagcagcaaataggaaattttgggaaactactttcgggaccgttgctggctgcgtgattttgtacatcatagccatgggttggggaaagagaagtggattactgcaatgatgcggaagcatgactgcatgagtgttctgtacccagtgaatactgggttcacaaaaatctccaaaatgagagattattgtattggcatgctgctcgatcatactgctgccagaaaatacgcctcgttccactatgctggaaaagaaacatcttgtgtaccgctagtagctgctaatgcgtgaagtatattttacaatctgttgcccatcgtctgtcatggcaactcagcagttttgtacctgtttaccatgctaggtgctgtttttgctcttgttattgtgatcattcctgtaactgtatctagcggcctgtaatatgtatgccgctgattggttgagtgcctcccgcagtcccgcgtgcaggcctcccgcgcgcctggctcatcagcgattgtcatccgcgccatctccacacgcccagacgggtagtgaaaaaaatgcctagcctgcacacccgcatgctggccagcattctcatatctaagcaactaattagaatctcgtgcttggtcaaagcacgctggagcctcgttatctctatgcaagcaaccaatcacgtactatatgtacttgctctg

SEQ ID NO: 74619 - DNA, 2039 bp, Zea Mays
aagtttgaaaatagggctaaattcgtaattatgaataaagagtaattgcggtcgtggttccggattccccgccgccgccgcaagaccggagccctaattccaagcggtaaacgatgaggccgcacgcggtgggtatgggtggcggtggcgtggggaggcggaaggcgggggccgccgccgccgcggctagccgggagtggttggtggtgccggcgtcgggcccggcgcgggtggaggaagcagggaagcacgcggtgatggcgcgtacggggcttcccgcgcgcgatctcagggtgctcgacccgttactctcgtacccgtccacgatcctgggccgcgagcgcgccatcgtggtcaacttggagcgcgtcaaagctctgatcacagccgcggaggtgctgcttcctaacaccaaggatcccgccttcgcgcgcttcgttcgcgacctccagacccgcgtcctcgcatcttcgtctgaccaggcagctgaactcactgacatggaaggtgaatcacctattgttgcttcaccatttcctgtaccaagttcatccaaagggcatgaaatggagatgactaagaagactgctgctgttgtgcctgaaatgactagcagcagcagtatgcccaatttagctgttgcaaaagatggaaataccaaggttttgcctttcgaatttcgagctcttgaagtgtgccttgaatcagcctgcagatctttggaagaggaagtatgtgcttgcatctggaattgtttgtctggttatatgttgtttatctggccgcaattgaattcatacctctaacatcagacttctactctggagctagaggcatatccagcattagatgagctgacatcaaagatcagcacattaaaccttgaacgagttaggcaaatcaagagtcgtctggttgcgatatctggtcgagtacagaagagaagcttactcaacaagaaatcagtgaggcttcatctagagctgaggttgatgatgcatctcttacagaagacgatagggatgaagattatagaagtgaaccagatggaagcaatggtagtgttataggttataagcccaatattgaagagctagagatgcttctagaggcttactttgtgcaaattgatggcacacttaacaagctatcacatctgagggagtacgtcgatgacacagaagattatatcaatataatgttggacgacaagcagaatcagctgctgcagatgggagttatgctgtcaactgctactgtcgtcatcactgctggagtggctgtagttggtctttttggtatgaatattggcatatcactttacgcagacccaacaaccgaggaggaaactcgagcagcaaataggaaattttgggaaactactttcgggaccgttgctggctgcgtgattttgtacatcatagccatgggttggggaaagagaagtggattactgcaatgatgcggaagcatgactgcatgagtgttctgtacccagtgaatactgggttcacaaaaatctccaaaatgagagattattgtattggcatgctgctcgatcatactgctgccagaaaatacgcctcgttccactatgctggaaaagaaacatcttgtgtaccgctagtagctgctaatgcgtgaagtatattttacaatctgttgcccatcgtctgtcatggcaactcagcagttttgtacctgtttaccatgctaggtgctgtttttgctcttgttattgtgatcattcctgtaactgtatctagcggcctgtaatatgtatgccgctgattggttgagtgcctcccgcagtcccgcgtgcaggcctcccgcgcgcctggctcatcagcgattgtcatccgcgccatctccacacgcccagacgggtagtgaaaaaaatgcctagcctgcacacccgcatgctggccagcattctcatatctaagcaactaattagaatctcgtgcttggtcaaagcacgctggagcctcgttatctctatgcaagcaaccaatcacgtactatatgtacttgctctg

SEQ ID NO: 74620 - DNA, 2099 bp, Zea Mays
aagtttgaaaatagggctaaattcgtaattatgaataaagagtaattgcggtcgtggttccggattccccgccgccgccgcaagaccggagccctaattccaagcggtaaacgatgaggccgcacgcggtgggtatgggtggcggtggcgtggggaggcggaaggcgggggccgccgccgccgcggctagccgggagtggttggtggtgccggcgtcgggcccggcgcgggtggaggaagcagggaagcacgcggtgatggcgcgtacggggcttcccgcgcgcgatctcagggtgctcgacccgttactctcgtacccgtccacgatcctgggccgcgagcgcgccatcgtggtcaacttggagcgcgtcaaagctctgatcacagccgcggaggtgctgcttcctaacaccaaggatcccgccttcgcgcgcttcgttcgcgacctccagacccgcgtcctcgcatcttcgtctgaccagctgaactcactgacatggaaggtgaatcacctattgttgcttcaccatttcctgtaccaagttcatccaaagggcatgaaatggagatgactaagaagactgctgctgttgtgcctgaaatgactagcagcagcagtatgcccaatttagctgttgcaaaagatggaaataccaaggttttgcctttcgaatttcgagctcttgaagtgtgccttgaatcagcctgcagatctttggaagaggaagtatgtgcttgcatctggaattgtttgtctggttatatgttgtttatctggccgcaattgaattcatacctctaacatcagacttctactctggagctagaggcatatccagcattagatgagctgacatcaaagatcagcacattaaaccttgaacgagttaggcaaatcaagagtcgtctggttgcgatatctggtcgagtacagaaggtgagggatgagcttgagcatttactggatgatgaaatggatatggctgaaatgtacttgacagagaagcttactcaacaagaaatcagtgaggcttcatctagagctgaggttgatgatgcatctcttacagaagacgatagggatgaagattatagaagtgaaccagatggaagcaatggtagtgttataggttataagcccaatattgaagagctagagatgcttctagaggcttactttgtgcaaattgatggcacacttaacaagctatcacatctgagggagtacgtcgatgacacagaagattatatcaatataatgttggacgacaagcagaatcagctgctgcagatgggagttatgctgtcaactgctactgtcgtcatcactgctggagtggctgtagttggtctttttggtatgaatattggcatatcactttacgcagacccaacaaccgaggaggaaactcgagcagcaaataggaaattttgggaaactactttcgggaccgttgctggctgcgtgattttgtacatcatagccatgggttggggaaagagaagtggattactgcaatgatgcggaagcatgactgcatgagtgttctgtacccagtgaatactgggttcacaaaaatctccaaaatgagagattattgtattggcatgctgctcgatcatactgctgccagaaaatacgcctcgttccactatgctggaaaagaaacatcttgtgtaccgctagtagctgctaatgcgtgaagtatattttacaatctgttgcccatcgtctgtcatggcaactcagcagttttgtacctgtttaccatgctaggtgctgtttttgctcttgttattgtgatcattcctgtaactgtatctagcggcctgtaatatgtatgccgctgattggttgagtgcctcccgcagtcccgcgtgcaggcctcccgcgcgcctggctcatcagcgattgtcatccgcgccatctccacacgcccagacgggtagtgaaaaaaatgcctagcctgcacacccgcatgctggccagcattctcatatctaagcaactaattagaatctcgtgcttggtcaaagcacgctggagcctcgttatctctatgcaagcaaccaatcacgtactatatgtacttgctctg

SEQ ID NO: 74621 - DNA, 2173 bp, Zea Mays
cagcaacgccccaatcctccgtcctcggaaccaaacgacgccgtccggccgtccggccactcgtgcggatggcggagatcgccggcgacgaggccccaacacctcctaccatctccggcgaagtatccggagacccgcatacttctgccgctacccctgccggcagcagcaacaagccgccgttgcgcgcgacgaagcccggagtgaagcgcctcattctcaccgcctccgtcctcctctcctttctcgtcgggctgcccttcctgctgaagtccaccgagatccatcggtcgccgctgccttcggacgcaatcacggcactcgcccaccgcctccactccactccgccctcgttcccgtgcgccctccacgcggtcttcctccggtcggttcccggccgctctgacgatgcctccctgtaccgtcgtcttgagcggtcgatttcggcgcagctccagcttcttgcagccacttctaccgccggtaatgtctcggtatcagtcaccgttgagtcagctggtggctgctccagcagcagcggcagcgttggctcaggttggcagtgtggcactgtgagcagtgcagacctggtggttggcgatgaggtgttcgatgaattgctgcactcagctttaggcagcgtcggaggggatgggtctagggtttacactgttgtggttgtggagattgatgatgcagatggtatgagggttgtcgttgggaagcaccggcatgcttgggtggttggaaaagctgatgaggttaaggctgtctcagttattggcaaggtatttgccaagtatttcatgaatgggggtattgaggagggtgaggcaggcattgggaaaggcgagttcatgccagttggatcagatggcaatgtcgttctatcctttagcttgctgaatgctgatccaagtgattgggtgtatgattgggactttgaaaagattggtgagaagatgttgaatcctgtggttgaggcactgcgaccgattgcggaaatcaatatagaaagtcaggttttgtaccacactcctaagtcgtcctattcttattttgatgataaactgggtggcaatttccttagtatgggagacattcctttctttgtaaactcaaatgagtggcacttggatacatctatttcagctacaggacgatcaaaagttcttcaatttgttgtatacattccatctgcaagggaatgcccattatatttacaacttcctgatggtgggctttcaaaaaccaatgcatttatatcccctatgtggggaggtgttcttatctggaactcaccggactgttcacttggttccaagaaaactcatggtacccagaagaaaatgtcatctcaggaacttatggaggcactcgaaatatttgttggacaactaaggcagctgtttggtctaaaaccatcttatttctcacaagatatggacgttccaactaaatttctagttagtgaaaagggcttcacagaatgggagttagatttattatatcggcaccatgcacgttccaatctgctgtcatgcctcaccacattggagtctctatccagtctggtccactctctccctaggatgattgtcatggatgaaattggaagacaggttgagctttctcttgaagctgcaaatttagcacagggaaatgcaactctaggaataagtgactcttcagcagccatttttcgcaccagtttccttgcatgtgctgctggcggcaatcaaagagctgaaacgttacaaggcagagcgagcaaaatattcggcatttcttgcttcccaggcgacatcctcctgatctggtgatgattagcacggatttgcaccagaaaattctgaacgtttatatgaagctgatggccactattggtactgcacatagtggagactggagagtaagcaacactgcagcgtcacttgttctaatgctcacggaagtggttaggatgtccaggtgatgtcaggccgagagctatagtcgaaatctctaccaattgagcagttcttgtaacccagattttgttcctagatacctcatacgtactcacattgaagttttttttaaaaaaaaatatatatttagaaaggacagacattaagattccagatcgaagatgttgagatggttaaagcattgctgcgaaatcagagccgaa

SEQ ID NO: 74622 - DNA, 2246 bp, Zea Mays
cctccgtcctcggaaccaaacgacgccgtccggccgtccggccactcgtgcggatggcggagatcgccggcgacgaggccccaacacctcctaccatctccggcgaagtatccggagacccgcatacttctgccgctacccctgccggcagcagcaacaagccgccgttgcgcgcgacgaagcccggagtgaagcgcctcattctcaccgcctccgtcctcctctcctttctcgtcgggctgcccttcctgctgaagtccaccgagatccatcggtcgccgctgccttcggacgcaatcacggcactcgcccaccgcctccactccactccgccctcgttcccgtgcgccctccacgcggtcttcctccggtcggttcccggccgctctgacgatgcctccctgtaccgtcgtcttgagcggtcgatttcggcgcagctccagcttcttgcagccacttctaccgccggtaatgtctcggtatcagtcaccgttgagtcagctggtggctgctccagcagcagcggcagcgttggctcaggttggcagtgtggcactgtgagcagtgcagacctggtggttggcgatgaggtgttcgatgaattgctgcactcagctttaggcagcgtcggaggggatgggtctagggtttacactgttgtggttgtggagattgatgatgcagatggtatgagggttgtcgttgggaagcaccggcatgcttgggtggttggaaaagctgatgaggttaaggctgtctcagttattggcaaggtatttgccaagtatttcatgaatgggggtattgaggagggtgaggcaggcattgggaaaggcgagttcatgccagttggatcagatggcaatgtcgttctatcctttagcttgctgaatgctgatccaagtgattgggtgtatgattgggactttgaaaagattggtgagaagatgttgaatcctgtggttgaggcactgcgaccgattgcggaaatcaatatagaaagtcaggttttgtaccacactcctaagtcgtcctattcttattttgatgataaactgggtggcaatttccttagtatgggagacattcctttctttgtaaactcaaatgagtggcacttggatacatctatttcagctacaggacgatcaaaagttcttcaatttgttgtatacattccatctgcaagggaatgcccattatatttacaacttcctgatggtgggctttcaaaaaccaatgcatttatatcccctatgtggggaggtgttcttatctggaactcaccggactgttcacttggttccaagaaaactcatggtacccagaagaaaatgtcatctcaggaacttatggaggcactcgaaatatttgttggacaactaaggcagctgtttggtctaaaaccatcttatttctcacaagatatggacgttccaactaaatttctagttagtgaaaagggcttcacagaatgggagttagatttattatatcggcaccatgcacgttccaatctgctgtcatgcctcaccacattggagtctctatccagtctggtccactctctccctaggatgattgtcatggatgaaattggaagacaggttgagctttctcttgaagctgcaaatttagcacagggaaatgcaactctaggaataagtgactcttcagcagtatctgcaacaagagccagggcactggctgaggatgcatttttccatccatccattatgtcaatcagttatgcttcagtagagcactatttcgccatttacatgtttccttgcatgtgctgctggcggcaatcaaagagctgaaacgttacaaggcagagcgagcaaaatattcggcatttcttgcttcccaggcgacatcctcctgatctggtgatgattagcacggatttgcaccagaaaattctgaacgtttatatgaagctgatggccactattggtactgcacatagtggagactggagagtaagcaacactgcagcgtcacttgttctaatgctcacggaagtggttaggatgtccaggtgatgtcaggccgagagctatagtcgaaatctctaccaattgagcagttcttgtaacccagattttgttcctagatacctcatacgtactcacattgaagttttttttaaaaaaaaatatatatttagaaaggacagacattaagattccagatcgaagatgttgagatggttaaagcattgctgcgaaatcagagccgaa

SEQ ID NO: 74623 - DNA, 2239 bp, Zea Mays
cctccgtcctcggaaccaaacgacgccgtccggccgtccggccactcgtgcggatggcggagatcgccggcgacgaggccccaacacctcctaccatctccggcgaagtatccggagacccgcatacttctgccgctacccctgccggcagcagcaacaagccgccgttgcgcgcgacgaagcccggagtgaagcgcctcattctcaccgcctccgtcctcctctcctttctcgtcgggctgcccttcctgctgaagtccaccgagatccatcggtcgccgctgccttcggacgcaatcacggcactcgcccaccgcctccactccactccgccctcgttcccgtgcgccctccacgcggtcttcctccggtcggttcccggccgctctgacgatgcctccctgtaccgtcgtcttgagcggtcgatttcggcgcagctccagcttcttgcagccacttctaccgccggtaatgtctcggtatcagtcaccgttgagtcagctggtggctgctccagcagcagcggcagcgttggctcaggttggcagtgtggcactgtgagcagtgcagacctggtggttggcgatgaggtgttcgatgaattgctgcactcagctttaggcagcgtcggaggggatgggtctagggtttacactgttgtggttgtggagattgatgatgcagatggtatgagggttgtcgttgggaagcaccggcatgcttgggtggttggaaaagctgatgaggttaaggctgtctcagttattggcaaggtatttgccaagtatttcatgaatgggggtattgaggagggtgaggcaggcattgggaaaggcgagttcatgccagttggatcagatggcaatgtcgttctatcctttagcttgctgaatgctgatccaagtgattgggtgtatgattgggactttgaaaagattggtgagaagatgttgaatcctgtggttgaggcactgcgaccgattgcggaaatcaatatagaaagtcaggttttgtaccacactcctaagtcgtcctattcttattttgatgataaactgggtggcaatttccttagtaaactcaaatgagtggcacttggatacatctatttcagctacaggacgatcaaaagttcttcaatttgttgtatacattccatctgcaagggaatgcccattatatttacaacttcctgatggtgggctttcaaaaaccaatgcatttatatcccctatgtggggaggtgttcttatctggaactcaccggactgttcacttggttccaagaaaactcatggtacccagaagaaaatgtcatctcaggaacttatggaggcactcgaaatatttgttggacaactaaggcagctgtttggtctaaaaccatcttatttctcacaagatatggacgttccaactaaatttctagttagtgaaaagggcttcacagaatgggagttagatttattatatcggcaccatgcacgttccaatctgctgtcatgcctcaccacattggagtctctatccagtctggtccactctctccctaggatgattgtcatggatgaaattggaagacaggttgagctttctcttgaagctgcaaatttagcacagggaaatgcaactctaggaataagtgactcttcagcagtatctgcaacaagagccagggcactggctgaggatgcatttttccatccatccattatgtcaatcagttatgcttcagtagagcactatttcgccatttacatgccatttttcgcaccagtttccttgcatgtgctgctggcggcaatcaaagagctgaaacgttacaaggcagagcgagcaaaatattcggcatttcttgcttcccaggcgacatcctcctgatctggtgatgattagcacggatttgcaccagaaaattctgaacgtttatatgaagctgatggccactattggtactgcacatagtggagactggagagtaagcaacactgcagcgtcacttgttctaatgctcacggaagtggttaggatgtccaggtgatgtcaggccgagagctatagtcgaaatctctaccaattgagcagttcttgtaacccagattttgttcctagatacctcatacgtactcacattgaagttttttttaaaaaaaaatatatatttagaaaggacagacattaagattccagatcgaagatgttgagatggttaaagcattgctgcgaaatcagagccgaa

SEQ ID NO: 74624 - DNA, 4565 bp, Zea Mays
gcggtttctgtaaagcgggcacgctccccttcgccccccctcccgttctccagtccactccactccactccactcccgttcccctcccaattcccaaaggccaaagccctcctctgctccgctctgttccgctctgctccgaccaaatgcgcgattagagccgcccgcgagatcgatccccgcgcggccaaggatcatcggccgccatggcgtcctcgcaaggggagtcggtacccccgtggctcaagtctctccctctggcgcccgagttccgccccaccgtggccgagttcgccgaccccatcgcctacctcctcaagatcgagcctgccgcggcgccattcggcatctgcaagatcgtgccaccgctcccgccgccgcccaagcggaccacgctcggtaacctctcccgctccttcgccgcgctccacccggacgatcccaccccgacattccccacccggcaccagcagctgggcatctgcccgcgccgcccccgccccgcgctcaagcccgtgtggctctctccccaccgctacacgctccccaagttcgaggccaaggccggcgcctcccggaaggcgctgctcgcgcgcctcaatgtccccgcctccaagcagctctcgccgctcgacgtcgaggcgctcttctggcgctcatcggccgaccgccccgtcgtcgtggagtacgccagcgacatgcctggctccgggttcgcgccctgcgccgcacgcctgacgcagctgcccccggcgaacgtgggcgagacggcgtggaacatgcgccgtgtggccaggagccccgcgtctctgctgcgcttcgtgcgggaggaggtgcccggggtcacgtcgccgatgctctacgtcggcatgatgttcagttggttcgcctggcacgtcgaggaccatgacctgcacagcctcaactacatgcattacggggctcccaagacgtggtacggggtgccgcgcgacgctgcactcgccttcgtggaggtggttcgcgtccatgggtatggcggggaggtgaactccttagaaaccttcgcgatgctgggtgataagacgacagtgatgtcccctgaagtgctcgtggattcagggattccctgctgcagattagttcagagtgcaggggagttcgtggttactttccccggagcatatcacagcgggttcagtcatgggttcaattgtggggaagcgtcaaatatagccactcctgaatggttgatagttgcgaaagaggcagcagtccggagagcttccatcaatcgtcctcccatggtttcacactgtcagttgctctatgaacttgcgttgtcattgtgcttgagggatccatcaaatgacgttatggaaccacgaagctgtagattgaaggagaagaagaaaagtgaaggggaccaattgatcaaaaagatttttgtgcaaaatgttattgaagacaataaactgcttggtcattttctgagtgatgggtctccttgcattattcttccagtcaattacaatgatggctctccactatcaactttgctctcaaaatttcagtcaacaactgattcaaggatatcgcatggccagtgcagtaaggcagaagctccaaaagactccagacgcttaccaatggatggggctgacaagaaccgggaattgtcatcatccaacaaaaattcattgtcagccttctcaggaaagacagtcccactcccacctagaatctgcatacatgaatgtgcaaatgtgactggggcatcacacgcacataatgcagaaaatgacaaggtggatatgaacagtgctgctgggcttttagaccagggtttattatcctgtgtcacctgtgggattttgagtttttcatgtgtggcagtgatcaaaccaagggagtgtgcagcaaaatggttgatggctgctgattctagtttgatcaacgatcggcttgctagttctggagaacatgatatagatgcattacaaggtgggaggacaactggtggaattttacgatcagattctgaaatgaatggcaatagtatagtttctgatgctgatgctgcacctctcaatgggcattctgctcttgatcttttggcattagcttatggagatccatcagattctgatgaagatgttatgaacataaaaaatcaggtccctaatgtctccaatgaattaataaatcacacgattgaatcacaaccatatacttcatgtaatggtgattatgatggaacaaaagtgtcctcaagtagtaaagaacgcgaacaaggaccaacttcccatagctcaaagtgtattggtaactcaaacaccttgaatggaccaaaaggtgttcgcactagaaataaggatctacttaagatggtgctttccgaaggttttcaaccaaaaggtatatgttcagaaacgcataagaaggttcagtgtgagccatcaagctcaaaaaagacttcaatggagatcccttgtggcacagattatcatgttagccataacagtggtacaatctgtatggacagcagcagaggctctacaactacaactatggtgaacaacttagttacatcagttgtgaaacctgataaggattcatcaagaatgcatgtattttgtcttgaacatgctattgaggttgagaagcaacttcaagctattggtggtgctgatatttttcttttatgccgtccggaatatcccagaatagaagtagaagcaaaattgctggctggagaaatggatttcgagtatgattggaaggatattctttttaaagaggtcactatcaaggatagggagaagatacaggaagttgtgcgggatgaggaagcaataccaacaaatagtgattgggctgtaaaactgggcattaatctgtactatagtgctaatcttgctaagtctcctttatacagtaagcaagttccatacaatagagttatctatgaggcatttggctgcggttctcccaatgactcaccagtgaagctgaagacttattccagaaggcaatgcagggcgaagaaaatagtcttggctggcaggtggtgtggaaaagtatggatgtcaaaccaggttcatccatacctggctgacagaatcaaaaatcatgagccgaaagaaatcgatgaaacatttccttctgatcagaaatcccatgctgaacctgttgaaaattcaagtagagaggcagcctccacaagaaagagtagcagcagaacaattgaaggaaaaacaagcaagagggagaaagaacagttggagaaagctaatgccaagaagccaaaatttactgaagaggacaactccaaatcattggagggtactgctgaagcctccacacagaagataaagggcagatcagttctagaaaaaacaagcaagaaggagaaagcgtataccaagaagctaaagcatactgaaaaggtctcggaagcactaaaaggtccttcagaagcctccttccctgcaccagctgggatggtagtccgcagcagctctaggatcgccaataggaaaatcatgttgaaatcaaagatggaagaagaggataatggctcagctgaccgtccaaagtcaaaggtcgaagacgacaaagataatcctgctggccgttcaagagcaaaaccactaaggcaaaagactaaagtagacgcgaagaagaaaacgaaggaaactagagtagaaaagcgaaaggctcccagtccagcttctcagaaggacgaagaggagcaatcagatgatgtcgagggacgttctaccactaaacaacggctgtctttacgtaagaagggggctaaaacagaaggaaaacagcgaatggagaaacccagattcgggggaagtgctcctcccccaagctctccgaagcgcaaggaagagtacgtgtgcgacatcgaaggctgctccatgagtttcggcacagagcaggcgctgtccctgcacaagaacgacatctgcccggagaagggctgctgcaggaagttcttctcgcacaagtacctgcagcagcaccgcaaggtccacgccgacgaccggccgctgaagtgcccgtgggagggctgcggcatggcgttcaagtggccgtgggccaggacggagcacgtgagggtccacacgggggacaggccctacgtctgcctcgagcccgggtgcggccagacgttcaggttcgtctccgatttcagccgccacaagcgcaggacgggccatggcgcgtccaagaaggcgaaagcgaagaagcaaggcaaagcagcagtaacttagtactagtagtttagcacccaaaaccaatggcgcccttctgaaatgagtagccttggaagggacaggaggaaaacttgtagattccattagcagtttagcacccaaaaccaatggtggtctctgctcacagttccattaattgctagttgaacgggttcgttggagcccacaattaggttggttccctgtgagtaatttgggtaatcattaagacattctcgtacagtttgccttttgcctatcgttcgtttatcttttgctggatgatgtcttgcttatggtaagcacctgtctagc

SEQ ID NO: 74625 - DNA, 4878 bp, Zea Mays
ctccactccactccactcccgttcccctcccaattcccaaaggccaaagccctcctctgctccgctctgttccgctctgctccgaccaaatgcgcgattagagccgcccgcgagatcgatccccgcgcggccaaggatcatcggccgccatggcgtcctcgcaaggggagtcggtacccccgtggctcaagtctctccctctggcgcccgagttccgccccaccgtggccgagttcgccgaccccatcgcctacctcctcaagatcgagcctgccgcggcgccattcggcatctgcaagatcgtgccaccgctcccgccgccgcccaagcggaccacgctcggtaacctctcccgctccttcgccgcgctccacccggacgatcccaccccgacattccccacccggcaccagcagctgggcatctgcccgcgccgcccccgccccgcgctcaagcccgtgtggctctctccccaccgctacacgctccccaagttcgaggccaaggccggcgcctcccggaaggcgctgctcgcgcgcctcaatgtccccgcctccaagcagctctcgccgctcgacgtcgaggcgctcttctggcgctcatcggccgaccgccccgtcgtcgtggagtacgccagcgacatgcctggctccgggttcgcgccctgcgccgcacgcctgacgcagctgcccccggcgaacgtgggcgagacggcgtggaacatgcgccgtgtggccaggagccccgcgtctctgctgcgcttcgtgcgggaggaggtgcccggggtcacgtcgccgatgctctacgtcggcatgatgttcagttggttcgcctggcacgtcgaggaccatgacctgcacagcctcaactacatgcattacggggctcccaagacgtggtacggggtgccgcgcgacgctgcactcgccttcgtggaggtggttcgcgtccatgggtatggcggggaggtgaactccttagaaaccttcgcgatgctgggtgataagacgacagtgatgtcccctgaagtgctcgtggattcagggattccctgctgcagattagttcagagtgcaggggagttcgtggttactttccccggagcatatcacagcgggttcagtcatgggttcaattgtggggaagcgtcaaatatagccactcctgaatggttgatagttgcgaaagaggcagcagtccggagagcttccatcaatcgtcctcccatggtttcacactgtcagttgctctatgaacttgcgttgtcattgtgcttgagggatccatcaaatgacgttatggaaccacgaagctgtagattgaaggagaagaagaaaagtgaaggggaccaattgatcaaaaagatttttgtgcaaaatgttattgaagacaataaactgcttggtcattttctgagtgatgggtctccttgcattattcttccagtcaattacaatgatggctctccactatcaactttgctctcaaaatttcagtcaacaactgattcaaggatatcgcatggccagtgcagtaaggcagaagctccaaaagactccagacgcttaccaatggatggggctgacaagaaccgggaattgtcatcatccaacaaaaattcattgtcagccttctcaggaaagacagtcccactcccacctagaatctgcatacatgaatgtgcaaatgtgactggggcatcacacgcacataatgcagaaaatgacaaggtggatatgaacagtgctgctgggcttttagaccagggtttattatcctgtgtcacctgtgggattttgagtttttcatgtgtggcagtgatcaaaccaagggagtgtgcagcaaaatggttgatggctgctgattctagtttgatcaacgatcggcttgctagttctggagaacatgatatagatgcattacaaggtgggaggacaactggtggaattttacgatcagattctgaaatgaatggcaatagtatagtttctgatgctgatgctgcacctctcaatgggcattctgctcttgatcttttggcattagcttatggagatccatcagattctgatgaagatgttatgaacataaaaaatcaggtccctaatgtctccaatgaattaataaatcacacgattgaatcacaaccatatacttcatgtaatggtgattatgatggaacaaaagtgtcctcaagtagtaaagaacgcgaacaaggaccaacttcccatagctcaaagtgtattggtaactcaaacaccttgaatggaccaaaaggtgttcgcactagaaataaggatctacttaagatggtgctttccgaaggttttcaaccaaaaggtatatgttcagaaacgcataagaaggttcagtgtgagccatcaagctcaaaaaagacttcaatggagatcccttgtggcacagattatcatgttagccataacagtggtacaatctgtatggacagcagcagaggctctacaactacaactatggtgaacaacttagttacatcagttgtgaaacctgataaggattcatcaagaatgcatgtattttgtcttgaacatgctattgaggttgagaagcaacttcaagctattggtggtgctgatatttttcttttatgccgtccgggtcagtcattagacttgctcagtcgttcgttaccctgttttaatgtcacacccttttttaatgcaaacacaatatgttccttttttatcaaccattatgagcacttgcttcatgatcttcaagagtgcatgagttcatcattgaccaaactattacactctgaatacattaacgcatgtgccattggacatattgttctacattatcatcctttctgatttgggagcacgttatacttccattagctttggtgaagtgagaataagtaggctcaggcttcattactccagatcataattgtaccgaataacaaccactgcttcctaggttctcaaaaccttaaatgacacatttgttatcatttgtacagaatatcccagaatagaagtagaagcaaaattgctggctggagaaatggatttcgagtatgattggaaggatattctttttaaagaggtcactatcaaggatagggagaagatacaggaagttgtgcgggatgaggaagcaataccaacaaatagtgattgggctgtaaaactgggcattaatctgtactatagtgctaatcttgctaagtctcctttatacagtaagcaagttccatacaatagagttatctatgaggcatttggctgcggttctcccaatgactcaccagtgaagctgaagacttattccagaaggcaatgcagggcgaagaaaatagtcttggctggcaggtggtgtggaaaagtatggatgtcaaaccaggttcatccatacctggctgacagaatcaaaaatcatgagccgaaagaaatcgatgaaacatttccttctgatcagaaatcccatgctgaacctgttgaaaattcaagtagagaggcagcctccacaagaaagagtagcagcagaacaattgaaggaaaaacaagcaagagggagaaagaacagttggagaaagctaatgccaagaagccaaaatttactgaagaggacaactccaaatcattggagggtactgctgaagcctccacacagaagataaagggcagatcagttctagaaaaaacaagcaagaaggagaaagcgtataccaagaagctaaagcatactgaaaaggtctcggaagcactaaaaggtccttcagaagcctccttccctgcaccagctgggatggtagtccgcagcagctctaggatcgccaataggaaaatcatgttgaaatcaaagatggaagaagaggataatggctcagctgaccgtccaaagtcaaaggtcgaagacgacaaagataatcctgctggccgttcaagagcaaaaccactaaggcaaaagactaaagtagacgcgaagaagaaaacgaaggaaactagagtagaaaagcgaaaggctcccagtccagcttctcagaaggacgaagaggagcaatcagatgatgtcgagggacgttctaccactaaacaacggctgtctttacgtaagaagggggctaaaacagaaggaaaacagcgaatggagaaacccagattcgggggaagtgctcctcccccaagctctccgaagcgcaaggaagagtacgtgtgcgacatcgaaggctgctccatgagtttcggcacagagcaggcgctgtccctgcacaagaacgacatctgcccggagaagggctgctgcaggaagttcttctcgcacaagtacctgcagcagcaccgcaaggtccacgccgacgaccggccgctgaagtgcccgtgggagggctgcggcatggcgttcaagtggccgtgggccaggacggagcacgtgagggtccacacgggggacaggccctacgtctgcctcgagcccgggtgcggccagacgttcaggttcgtctccgatttcagccgccacaagcgcaggacgggccatggcgcgtccaagaaggcgaaagcgaagaagcaaggcaaagcagcagtaacttagtactagtagtttagcacccaaaaccaatggcgcccttctgaaatgagtagccttggaagggacaggaggaaaacttgtagattccattagcagtttagcacccaaaaccaatggtggtctctgctcacagttccattaattgctagttgaacgggttcgttggagcccacaattaggttggttccctgtgagtaatttgggtaatcattaagacattctcgtacagtttgccttttgcctatcgttcgtttatcttttgctggatgatgtcttgcttatggtaagcacctgtctagc

SEQ ID NO: 74626 - DNA, 4467 bp, Zea Mays
tccactccactccactcccgttcccctcccaattcccaaaggccaaagccctcctctgctccgctctgttccgctctgctccgaccaaatgcgcgattagagccgcccgcgagatcgatccccgcgcggccaaggatcatcggccgccatggcgtcctcgcaaggggagtcggtacccccgtggctcaagtctctccctctggcgcccgagttccgccccaccgtggccgagttcgccgaccccatcgcctacctcctcaagatcgagcctgccgcggcgccattcggcatctgcaagatcgtgccaccgctcccgccgccgcccaagcggaccacgctcggtaacctctcccgctccttcgccgcgctccacccggacgatcccaccccgacattccccacccggcaccagcagctgggcatctgcccgcgccgcccccgccccgcgctcaagcccgtgtggctctctccccaccgctacacgctccccaagttcgaggccaaggccggcgcctcccggaaggcgctgctcgcgcgcctcaatgtccccgcctccaagcagctctcgccgctcgacgtcgaggcgctcttctggcgctcatcggccgaccgccccgtcgtcgtggagtacgccagcgacatgcctggctccgggttcgcgccctgcgccgcacgcctgacgcagctgcccccggcgaacgtgggcgagacggcgtggaacatgcgccgtgtggccaggagccccgcgtctctgctgcgcttcgtgcgggaggaggtgcccggggtcacgtcgccgatgctctacgtcggcatgatgttcagttggttcgcctggcacgtcgaggaccatgacctgcacagcctcaactacatgcattacggggctcccaagacgtggtacggggtgccgcgcgacgctgcactcgccttcgtggaggtggttcgcgtccatgggtatggcggggaggtgaactccttagaaaccttcgcgatgctgggtgataagacgacagtgatgtcccctgaagtgctcgtggattcagggattccctgctgcagattagttcagagtgcaggggagttcgtggttactttccccggagcatatcacagcgggttcagtcatgggttcaattgtggggaagcgtcaaatatagccactcctgaatggttgatagttgcgaaagaggcagcagtccggagagcttccatcaatcgtcctcccatggtttcacactggatccatcaaatgacgttatggaaccacgaagctgtagattgaaggagaagaagaaaagtgaaggggaccaattgatcaaaaagatttttgtgcaaaatgttattgaagacaataaactgcttggtcattttctgagtgatgggtctccttgcattattcttccagtcaattacaatgatggctctccactatcaactttgctctcaaaatttcagtcaacaactgattcaaggatatcgcatggccagtgcagtaaggcagaagctccaaaagactccagacgcttaccaatggatggggctgacaagaaccgggaattgtcatcatccaacaaaaattcattgtcagccttctcaggaaagacagtcccactcccacctagaatctgcatacatgaatgtgcaaatgtgactggggcatcacacgcacataatgcagaaaatgacaaggtggatatgaacagtgctgctgggcttttagaccagggtttattatcctgtgtcacctgtgggattttgagtttttcatgtgtggcagtgatcaaaccaagggagtgtgcagcaaaatggttgatggctgctgattctagtttgatcaacgatcggcttgctagttctggagaacatgatatagatgcattacaaggtgggaggacaactggtggaattttacgatcagattctgaaatgaatggcaatagtatagtttctgatgctgatgctgcacctctcaatgggcattctgctcttgatcttttggcattagcttatggagatccatcagattctgatgaagatgttatgaacataaaaaatcaggtccctaatgtctccaatgaattaataaatcacacgattgaatcacaaccatatacttcatgtaatggtgattatgatggaacaaaagtgtcctcaagtagtaaagaacgcgaacaaggaccaacttcccatagctcaaagtgtattggtaactcaaacaccttgaatggaccaaaaggtgttcgcactagaaataaggatctacttaagatggtgctttccgaaggttttcaaccaaaaggtatatgttcagaaacgcataagaaggttcagtgtgagccatcaagctcaaaaaagacttcaatggagatcccttgtggcacagattatcatgttagccataacagtggtacaatctgtatggacagcagcagaggctctacaactacaactatggtgaacaacttagttacatcagttgtgaaacctgataaggattcatcaagaatgcatgtattttgtcttgaacatgctattgaggttgagaagcaacttcaagctattggtggtgctgatatttttcttttatgccgtccggaatatcccagaatagaagtagaagcaaaattgctggctggagaaatggatttcgagtatgattggaaggatattctttttaaagaggtcactatcaaggatagggagaagatacaggaagttgtgcgggatgaggaagcaataccaacaaatagtgattgggctgtaaaactgggcattaatctgtactatagtgctaatcttgctaagtctcctttatacagtaagcaagttccatacaatagagttatctatgaggcatttggctgcggttctcccaatgactcaccagtgaagctgaagacttattccagaaggcaatgcagggcgaagaaaatagtcttggctggcaggtggtgtggaaaagtatggatgtcaaaccaggttcatccatacctggctgacagaatcaaaaatcatgagccgaaagaaatcgatgaaacatttccttctgatcagaaatcccatgctgaacctgttgaaaattcaagtagagaggcagcctccacaagaaagagtagcagcagaacaattgaaggaaaaacaagcaagagggagaaagaacagttggagaaagctaatgccaagaagccaaaatttactgaagaggacaactccaaatcattggagggtactgctgaagcctccacacagaagataaagggcagatcagttctagaaaaaacaagcaagaaggagaaagcgtataccaagaagctaaagcatactgaaaaggtctcggaagcactaaaaggtccttcagaagcctccttccctgcaccagctgggatggtagtccgcagcagctctaggatcgccaataggaaaatcatgttgaaatcaaagatggaagaagaggataatggctcagctgaccgtccaaagtcaaaggtcgaagacgacaaagataatcctgctggccgttcaagagcaaaaccactaaggcaaaagactaaagtagacgcgaagaagaaaacgaaggaaactagagtagaaaagcgaaaggctcccagtccagcttctcagaaggacgaagaggagcaatcagatgatgtcgagggacgttctaccactaaacaacggctgtctttacgtaagaagggggctaaaacagaaggaaaacagcgaatggagaaacccagattcgggggaagtgctcctcccccaagctctccgaagcgcaaggaagagtacgtgtgcgacatcgaaggctgctccatgagtttcggcacagagcaggcgctgtccctgcacaagaacgacatctgcccggagaagggctgctgcaggaagttcttctcgcacaagtacctgcagcagcaccgcaaggtccacgccgacgaccggccgctgaagtgcccgtgggagggctgcggcatggcgttcaagtggccgtgggccaggacggagcacgtgagggtccacacgggggacaggccctacgtctgcctcgagcccgggtgcggccagacgttcaggttcgtctccgatttcagccgccacaagcgcaggacgggccatggcgcgtccaagaaggcgaaagcgaagaagcaaggcaaagcagcagtaacttagtactagtagtttagcacccaaaaccaatggcgcccttctgaaatgagtagccttggaagggacaggaggaaaacttgtagattccattagcagtttagcacccaaaaccaatggtggtctctgctcacagttccattaattgctagttgaacgggttcgttggagcccacaattaggttggttccctgtgagtaatttgggtaatcattaagacattctcgtacagtttgccttttgcctatcgttcgtttatcttttgctggatgatgtcttgcttatggtaagcacctgtctagc

SEQ ID NO: 74627 - DNA, 2053 bp, Zea Mays
tccttatcgcaaccgactcgcaaccatagattcatagtagtactcgtagctcctcggcctcagcgaccaccgccattaacaccgcctgatctccggctaccgagtagcatccataaaactactgcacacacaccaatacgaccacccccaccgcgaatgatccatggagtttgaggagacgccggcggatgaatctagcctgaatcttcgacggcgacgcccccgacggacgagcaggggccggcagcccaagagcccagcccaggcagccaacttggcacagcgcacttgcaggatggcgcaggtctctaagacgcttctccttgtggccctggtgttcgtgtcgtcggcggcggtggagctgtgccgcgcgatcgacttcgacgagcgggacctggcgtcggacgaggcgctgtgggacctgtacgagcggtggcagacgcaccaccgggtgcaccggcaccacggcgagaagggccggcggttcgggacgttcaaggagaacgtgcgcttcatccacgcgcacaacaagcgcggcgaccggccctaccgcctccgcctgaaccggttcggcgacatggggcgggaggagttccggtccacgttcgccgactcccgcatcaacgacctccggcggcaggattcccccgcggcgcgggccggggccgtgccggggttcatgtacgactccgccgccgacccgccgcggtccgtggactggcggcaggagggcgcggtgacgggcgtgaaggaccagggccactgcggaagctgctgggccttctcgacggtggtggccgtggagggcatcaacgccatccggacgggcagcctggcgtcgctgtcggagcaggagctgatcgactgcgacacggacgagaacgggtgccagggcgggctgatggagaacgccttcgagttcatcaagtccttcggcggcatcaccaccgaggccgcgtacccgtaccgcgcgtccaacggcacctgcgacggcgatcgggcccggcgcgggggaggcgtcgtcgtggtgatcgacggccaccagatggtgccggccggcagcgaggacgcgctggccaaggcggtggcgcaccagccggtgtccgtggccgtcgacgcggggggccaggcgttccagttctactcggagggcgtgttcacgggcgactgcggtacggacctggaccacggcgtggcggcggtcggctacggcgtcggcgacgacggcacgccctactggatcgtcaagaactcctggggcacctcctggggcgagggtggctacatccggatgcagcgcggcgccggcaacggcggcctctgcggcatcgccatggaggcgtccttccccatcaagacctcgcccaaccctgcagacccgccgcgcaagccccgccgcgcgctcatcgccagggacacctcttcttcccagtgacacacacgaccacaactggcacgtaagtacacgttgccaggaatgacatgctatgctactagtgtttgcttgaactattatcgattgggtttgtactagtgatgacagtttcatcgattgcgcggtcgatctccatcagagacagagacgatataatcagaataaagtatagcagcgcgtgtgcgcaacagggtaagattaggcgtgtgatttgatttcaaagctgtgcttgtaacgtaatgtaatacggtgtggcatatgcaccgggatatggtatgtgtattgggaagacgctatgcgtagcgtaagctagcagttgttgcattgcatttgcatgcttggatcggatatgcatgtgttcttctgcctgcgacatcggtagcgcgtgaggctgtgactctgtgagctgcgatttccgcagttgaatcggtagtgtaagcggaaatgtcggaatttaaatctggctggatttcgttcagagcggcagggcttgtttgtttcatggatttgaaattgttttggtttattggaggtcatcctgcaaggtgcaaggcaacagatcctgggtcctggctccggctctgagcagcgtccaaaattggaggcctgggaagcctg

SEQ ID NO: 74628 - DNA, 800 bp, Zea Mays
aaaataacaattttttcttcgcctgctaaatagttaaagggttcctctctacgcacgtctccgagtccgagaggacttctcgagcgagttcgcgaatccaattctcccagcgagggaagtcatggtagtgatcgagctggagcccgaggaggcgacgcgcccctcgtcaccggcatcggaggagaaggcggctgccgcggccggtggggaggcggcgcgcccatcgtcttcagcggcgcccgaggaggcgcccaccgccgccgccgccgctgttggcggggaggcgtcgagggcggccggagaagaggaggaagccttcgaggacgcgctcaccgacgagcagctgcgagagaaatctagaagccaagcaaatgatgcaaaagcagaaggaaacaagttttttgggtccggacaatatgaggaagcattatctaagtatgaaatggcattgcaaattgctgctgagctggaatcttctgaggatatacgtgcagcatgccattcaaatcgtgctgtgtgcttcctgaaattgggaaagcatgatgagacggttaaagaatgcacaaaagcacttgagctcaatccatcgtacctgaaagccctgcttcggagggcagaagcgcacgaaaagctcgaacactatgatgaagctattgccgatatgaaaaaggttattgaaatggatccttcaaatcaacaagccacaaggtctcttttccggcttgagcccctggcagctgagaagagggaaaagatgaaggaagaaatgattgatatctctcctgtaaaatggcttttct

SEQ ID NO: 74629 - DNA, 1285 bp, Zea Mays
aaaataacaattttttcttcgcctgctaaatagttaaagggttcctctctacgcacgtctccgagtccgagaggacttctcgagcgagttcgcgaatccaattctcccagcgagggaagtcatggtagtgatcgagctggagcccgaggaggcgacgcgcccctcgtcaccggcatcggaggagaaggcggctgccgcggccggtggggaggcggcgcgcccatcgtcttcagcggcgcccgaggaggcgcccaccgccgccgccgccgctgttggcggggaggcgtcgagggcggccggagaagaggaggaagccttcgaggacgcgctcaccgacgagcagctgcgagagaagccaagcaaatgatgcaaaagcagaaggaaacaagttttttgggtccggacaatatgaggaagcattatctaagtatgaaatggcattgcaaattgctgctgagctggaatcttctgaggatatacgtgcagcatgccattcaaatcgtgctgtgtgcttcctgaaattgggaaagcatgatgagacggttaaagaatgcacaaaagcacttgagctcaatccatcgtacctgaaagccctgcttcggagggcagaagcgcacgaaaagctcgaacactatgatgaagctattgccgatatgaaaaaggttattgaaatggatccttcaaatcaacaagccacaaggtctcttttccggcttgagcccctggcagctgagaagagggaaaagatgaaggaagaaatgattggaaagctaaaagatctgggtaactccgtgctggggcgcttcggaatgagcgttgacaatttcaaagccgtcaaagatccaaacactggttcttacagcatccagttccagaagtgacacaacgtgaagaaagacatagatgaatggctgggccgctgggcggcatatttaagttgcaattgttcgaggcacttgtgcttcacatacctggaccatatccaaatagatacctgcaaatcgatccaaatagaagaggaactggattattgcgttgtgtttgcacttgacgttagagatgctttccgaagtgcaaagttgcacgaccattttgaactgtggtattttcttcaatatagttgttttctctatgttgcaaacgatgccttttcgtttagagcccgcctagtcaaatttattatacttgctctaaggaacccgtagactgcagaagaatggcagcaacaaaccaaatgtgagatctatactgttgtgtgagtgcctccaactgttctgttatgtcc

SEQ ID NO: 74630 - DNA, 1816 bp, Zea Mays
aaagtctactatttagcatccgcatgttagtaattttttagcaagaatgcaatatcggtacatagtatgccatgaatctttttacctatctttctagcattccatttgatgaaaaaagagagtaggagtgtgttgtgtgtgtgatagggggtgtacagaggagaaaaatctcaaatgcatggctcaacagctcttgtcatgtgcctcttgtcttcttgccttatagaatgcagattctagaggcgatcactacacactgcacacacaaccttcccctctgtatagctaatccaatcgacaaatccagtgtgtgcgctctctctttctcaaaactattgtctcttttttggattctaatattcacccaatcattgtttttgttttgtctcatgtaaattttagaacatcaaatcctatgtttttgtaattttactcttgcgagctcaaattatttgcataataatcagccgactgggatagagctttagccatacgttcctcttatatgttcagctatgtcgtgtgaactgaatgaaaatgatctgagctctactaaaaatatatgttcaccatgctatcatgcttagtaacagcgatatggcattgttagaagtacaaaaatctaggacctcacatgattactctctattgtctaaattttattttccagtataaccagttagtgcactccgtgtccataaaaatgacgcaaggacagatggggcaaggcaaacatgtatcactccaaagtacaaatagaccaatggaactatttgtattaataatattaattatataagtggtaattctattggtctattgacaatatatcttatccatggaaacagttggctggaccttgagttttttctctttcatagacaggactggacgcgacttgtggctattttctctctgtttataatattttgcagggctagaattattcctccaattcattgtttcgattaaaaaaagatacctacaatcttttctgtggcacctcttcagcacaaccgttatattcgttcttgcacttgtcagagtattatacccttacaaccatggtgcaaaatcaacgacattctttaaatgtttgtgttgagcttcactgttcaattgctccatcacagatgtagatttgatatctacattctgctttcacatacctataaaggagttatttttcatattttggtatgttgttgttttcactaaacttcaagagattttaattgtcaacctcatatgttggaaagcagatggttctagacacacttgaagaatggttgtcactgaacttaagggattttaattgttactgaactttattgatgcatagtgaatttaccattctaattgttgtgactgcatgatatcaaaacagtgacatgtctttttagttgctactgttgtcgggttgggtggtggaggagaaaacaatgatcccactgctcaatctatcgatatatgagccaaacaagacacaaatcatggaacaagtgaattgcctacatcttaccatcagtgtgttgaagaatggttggatgacaaaggccaaggagaatgctgcagctatgttattcagtttatatgtggtccatgacaataaaaaagataatgaatgatccagagaatgtggaatgtatgcatagccttttattcgagtcagctattaaacaagaaaaatggttggagtgattaaacaggctaaactattgttcaagtgagtagagatattttgcaacacttaaataatggatagtgtcttatcgttatagtttcctatcatatttttatgtaccatgcataattt

SEQ ID NO: 74631 - DNA, 2209 bp, Zea Mays
aaccgctttttaaagctcccccacccccggcctcccctgccttcctgctccccccacactcccccacttcgccttcgcccaccccctccgctgcgagcgcgaggcgcggagggaggggctagcgctagcgctagcggctgcggcgccatggccctggccgacgccaccgcgttcccctacggcctgcgcgtcctcgtcgtcgacgacgaccccacctggctcaagatcctcgagaagatgctccgcaagtgctcctacgaagtcaccacatgcggtttggctagcgttgctctccaaattctccgagagaggagaaacaagtttgacattgtaatcagtgatgtcaacatgcctgacatggatggtttcaagcttctcgaactcattgggcttgagatggatctacctgttataagtaccaaattgctccaatctgtttccacagtgatgtccatagacggagagacaagtagagtgatgaaaggtgtacatcatggtgcgtgtgactatctcctcaagcctgttcggatgaaggaactccgaaacatttggcaacatgtgtataggaagaaaatgcacgaggtgaaagagattgaagatggattggatgagaggggcctatttatgagagctgacactgataccatgaggaagagaaaagaagtggataaggaccatgcagaccaggactcaagtgatggagctactgctaagaaggctagagttgtctggtctgttgaccttcaccaaaagtttgtaaatgctgtcaaccaaattggatttgacaaagtggggccgaagaaaatacttgatcttatgaatgttcatggcctgacaagagagaacgtggccagccatcttcagaatatcgcctctacttgagtaggttgcaaaagcagaacgaagaaaggataatgggtgcggctaggcaagatttcaatcaaaaggggccatcagataatcttaacctccgaagttccttccaagagcagccaggaaaccttaccaatggatttcagcatagttctcagaaggtccaatctcagaccaacattctcgatcctcatctggacgacacgaagacttcagtgcccttgaaagtgccagataaaaatggaacttcagcaagtgatgctgctgaccatcagaacatcaccggtgtttcacctttaggtgggggtggggtgttctcttttgaaagaatgccagtgaatcaggacacgaagctatcggaagccatgatcttggaatgtcagtcctggagtggtggtgtgccaccaaagcagttcatgcagtatccaaagcataaccatgagcgctgcgaccttctaggagactattcttgcctgcccaaaccggacttagagcacccaattgcgcctagccatctttatgccccaccacctgtaatatcgatgagttgcagtgtggagggagatgtcagagacttctcagatgtaaaaccagatcttcttggctgtatgaagtccttatcaccggcactgacatgtacagttgagtcagtttctgctcaactcagtgacagtgttgtgagctcaactaacaatgacaagaagatttccagtgtggaggggttgtccagcgttaaagattgtgactttgatcaggaaaggaaccaagccattttgcttacttcagaagaggcaagtatattatgcagcactgatttgacttgtctacctgatgaactgtccggctatcaacttcaaggcgtctccttcggggatataggactgaatagcatcgatttattccagtgcaatgatacaatggtactacctggactgcagaataactggtatgatgatccagattttagcaatgaaactatggagttcccgttgctagacggaggtctgtttgcataaatgcctcagcgggccctatcttttgatcatgcccttatgtgagttctttggtatgttcccgtatagtgcctcctgtagggctatactaatctaactttatcatgtggtggaagggtttaatttgtagtctctccacttttgataattgtctgtattatagaccgtgccatggtacaatgactgcaatatatactcttcacaatgatcaaaactacatatgaagactgtcaaatttttgccttgaacaactgacttttgcagtaaattcttactctgatgcagcattgcacatatgtgagacttataaatttcactgaaaa

SEQ ID NO: 74632 - DNA, 2078 bp, Zea Mays
atggccctggccgacgccaccgcgttcccctacggcctgcgcgtcctcgtcgtcgacgacgaccccacctggctcaagatcctcgagaagatgctccgcaagtgctcctacgaagtcaccacatgcggtttggctagcgttgctctccaaattctccgagagaggagaaacaagtttgacattgtaatcagtgatgtcaacatgcctgacatggatggtttcaagcttctcgaactcattgggcttgagatggatctacctgttataatgatgtccatagacggagagacaagtagagtgatgaaaggtgtacatcatggtgcgtgtgactatctcctcaagcctgttcggatgaaggaactccgaaacatttggcaacatgtgtataggaagaaaatgcacgaggtgaaagagattgaaggtaatgacagctgcgatgatctcccaatatttagaaatggtttagatggattggatgagaggggcctatttatgagagctgacactgataccatgaggaagagaaaagaagtggataaggaccatgcagaccaggactcaagtgatggagctactgctaagaaggctagagttgtctggtctgttgaccttcaccaaaagtttgtaaatgctgtcaaccaaattggatttgacaaagtggggccgaagaaaatacttgatcttatgaatgttcatggcctgacaagagagaacgtggccagccatcttcagaaatatcgcctctacttgagtaggttgcaaaagcagaacgaagaaaggataatgggtgcggctaggcaagatttcaatcaaaaggggccatcagataatcttaacctccgaagttccttccaagagcagccaggaaaccttaccaatggatttcagcatagttctcagaaggtccaatctcagaccaacattctcgatcctcatctggacgacacgaagacttcagtgcccttgaaagtgccagataaaaatggaacttcagcaagtgatgctgctgaccatcagaacatcaccggtgtttcacctttaggtgggggtggggtgttctcttttgaaagaatgccagtgaatcaggacacgaagctatcggaagccatgatcttggaatgtcagtcctggagtggtggtgtgccaccaaagcagttcatgcagtatccaaagcataaccatgagcgctgcgaccttctaggagactattcttgcctgcccaaaccggacttagagcacccaattgcgcctagccatctttatgccccaccacctgtaatatcgatgagttgcagtgtggagggagatgtcagagacttctcagatgtaaaaccagatcttcttggctgtatgaagtccttatcaccggcactgacatgtacagttgagtcagtttctgctcaactcagtgacagtgttgtgagctcaactaacaatgacaagaagatttccagtgtggaggggttgtccagcgttaaagattgtgactttgatcaggaaaggaaccaagccattttgcttacttcagaagaggcaagtatattatgcagcactgatttgacttgtctacctgatgaactgtccggctatcaacttcaaggcgtctccttcggggatataggactgaatagcatcgatttattccagtgcaatgatacaatggtactacctggactgcagaataactggtatgatgatccagattttagcaatgaaactatggagttcccgttgctagacggaggtctgtttgcataaatgcctcagcgggccctatcttttgatcatgcccttatgtgagttctttggtatgttcccgtatagtgcctcctgtagggctatactaatctaactttatcatgtggtggaagggtttaatttgtagtctctccacttttgataattgtctgtattatagaccgtgccatggtacaatgactgcaatatatactcttcacaatgatcaaaactacatatgaagactgtcaaatttttgccttgaacaactgacttttgcagtaaattcttactctgatgcagcattgcacatatgtgagacttataaatttcactgaaaa

SEQ ID NO: 74633 - DNA, 2061 bp, Zea Mays
atggccctggccgacgccaccgcgttcccctacggcctgcgcgtcctcgtcgtcgacgacgaccccacctggctcaagatcctcgagaagatgctccgcaagtgctcctacgaagatgctatgagtgatcggaccgtgatcgctcggacaggaggcatttcttcctgtgtcaccacatgcggtttggctagcgttgctctccaaattctccgagagaggagaaacaagtttgacattgtaatcagtgatgtcaacatgcctgacatggatggtttcaagcttctcgaactcattgggcttgagatggatctacctgttataagtaccaaattgctccaatctgtttccacagtgatgtccatagacggagagacaagtagagtgatgaaaggtgtacatcatggtgcgtgtgactatctcctcaagcctgttcggatgaaggaactccgaaacatttggcaacatgtgtataggaagaaaatgcacgaggtgaaagagattgaagagaaaagaagtggataaggaccatgcagaccaggactcaagtgatggagctactgctaagaaggctagagttgtctggtctgttgaccttcaccaaaagtttgtaaatgctgtcaaccaaattggatttgacaaagtggggccgaagaaaatacttgatcttatgaatgttcatggcctgacaagagagaacgtggccagccatcttcagaaatatcgcctctacttgagtaggttgcaaaagcagaacgaagaaaggataatgggtgcggctaggcaagatttcaatcaaaaggggccatcagataatcttaacctccgaagttccttccaagagcagccaggaaaccttaccaatggatttcagcatagttctcagaaggtccaatctcagaccaacattctcgatcctcatctggacgacacgaagacttcagtgcccttgaaagtgccagataaaaatggaacttcagcaagtgatgctgctgaccatcagaacatcaccggtgtttcacctttaggtgggggtggggtgttctcttttgaaagaatgccagtgaatcaggacacgaagctatcggaagccatgatcttggaatgtcagtcctggagtggtggtgtgccaccaaagcagttcatgcagtatccaaagcataaccatgagcgctgcgaccttctaggagactattcttgcctgcccaaaccggacttagagcacccaattgcgcctagccatctttatgccccaccacctgtaatatcgatgagttgcagtgtggagggagatgtcagagacttctcagatgtaaaaccagatcttcttggctgtatgaagtccttatcaccggcactgacatgtacagttgagtcagtttctgctcaactcagtgacagtgttgtgagctcaactaacaatgacaagaagatttccagtgtggaggggttgtccagcgttaaagattgtgactttgatcaggaaaggaaccaagccattttgcttacttcagaagaggcaagtatattatgcagcactgatttgacttgtctacctgatgaactgtccggctatcaacttcaaggcgtctccttcggggatataggactgaatagcatcgatttattccagtgcaatgatacaatggtactacctggactgcagaataactggtatgatgatccagattttagcaatgaaactatggagttcccgttgctagacggaggtctgtttgcataaatgcctcagcgggccctatcttttgatcatgcccttatgtgagttctttggtatgttcccgtatagtgcctcctgtagggctatactaatctaactttatcatgtggtggaagggtttaatttgtagtctctccacttttgataattgtctgtattatagaccgtgccatggtacaatgactgcaatatatactcttcacaatgatcaaaactacatatgaagactgtcaaatttttgccttgaacaactgacttttgcagtaaattcttactctgatgcagcattgcacatatgtgagacttataaatttcactgaaaa

SEQ ID NO: 74634 - DNA, 1898 bp, Zea Mays
atggccctggccgacgccaccgcgttcccctacggcctgcgcgtcctcgtcgtcgacgacgaccccacctggctcaagatcctcgagaagatgctccgcaagtgctcctacgaagatgctatgagtgatcggaccgtgatcgctcggacaggaggcatttcttcctgtgtcaccacatgcggtttggctagcgttgctctccaaattctccgagagaggagaaacaagtttgacattgtaatcagtgatgtcaacatgcctgacatggatggtttcaagcttctcgaactcattgggcttgagatggatctacctgttataatgatgtccatagacggagagacaagtagagtgatgaaaggtgtacatcatggtgcgtgtgactatctcctcaagcctgttcggatgaaggaactccgaaacatttggcaacatgtgtataggaagaaaatgcacgaggtgaaagagattgaagaagtggggccgaagaaaatacttgatcttatgaatgttcatggcctgacaagagagaacgtggccagccatcttcagaaatatcgcctctacttgagtaggttgcaaaagcagaacgaagaaaggataatgggtgcggctaggcaagatttcaatcaaaaggggccatcagataatcttaacctccgaagttccttccaagagcagccaggaaaccttaccaatggatttcagcatagttctcagaaggtccaatctcagaccaacattctcgatcctcatctggacgacacgaagacttcagtgcccttgaaagtgccagataaaaatggaacttcagcaagtgatgctgctgaccatcagaacatcaccggtgtttcacctttaggtgggggtggggtgttctcttttgaaagaatgccagtgaatcaggacacgaagctatcggaagccatgatcttggaatgtcagtcctggagtggtggtgtgccaccaaagcagttcatgcagtatccaaagcataaccatgagcgctgcgaccttctaggagactattcttgcctgcccaaaccggacttagagcacccaattgcgcctagccatctttatgccccaccacctgtaatatcgatgagttgcagtgtggagggagatgtcagagacttctcagatgtaaaaccagatcttcttggctgtatgaagtccttatcaccggcactgacatgtacagttgagtcagtttctgctcaactcagtgacagtgttgtgagctcaactaacaatgacaagaagatttccagtgtggaggggttgtccagcgttaaagattgtgactttgatcaggaaaggaaccaagccattttgcttacttcagaagaggcaagtatattatgcagcactgatttgacttgtctacctgatgaactgtccggctatcaacttcaaggcgtctccttcggggatataggactgaatagcatcgatttattccagtgcaatgatacaatggtactacctggactgcagaataactggtatgatgatccagattttagcaatgaaactatggagttcccgttgctagacggaggtctgtttgcataaatgcctcagcgggccctatcttttgatcatgcccttatgtgagttctttggtatgttcccgtatagtgcctcctgtagggctatactaatctaactttatcatgtggtggaagggtttaatttgtagtctctccacttttgataattgtctgtattatagaccgtgccatggtacaatgactgcaatatatactcttcacaatgatcaaaactacatatgaagactgtcaaatttttgccttgaacaactgacttttgcagtaaattcttactctgatgcagcattgcacatatgtgagacttataaatttcactgaaaa

SEQ ID NO: 74635 - DNA, 1334 bp, Zea Mays
ttgcggcggtgcggcgcacatctcccagggacaggctcgtaatttttccactggccatcgcacccattcataaaaccctaaacccaggacccaggtttatcggtgaggcgagccgcgagtggaactgtggaagcgttgagcttttttcttctttgtcttgctgcgcaagaagaagggaaacgagaggcgggcggcgatggcgaagaggctgctcccgtcgctgaaccgggtgctggtggagaagctggtgcagcccaagaagaccgccggcggcatcctcgtcccggaaacatccaagcagctcccacctcctgcattcgtgaagaacgactgaaccagccgccactcgcccgtccgactccggctccggccagctgcctctgtccctccgccgagctgcccgtccgccttcgtccctccggcccaggcgagcagaactccgcccccacccgccccgagccgagcagcagccagcagagccgcatcgccgccggggaacgctgagttgccggtccgccgccctgagaagatttccgtcccagcagcatagccgcagcgccgctgcccgtcgcctcaaggcaagtccgagcgccctgtcacaggccccagattaggttgatgtctttcctgagactgttgcctcaaaggctaccccaacttatcaggcaggtggagcaagatgttgagactgtaatccacgttctccagccgggtccaataggaattgtggagcacaaattcacagacgcggagatcttagaggccagggctacagtgaaaagagcagtggataattggcgaagaaattggacccttgagagaaatgttagcagataaatggaaaaaatatacccctggtgtcttctatcaacagtaattgaaataaatagggtgccatggctggatgcagttgttgccattagttagatttgagcacgatctgcttatcgggagttatgttaactgttctaaatgatcagtctgtttctctttgtttcatggttcgactccgattcattccttgtttggaaatgatctttttttcatcatactactatatgggacattttttttttgttcattgcattgtcggtagccggctggcatattggatgtgatcctttcttttgatgcttcagtactttaactgtagtatctgaagagatacttgaagatcagtaacttcatgatccttgaccattgtgtcataatgccatactattttcactaactatcttcacctgctcatgtacaatcctggccctctgaatcggtttttgaagacaagaaggtttttgaagacaataaaaatctaaaagactgcatgatataat

SEQ ID NO: 74636 - DNA, 1341 bp, Zea Mays
tctcccagggacaggctcgtaatttttccactggccatcgcacccattcataaaaccctaaacccaggacccaggtttatcggtgaggcgagccgcgagtggaactgtggaagcgttgagcttttttcttctttgtcttgctgcgcaagaagaagggaaacgagaggcgggcggcgatggcgaagaggctgctcccgtcgctgaaccgggtgctggtggagaagctggtgcagcccaagaagaccgccggcggcatcctcgtcccggaaacatccaagcagctcccacctcctgcattcgtgaagaacgactgaaccagccgccactcgcccgtccgactccggctccggccagctgcctctgtccctccgccgagctgcccgtccgccttcgtccctccggcccaggcgagcagaactccgcccccacccgccccgagccgagcagcagccagcagagccgcatcgccgccggggaacgctgagttgccggtccgccgccctgagaagatttccgtcccagcagcatagccgcagcgccgctgcccgtcgcctcaaggcaagtccgagcgccctgtcacaggccccaggttgatgtctttcctgagactgttgcctcaaaggctaccccaacttatcaggcaggtggagcaagatgttgagactgtaatccacgttctccagccgggtccaataggaattgtggagcacaaattcacagacgcggagatcttagaggccagggctacagtgaaaagagcagtggataattggcgaagaaattggacccttgagagaaatgttagcagataaatggaaaaaatatacccctggtgtcttctatcaacagtaattgaaataaatagggtgccatggctggatgcagttgttgccattagttagatttgagcacgatctgcttatcgggagttatgttaactgttctaaatgatcagtctgtttctctttgtttcatggtttgaaacgttcatatttagagaatgcagtaattcgactccgattcattccttgtttggaaatgatctttttttcatcatactactatatgggacattttttttttgttcattgcattgtcggtagccggctggcatattggatgtgatcctttcttttgatgcttcagtactttaactgtagtatctgaagagatacttgaagatcagtaacttcatgatccttgaccattgtgtcataatgccatactattttcactaactatcttcacctgctcatgtacaatcctggccctctgaatcggtttttgaagacaagaaggtttttgaagacaataaaaatctaaaagactgcatgatataat

SEQ ID NO: 74637 - DNA, 1034 bp, Zea Mays
tctcccagggacaggctcgtaatttttccactggccatcgcacccattcataaaaccctaaacccaggacccaggtttatcggtgaggcgagccgcgagtggaactgtggaagcgttgagcttttttcttctttgtcttgctgcgcaagaagaagggaaacgagaggcgggcggcgatggcgaagaggctgctcccgtcgctgaaccgggtgctggtggagaagctggtgcagcccaagaagaccgccggcggcatcctcgtcccggaaacatccaagcagattaggttgatgtctttcctgagactgttgcctcaaaggctaccccaacttatcaggtggagcaagatgttgagactgtaatccacgttctccagccgggtccaataggaattgtggagcacaaattcacagacgcggagatcttagaggccagggctacagtgaaaagagcagtggataattggcgaagaaattggacccttgagagaaatgttagcagataaatggaaaaaatatacccctggtgtcttctatcaacagtaattgaaataaatagggtgccatggctggatgcagttgttgccattagttagatttgagcacgatctgcttatcgggagttatgttaactgttctaaatgatcagtctgtttctctttgtttcatggtttgaaacgttcatatttagagaatgcagtaattcgactccgattcattccttgtttggaaatgatctttttttcatcatactactatatgggacattttttttttgttcattgcattgtcggtagccggctggcatattggatgtgatcctttcttttgatgcttcagtactttaactgtagtatctgaagagatacttgaagatcagtaacttcatgatccttgaccattgtgtcataatgccatactattttcactaactatcttcacctgctcatgtacaatcctggccctctgaatcggtttttgaagacaagaaggtttttgaagacaataaaaatctaaaagactgcatgatataat

SEQ ID NO: 74638 - DNA, 2093 bp, Zea Mays
tctcccagggacaggctcgtaatttttccactggccatcgcacccattcataaaaccctaaacccaggacccaggtttatcggtgaggcgagccgcgagtggaactgtggaagcgttgagcttttttcttctttgtcttgctgcgcaagaagaagggaaacgagaggcgggcggcgatggcgaagaggctgctcccgtcgctgaaccgggtgctggtggagaagctggtgcagcccaagaagaccgccggcggcatcctcgtcccggaaacatccaagcaggtagcagcaccatcgcccgctaatcgctaatgttgtttttgattagtttagtggattcaatttccggcgagggacgtttagatcatggtgtcaagaaaggtgttccgcgccgctcgcttgcctaactgaaaacgtctgcaggggttgggcggttgcaggttgggcgatttggatcgctttgcaggttgcgaatagttgtaagcagctgcaaatttctctcgattcttccacccactggtgaagttagttctcattgggttgtggttaggtctatgcgattcagattgcttggtttggactgcgattcttaacttaggtataacaatattatcgttcaagtgggtatgtttttttatgaagcataaattctctaaccacgtgctgttctcggatcaaaaaaaccaactcagttgcaagtgaattcctgctgtgaaatacatacatactatatacagttttggattcaaccaacgctagcatcggtcaatctattgtggtcactgtatccgtcccgacaacaaaaatacatatattcgtatccgaaaattcgagttattttgctacttgtatccgtacccaacccggtacctgtctcgttttcatccctagccctccgccaccacccccaaagtggaggggcgctgcacgagggattaaagggggcctagcggtgtcgtggggtttagggtttatccgctacgtccgacccgtttttatccctgcctaataataaatcaacaacggaaaaaaactctaatccctaactttcccgtctccagctcccacctcctgcattcgtgaagaacgactgaaccagccgccactcgcccgtccgactccggctccggccagctgcctctgtccctccgccgagctgcccgtccgccttcgtccctccggcccaggcgagcagaactccgcccccacccgccccgagccgagcagcagccagcagagccgcatcgccgccggggaacgctgagttgccggtccgccgccctgagaagatttccgtcccagcagcatagccgcagcgccgctgcccgtcgcctcaaggcaagtccgagcgccctgtcacaggccccagattaggttgatgtctttcctgagactgttgcctcaaaggctaccccaacttatcaggcaggtggagcaagatgttgagactgtaatccacgttctccagccgggtccaataggaattgtggagcacaaattcacagacgcggagatcttagaggccagggctacagtgaaaagagcagtggataattggcgaagaaattggacccttgagagaaatgttagcagataaatggaaaaaatatacccctggtgtcttctatcaacagtaattgaaataaatagggtgccatggctggatgcagttgttgccattagttagatttgagcacgatctgcttatcgggagttatgttaactgttctaaatgatcagtctgtttctctttgtttcatggttcgactccgattcattccttgtttggaaatgatctttttttcatcatactactatatgggacattttttttttgttcattgcattgtcggtagccggctggcatattggatgtgatcctttcttttgatgcttcagtactttaactgtagtatctgaagagatacttgaagatcagtaacttcatgatccttgaccattgtgtcataatgccatactattttcactaactatcttcacctgctcatgtacaatcctggccctctgaatcggtttttgaagacaagaaggtttttgaagacaataaaaatctaaaagactgcatgatataat

SEQ ID NO: 74639 - DNA, 2511 bp, Zea Mays
tctcccagggacaggctcgtaatttttccactggccatcgcacccattcataaaaccctaaacccaggacccaggtttatcggtgaggcgagccgcgagtggaactgtggaagcgttgagcttttttcttctttgtcttgctgcgcaagaagaagggaaacgagaggcgggcggcgatggcgaagaggctgctcccgtcgctgaaccgggtgctggtggagaagctggtgcagcccaagaagaccgccggcggcatcctcgtcccggaaacatccaagcagctcccacctcctgcattcgtgaagaacgactgaaccagccgccactcgcccgtccgactccggctccggccagctgcctctgtccctccgccgagctgcccgtccgccttcgtccctccggcccaggcgagcagaactccgcccccacccgccccgagccgagcagcagccagcagagccgcatcgccgccggggaacgctgagttgccggtccgccgccctgagaagatttccgtcccagcagcatagccgcagcgccgctgcccgtcgcctcaaggcaagtccgagcgccctgtcacaggccccaggtagagtttcgtatcccctgcaaaatccaaatctaatccgattttgttaagatttaatctaatccaatgtattttcgatgacccttaaataagttttttttttcataattaccgcttattttgtaggtatgaattgctttaggccctgattgtttactctctagattatataatctatctcaaataagttaagagacaaaccaacaacacagcttattaggtggattatattatctagatacctagattacgataatcttataagcaggtcattaggtgcttatataatccataagctggattatataatcctgtaagcaaacaaacaggatcctagactgtactgtaaattttgttttattgttgcattagcaacacattgattttggcgagtcgtcagccactgccctctggccaggtccctccgatggacacggcagaccatggcctgcacgactcacttgatgaatctccctgtcgcgatgatggcagctggctagtggtgtcttagcaataggattttctcaacacacagatggcggcttggtgatgcgttcctatgtcctatctcggcaaatgaggatggctgctgggtgtggtgggagaggagaggcaggtttcctggtgttgagatgagatgaagggaactaggaccacaagtcgataatgtagctgacacagaacaatttcagtatgtagaatgcaatatctgctttttaagcagtttgaaaaaaaagaagaaattttgggatcagactgaagctgaaccctcaagtttcagggtccatgttgattgatccctcactgtaaaattagagaaacaaaaaaaatccttaggagcccatgggtagtttgatttgaagccagttaacacagacgttgttcaagaccagaactcctaagttacaactttattggctctagtggacttccctaagaagtctgatcgctgtgactaagagtaatcaattgttctataatcagcttatgcccttttcaggatagctaaatcaacagccaaaattcagtttattcagtagctatattagggacctcctcatgtttctaaagtagatatactgttatgttgcactatgaatgataatctgtcgtattcatttctgcttgttcatcagagtttggtaatcttcttcttccgagttatgcagattaggttgatgtctttcctgagactgttgcctcaaaggctaccccaacttatcaggtggagcaagatgttgagactgtaatccacgttctccagccgggtccaataggaattgtggagcacaaattcacagacgcggagatcttagaggccagggctacagtgaaaagagcagtggataattggcgaagaaattggacccttgagagaaatgttagcagataaatggaaaaaatatacccctggtgtcttctatcaacagtaattgaaataaatagggtgccatggctggatgcagttgttgccattagttagatttgagcacgatctgcttatcgggagttatgttaactgttctaaatgatcagtctgtttctctttgtttcatggtttgaaacgttcatatttagagaatgcagtaattcgactccgattcattccttgtttggaaatgatctttttttcatcatactactatatgggacattttttttttgttcattgcattgtcggtagccggctggcatattggatgtgatcctttcttttgatgcttcagtactttaactgtagtatctgaagagatacttgaagatcagtaacttcatgatccttgaccattgtgtcataatgccatactattttcactaactatcttcacctgctcatgtacaatcctggccctctgaatcggtttttgaagacaagaaggtttttgaagacaataaaaatctaaaagactgcatgatataat

SEQ ID NO: 74640 - DNA, 1948 bp, Zea Mays
ccctaatcgagcgcgaaaggaacggaacggcgcagccgcggcggcggcggcggctcatgtaagctccccaccagcgaccagtggacacgtatatccatctcccctcgcacagtcgcaactcgcacgcatccgtcctcggcctcgttccgtccgccagcaatgccgctggcgctcgcgcaactgcaggacttgcgggaccgcatctccgaccgcctccgcccatggagccgctccgcgcagttctgggtccgcgccgcggacatctacaccagctacaaggtgtgccagctgcgcgcggggttcgtgaaggacgaggacgagctagagaccatgtgggagcggcagcacgagctcggcgcggagaagatgtactccctctgctccgagctcggcggtctcttcctcaaggctgctcaaattctgggaaaacctgacctggcaccgatggcttgggtgaagagacttgttacgctgtgtgatcaagccccatccacgccatttgatgtggttagagatgttgtggagaaacagttggggaagaacttcgatgacatgtttgaattcttcgatgtcgagcctgttgggtctgcttctattgcacaggtgcatcgagcaaggcttaaattatcaaagacagacgttgctgtcaaggttcaacatccaggagccgaacaactgatgatggttgatattcggaatatgcaagcaatggccttgtttttgcagaagcatgacctcaactttgatctattctctgccaccaaagagatggaaaaacagatatgttatgagtttgactttgtgcgtgaagcaagagcaatggaaagaatacgagaatttctacgtgtcactaataagaaacctccggttatggtgcctcgtgtgattcctgggatggttagcagagaagttttgataatggaatttatcaaggggaccccaataatgaatcttggcaatgaaatggctaaaaggggcatagatcctggtggtaagattgcagcaatggcaaagcaatccacacccaggaaacatccttatctgcaaggacacagaggtggctttacttgattatggacaagtgaaagaaatgccagaagatttacggctggcttatgcaaatcttgtagttgcaatggccgatgatgatttctcgagggctgaggaaagtttcagggagctgggtatccgaacatgggccataactgataacaaactagaagaattgtttcagttatccctgcgaatgttcgatacaagattaccaccaggtgtaactgttatgtcaccttttgccgatgattcttcgcttaacaaaattggagtggagagcttcccggaggagctattttcagtgcttcgaacaatccagcttttgcgagggttgactgtgggcatgggccttacattctcgtgcgcccagcattggagaccgatagctgaggaggcgttgttaaaagctggaagacaaagcgcttcaaaatcaagaaaacagaagaggagttttctgaggagattgttttggtgaagtaggcatttagccgcatagcgaacatcaaaggacatggtatacgaacattctgtgatgaaacggaagtagccaaaagctcgagccttcgatttttagacagtacatctgtccatattcgtttaccttgggtgcgtgttattttatatatttgctcattcctttatcactatgtgttttttgggattcagtatatagttgggattgtatcggaagctgacatgtacacaagtgacatggaccaattcaaaggaaatcatcgtggtatgtgggggtttgttctgtggactttttttgtttctgatgtgaggggttgcagcaccactggtttgaagccgccatgcaaagaattcttttcccccaaaaaactgagccctcgtatatttttagcttacctagacgaaaatcggaccaatcctt

SEQ ID NO: 74641 - DNA, 1094 bp, Zea Mays
ccctaatcgagcgcgaaaggaacggaacggcgcagccgcggcggcggcggcggctcatgtaagctccccaccagcgaccagtggacacgtatatccatctcccctcgcacagtcgcaactcgcacgcatccgtcctcggcctcgttccgtccgccagcaatgccgctggcgctcgcgcaactgcaggacttgcgggaccgcatctccgaccgcctccgcccatggagccgctccgcgcagttctgggtccgcgccgcggacatctacaccagctacaaggtgtgccagctgcgcgcggggttcgtgaaggacgaggacgagctagagaccatgtgggagcggcagcacgagctcggcgcggagaagatgtactccctctgctccgagctcggcggtctcttcctcaaggctgctcaaattctgggaaaacctgacctggcaccgatgattcttcgcttaacaaaattggagtggagagcttcccggaggagctattttcagtgcttcgaacaatccagcttttgcgagggttgactgtgggcatgggccttacattctcgtgcgcccagcattggagaccgatagctgaggaggcgttgttaaaagctggaagacaaagcgcttcaaaatcaagaaaacagaagaggagttttctgaggagattgttttggtgaagtaggcatttagccgcatagcgaacatcaaaggacatggtatacgaacattctgtgatgaaacggaagtagccaaaagctcgagccttcgatttttagacagtacatctgtccatattcgtttaccttgggtgcgtgttattttatatatttgctcattcctttatcactatgtgttttttgggattcagtatatagttgggattgtatcggaagctgacatgtacacaagtgacatggaccaattcaaaggaaatcatcgtggtatgtgggggtttgttctgtggactttttttgtttctgatgtgaggggttgcagcaccactggtttgaagccgccatgcaaagaattcttttcccccaaaaaactgagccctcgtatatttttagcttacctagacgaaaatcggaccaatcctt

SEQ ID NO: 74642 - DNA, 2045 bp, Zea Mays
ccctaatcgagcgcgaaaggaacggaacggcgcagccgcggcggcggcggcggctcatgtaagctccccaccagcgaccagtggacacgtatatccatctcccctcgcacagtcgcaactcgcacgcatccgtcctcggcctcgttccgtccgccagcaatgccgctggcgctcgcgcaactgcaggacttgcgggaccgcatctccgaccgcctccgcccatggagccgctccgcgcagttctgggtccgcgccgcggacatctacaccagctacaaggtgtgccagctgcgcgcggggttcgtgaaggacgaggacgagctagagaccatgtgggagcggcagcacgagctcggcgcggagaagatgtactccctctgctccgagctcggcggtctcttcctcaaggctgctcaaattctgggaaaacctgacctggcaccgatggcttgggtgaagagacttgttacgctgtgtgatcaagccccatccacgccatttgatgtggttagagatgttgtggagaaacagttggggaagaacttcgatgacatgtttgaattcttcgatgtcgagcctgttgggtctgcttctattgcacaggtgcatcgagcaaggcttaaattatcaaagacagacgttgctgtcaaggttcaacatccaggagccgaacaactgatgatggttgatattcggaatatgcaagcaatggccttgtttttgcagaagcatgacctcaactttgatctattctctgccaccaaagagatggaaaaacagatatgttatgagtttgactttgtgcgtgaagcaagagcaatggaaagaatacgagaatttctacgtgtcactaataagaaacctccggttatggtgcctcgtgtgattcctgggatggttagcagagaagttttgataatggaatttatcaaggggaccccaataatgaatcttggcaatgaaatggctaaaaggggcatagatcctggtggtaagattgcagcaatggcaaagcagaagattttgtcagatcttactcttgcatatggtcaaatgatcttgaaggatggctttttccatgcagatccacacccaggaaacatccttatctgcaaggacacagaggtggctttacttgattatggacaagtgaaagaaatgccagaagatttacggctggcttatgcaaatcttgtagttgcaatggccgatgatgatttctcgagggctgaggaaagtttcagggagctgggtatccgaacatgggccataactgataacaaactagaagaattgtttcagttatccctgcgaatgttcgatacaagattaccaccaggtgtaactgttatgtcaccttttgccgatgattcttcgcttaacaaaattggagtggaggtatggtcactccttcaagaatcgaacagagcttcccggaggagctattttcagtgcttcgaacaatccagcttttgcgagggttgactgtgggcatgggccttacattctcgtgcgcccagcattggagaccgatagctgaggaggcgttgttaaaagctggaagacaaagcgcttcaaaatcaagaaaacagaagaggagttttctgaggagattgttttggtgaagtaggcatttagccgcatagcgaacatcaaaggacatggtatacgaacattctgtgatgaaacggaagtagccaaaagctcgagccttcgatttttagacagtacatctgtccatattcgtttaccttgggtgcgtgttattttatatatttgctcattcctttatcactatgtgttttttgggattcagtatatagttgggattgtatcggaagctgacatgtacacaagtgacatggaccaattcaaaggaaatcatcgtggtatgtgggggtttgttctgtggactttttttgtttctgatgtgaggggttgcagcaccactggtttgaagccgccatgcaaagaattcttttcccccaaaaaactgagccctcgtatatttttagcttacctagacgaaaatcggaccaatcctt

SEQ ID NO: 74643 - DNA, 2039 bp, Zea Mays
ccctaatcgagcgcgaaaggaacggaacggcgcagccgcggcggcggcggcggctcatgtaagctccccaccagcgaccagtggacacgtatatccatctcccctcgcacagtcgcaactcgcacgcatccgtcctcggcctcgttccgtccgccagcaatgccgctggcgctcgcgcaactgcaggacttgcgggaccgcatctccgaccgcctccgcccatggagccgctccgcgcagttctgggtccgcgccgcggacatctacaccagctacaaggtgtgccagctgcgcgcggggttcgtgaaggacgaggacgagctagagaccatgtgggagcggcagcacgagctcggcgcggagaagatgtactccctctgctccgagctcggcggtctcttcctcaaggctgctcaaattctgggaaaacctgacctggcaccgatggcttgggtgaagagacttgttacgctgtgtgatcaagccccatccacgccatttgatgtggttagagatgttgtggagaaacagttggggaagaacttcgatgacatgtttgaattcttcgatgtcgagcctgttgggtctgcttctattgcacaggtgcatcgagcaaggcttaaattatcaaagacagacgttgctgtcaaggttcaacatccaggagccgaacaactgatgatggttgatattcggaatatgcaagcaatggccttgtttttgcagaagcatgacctcaactttgatctattctctgccaccaaagagatggaaaaacagatatgttatgagtttgactttgtgcgtgaagcaagagcaatggaaagaatacgagaatttctacgtgtcactaataagaaacctccggttatggtgcctcgtgtgattcctgggatggttagcagagaagttttgataatggaatttatcaaggggaccccaataatgaatcttggcaatgaaatggctaaaaggggcatagatcctggtggtaagattgcagcaatggcaaagcagtaagctccttcgtctcaaaagagaagattttgtcagatcttactcttgcatatggtcaaatgatcttgaaggatggctttttccatgcagatccacacccaggaaacatccttatctgcaaggacacagaggtggctttacttgattatggacaagtgaaagaaatgccagaagatttacggctggcttatgcaaatcttgtagttgcaatggccgatgatgatttctcgagggctgaggaaagtttcagggagctgggtatccgaacatgggccataactgataacaaactagaagaattgtttcagttatccctgcgaatgttcgatacaagattaccaccaggtgtaactgttatgtcaccttttgccgatgattcttcgcttaacaaaattggagtggagagcttcccggaggagctattttcagtgcttcgaacaatccagcttttgcgagggttgactgtgggcatgggccttacattctcgtgcgcccagcattggagaccgatagctgaggaggcgttgttaaaagctggaagacaaagcgcttcaaaatcaagaaaacagaagaggagttttctgaggagattgttttggtgaagtaggcatttagccgcatagcgaacatcaaaggacatggtatacgaacattctgtgatgaaacggaagtagccaaaagctcgagccttcgatttttagacagtacatctgtccatattcgtttaccttgggtgcgtgttattttatatatttgctcattcctttatcactatgtgttttttgggattcagtatatagttgggattgtatcggaagctgacatgtacacaagtgacatggaccaattcaaaggaaatcatcgtggtatgtgggggtttgttctgtggactttttttgtttctgatgtgaggggttgcagcaccactggtttgaagccgccatgcaaagaattcttttcccccaaaaaactgagccctcgtatatttttagcttacctagacgaaaatcggaccaatcctt

SEQ ID NO: 74644 - DNA, 1971 bp, Zea Mays
ccctaatcgagcgcgaaaggaacggaacggcgcagccgcggcggcggcggcggctcatgtaagctccccaccagcgaccagtggacacgtatatccatctcccctcgcacagtcgcaactcgcacgcatccgtcctcggcctcgttccgtccgccagcaatgccgctggcgctcgcgcaactgcaggacttgcgggaccgcatctccgaccgcctccgcccatggagccgctccgcgcagttctgggtccgcgccgcggacatctacaccagctacaaggtgtgccagctgcgcgcggggttcgtgaaggacgaggacgagctagagaccatgtgggagcggcagcacgagctcggcgcggagaagatgtactccctctgctccgagctcggcggtctcttcctcaaggctgctcaaattctgggaaaacctgacctggcaccgatggcttgggtgaagagacttgttacgctgtgtgatcaagccccatccacgccatttgatgtggttagagatgttgtggagaaacagttggggaagaacttcgatgacatgtttgaattcttcgatgtcgagcctgttgggtctgcttctattgcacaggtgcatcgagcaaggcttaaattatcaaagacagacgttgctgtcaaggttcaacatccaggagccgaacaactgatgatggttgatattcggaatatgcaagcaatggccttgtttttgcagaagcatgacctcaactttgatctattctctgccaccaaagagatggaaaaacagatatgttatgagtttgactttgtgcgtgaagcaagagcaatggaaagaatacgagaatttctacgtgtcactaataagaaacctccggttatggtgcctcgtgtgattcctgggatggttagcagagaagttttgataatggaatttatcaaggggaccccaataatgaatcttggcaatgaaatggctaaaaggggcatagatcctggtggtaagattgcagcaatggcaaagcagtaagctccttcgtctcaaaagaatccacacccaggaaacatccttatctgcaaggacacagaggtggctttacttgattatggacaagtgaaagaaatgccagaagatttacggctggcttatgcaaatcttgtagttgcaatggccgatgatgatttctcgagggctgaggaaagtttcagggagctgggtatccgaacatgggccataactgataacaaactagaagaattgtttcagttatccctgcgaatgttcgatacaagattaccaccaggtgtaactgttatgtcaccttttgccgatgattcttcgcttaacaaaattggagtggagagcttcccggaggagctattttcagtgcttcgaacaatccagcttttgcgagggttgactgtgggcatgggccttacattctcgtgcgcccagcattggagaccgatagctgaggaggcgttgttaaaagctggaagacaaagcgcttcaaaatcaagaaaacagaagaggagttttctgaggagattgttttggtgaagtaggcatttagccgcatagcgaacatcaaaggacatggtatacgaacattctgtgatgaaacggaagtagccaaaagctcgagccttcgatttttagacagtacatctgtccatattcgtttaccttgggtgcgtgttattttatatatttgctcattcctttatcactatgtgttttttgggattcagtatatagttgggattgtatcggaagctgacatgtacacaagtgacatggaccaattcaaaggaaatcatcgtggtatgtgggggtttgttctgtggactttttttgtttctgatgtgaggggttgcagcaccactggtttgaagccgccatgcaaagaattcttttcccccaaaaaactgagccctcgtatatttttagcttacctagacgaaaatcggaccaatcctt

SEQ ID NO: 74645 - DNA, 2327 bp, Zea Mays
ccctaatcgagcgcgaaaggaacggaacggcgcagccgcggcggcggcggcggctcatgtaagctccccaccagcgaccagtggacacgtatatccatctcccctcgcacagtcgcaactcgcacgcatccgtcctcggcctcgttccgtccgccagcaatgccgctggcgctcgcgcaactgcaggacttgcgggaccgcatctccgaccgcctccgcccatggagccgctccgcgcagttctgggtccgcgccgcggacatctacaccagctacaaggtgtgccagctgcgcgcggggttcgtgaaggacgaggacgagctagagaccatgtgggagcggcagcacgagctcggcgcggagaagatgtactccctctgctccgagctcggcggtctcttcctcaaggctgctcaaattctgggaaaacctgacctggcaccgatggcttgggtgaagagacttgttacgctgtgtgatcaagccccatccacgccatttgatgtggttagagatgttgtggagaaacagttggggaagaacttcgatgacatgtttgaattcttcgatgtcgagcctgttgggtctgcttctattgcacaggtgcatcgagcaaggcttaaattatcaaagacagacgttgctgtcaaggagccgaacaactgatgatggttgatattcggaatatgcaagcaatggccttgtttttgcagaagcatgacctcaactttgatctattctctgccaccaaagagatggaaaaacagatatgttatgagtttgactttgtgcgtgaagcaagagcaatggaaagaatacgagaatttctacgtgtcactaataagaaacctccggttatggtgcctcgtgtgattcctgggatggttagcagagaagttttgataatggaatttatcaaggggaccccaataatgaatcttggcaatgaaatggctaaaaggggcatagatcctggtggtaagattgcagcaatggcaaagcagtaagctccttcgtctcaaaagagtacgattctcatttgcttagtttacagaaccttgtgctagttctaaggatcaatgttattggatgaatataaatatatgataaaatttcatgccactcagtttagtcactattgacagaccttgaaaagcaattagttttttttatcaaacatgcaggagagcagcaaagttatcaaactgcgtctggtgcagtgttgtgagttctctgattcaccaggtcagaggttcgaagcaacctcttcgcatttgcgggaagatgacttaccttggttcatcccttctctagaccccactcatgtgaagattttgtcagatcttactcttgcatatggtcaaatgatcttgaaggatggctttttccatgcagatccacacccaggaaacatccttatctgcaaggacacagaggtggctttacttgattatggacaagtgaaagaaatgccagaagatttacggctggcttatgcaaatcttgtagttgcaatggccgatgatgatttctcgagggctgaggaaagtttcagggagctgggtatccgaacatgggccataactgataacaaactagaagaattgtttcagttatccctgcgaatgttcgatacaagattaccaccaggtgtaactgttatgtcaccttttgccgatgattcttcgcttaacaaaattggagtggagagcttcccggaggagctattttcagtgcttcgaacaatccagcttttgcgagggttgactgtgggcatgggccttacattctcgtgcgcccagcattggagaccgatagctgaggaggcgttgttaaaagctggaagacaaagcgcttcaaaatcaagaaaacagaagaggagttttctgaggagattgttttggtgaagtaggcatttagccgcatagcgaacatcaaaggacatggtatacgaacattctgtgatgaaacggaagtagccaaaagctcgagccttcgatttttagacagtacatctgtccatattcgtttaccttgggtgcgtgttattttatatatttgctcattcctttatcactatgtgttttttgggattcagtatatagttgggattgtatcggaagctgacatgtacacaagtgacatggaccaattcaaaggaaatcatcgtggtatgtgggggtttgttctgtggactttttttgtttctgatgtgaggggttgcagcaccactggtttgaagccgccatgcaaagaattcttttcccccaaaaaactgagccctcgtatatttttagcttacctagacgaaaatcggaccaatcctt

SEQ ID NO: 74646 - DNA, 987 bp, Zea Mays
agcaaagttatcaaactgcgtctggtgcagtgttgtgagttctctgattcaccagatccacacccaggaaacatccttatctgcaaggacacagaggtggctttacttgattatggacaagtgaaagaaatgccagaagatttacggctggcttatgcaaatcttgtagttgcaatggccgatgatgatttctcgagggctgaggaaagtttcagggagctgggtatccgaacatgggccataactgataacaaactagaagaattgtttcagttatccctgcgaatgttcgatacaagattaccaccaggtgtaactgttatgtcaccttttgccgatgattcttcgcttaacaaaattggagtggagagcttcccggaggagctattttcagtgcttcgaacaatccagcttttgcgagggttgactgtgggcatgggccttacattctcgtgcgcccagcattggagaccgatagctgaggaggcgttgttaaaagctggaagacaaagcgcttcaaaatcaagaaaacagaagaggagttttctgaggagattgttttggtgaagtaggcatttagccgcatagcgaacatcaaaggacatggtatacgaacattctgtgatgaaacggaagtagccaaaagctcgagccttcgatttttagacagtacatctgtccatattcgtttaccttgggtgcgtgttattttatatatttgctcattcctttatcactatgtgttttttgggattcagtatatagttgggattgtatcggaagctgacatgtacacaagtgacatggaccaattcaaaggaaatcatcgtggtatgtgggggtttgttctgtggactttttttgtttctgatgtgaggggttgcagcaccactggtttgaagccgccatgcaaagaattcttttcccccaaaaaactgagccctcgtatatttttagcttacctagacgaaaatcggaccaatcctt

SEQ ID NO: 74647 - DNA, 1048 bp, Zea Mays
ttatcaaactgcgtctggtgcagtgttgtgagttctctgattcaccaggaagattttgtcagatcttactcttgcatatggtcaaatgatcttgaaggatggctttttccatgcagatccacacccaggaaacatccttatctgcaaggacacagaggtggctttacttgattatggacaagtgaaagaaatgccagaagatttacggctggcttatgcaaatcttgtagttgcaatggccgatgatgatttctcgagggctgaggaaagtttcagggagctgggtatccgaacatgggccataactgataacaaactagaagaattgtttcagttatccctgcgaatgttcgatacaagattaccaccaggtgtaactgttatgtcaccttttgccgatgattcttcgcttaacaaaattggagtggagagcttcccggaggagctattttcagtgcttcgaacaatccagcttttgcgagggttgactgtgggcatgggccttacattctcgtgcgcccagcattggagaccgatagctgaggaggcgttgttaaaagctggaagacaaagcgcttcaaaatcaagaaaacagaagaggagttttctgaggagattgttttggtgaagtaggcatttagccgcatagcgaacatcaaaggacatggtatacgaacattctgtgatgaaacggaagtagccaaaagctcgagccttcgatttttagacagtacatctgtccatattcgtttaccttgggtgcgtgttattttatatatttgctcattcctttatcactatgtgttttttgggattcagtatatagttgggattgtatcggaagctgacatgtacacaagtgacatggaccaattcaaaggaaatcatcgtggtatgtgggggtttgttctgtggactttttttgtttctgatgtgaggggttgcagcaccactggtttgaagccgccatgcaaagaattcttttcccccaaaaaactgagccctcgtatatttttagcttacctagacgaaaatcggaccaatcctt

SEQ ID NO: 74648 - DNA, 2229 bp, Zea Mays
gttggcaggggacacggccgacgactgcaccagcaccgcctgccttgctcgttctccttttccttcctagttccttttcttcgtcctcaccaaccaccaccaccacacccccctgttgtttcctcttgattgttcggtttgttttacaagttccttgcttgcgtcgccagcaagcaatcctctttcctcccccttccatacccgagggggagtaccgctaccgcgccacgctgccgccaccgtcatccgggcggccaccccgccaaacgccatttcgctccgcccgcttcgcatctccctcgccccccaccccaaccactcccctcgttccgcccgcgtcacccgactcaatccgattctatccgcccgcaccgcaacccgccggcgccgcccgagatcccgcccccagggttccgtcccgtgtgatgcgcggatctggctgagggcgagccatgccgagcgtcggcgtgaagatctacagcgtcttcttcaagctcttgctccgccaccgcctccagtcgctggcctccgcggggggcctcgacaacgcggccttcggggtctcctgccgccccgacgaggccaccgcgccgcccaacccggccttctccgccgccgccgacggcgtcgcctccaaggacctccacatcgaccccaactcctcgctctccgtccgcatcttcctcccgacgcccccgcccccgcacgcgcacccgcgccgcgccagcgaccccaccccgaccgcccccgccgctggcgcgccgtaccgaggctacctcccgcacgccgtagcctcgccgcgcgccgccgcgtcggcgcgccggaggctgcccatcgtcgtgcagttccacggcggcggcttcgtcaccgggagcaacaccgccgcggccaacgacgccttctgcaggagggtcgccaagctctgtgatgccattgtcgtcgccgtgggatacaggcttgcgccagagagcagatacccggccgcgtttgaggacggggtcaaggtgctcaagtggattaccaaacaggcaaatctcgccatgatgaccaaggtcaggggtggtgtggacaccttcggtgcgtccactgttgagccgtggattgctgcacatggtgatccagctagtgcagatgtgttctacttggtgcaagctgtggtgcaaatattgctgattatgtcactcggaaggtggtcgaagatgggaaaccatttgacccagttaagataaagagttcaacctagaccaccctgctgccaaccctctggcgcctggcagaggaggccctccactgaagtgcatgccgccgaccttaacggttattgccgagcatgactggatgagggatcgagcaattgcttactctgaggaactccgcaaggttaatgttgactcgccggttcttgactacaaggatacagttcacgagtttgcaaccctggacgtattcctaaaaacaccacaggcgcaggcctgtgccgaggacattgccatatggatgaagaaatatatatccctcagagggcatgagttctcatattagttgtagcaaaaaccatgcattgtgaaataggccctttgcagggaagcgtcaatgtgttcttttcaactggtggaaagagggatgttggattgcagtcgggtaaaccagctagcttaatgctgagtactgagtcctttaggccctgttcggtttcaccggaatagaccaggatttattccagctcatcaaaatctatataaattagagaagtaatccggctaggaatcaatccgaggctcaaatccataacaaccgaacagagccttagtgatttttgtggaagaatgtagtgtgcaaagttgtagactgtaatcaaaagatactcttccccttgtagagcttaattctttcattccttttgtaccctttgtgtattttggaattactggtgctgggggttaccattttttgagaagaaatagcaatctcagtggccatacttgtggagcactgagctccacacaacgacatgtaacctgatcgttcattttgttccgcgtagcgtatctgcttatatcagcatgcatcctttttgttgaacattgtattttgcattggcatcaggttttattacgctattacccatattggtgtgcactaaaatctggtattatttgaaggcacatttttcttgtcagcatcataaatgtttagcgaatgcgagctgtgtgtgtatgccaagttttc

SEQ ID NO: 74649 - DNA, 2305 bp, Zea Mays
cctgtagtgatgtaagcattttgtaacaactcacataataaatttaagatttattttttatattttttataaatttactactaaaaataaaaatataaatttacgaagcagattatatatcctatttttcacaagaaaataaaaaaactaaaaaataatatataactatcagagtattagttttcatcttaccgacatgtgggccaccacatgaaccttatccccgccgcgcctccgctcccttaaaccccgcgacgggtcactggacggccaccagtccgtgctcccaaaatggcggcctccccagcggccgccgctaccttccttcaccatcacctcccctttcccagtcgccccaagacacttctcagaccacgcctccaccgcctcgccgcgtccatcaacccctcgtccaccgacgagacccccgccgcggacccaccggtcatcccctcgatcagcatcaagaacactgagcccgaggaggtcgcccgccgccgcagttgggtggagcacggatgggctccgtgggaggaaatcatgacgccggaggtcgcctttgcgcgccacagcctcaacgagggcgaggaggtgccgcttcagtcgccggagtccctcgaggctttccggatgctcacgccttcctaccggaagaaggtggaggctgagccaggatacctggagcgcctcttcgcgacgcgcgacacgcccgagcctctcgagacgacgtgggccggccggctcccgctgcggctcgtgccgccgcgggactggccgccgcctggctgggaggtggacccggacgagctggagttcataagggaggcgcacagggcggcctctgagaggctggacatggaggcggcggctgcggcaggggtgaccaacgtggagaagctggaggatgcgccacaggatctggcgctagagaggtacaaaatgttcctgaagcagtacaaggaatgggtggaggcaaaccgagataggttggagcaggagtcctaccagtttgatcaggattacttccctggcagacgaaaaagaggtaaggactacagtgaggatatgcgtgaacttccattctactatcccggacagatatgttacgggcaagtaacgactgttcacctctaccagggagcctttgtgaacattggttgtgtccatgaggggtgggtaccgataaaaggaaatgactggtactggatccgacatcacatcaagcctggcatgaaagtctacgtggagattctggccaaacgagacccttaccgcttccgcttcccacttgagatgcgatttgtatatcctaacattgatcacctaatatttaatagattcgacttcccaccaatatttcaccgtaaggaggatactaacctagagcagttgtggcgtgaagccggacggccacccattcctaggaaaaaacctttaaaagatatggaaaaggaacctttggtatcagaccatccttttgttgacacgctttgggaatggcataatgcagagcagatgattttagactacgaggaacaaaatccagataaattcaagaatacaacatatgagtccacagttgatgcaccctcaatcgatgaagaaaaaagagttgaatacaccgaaggatatttcaaagaaacactgctaaaaaagaaagttgtgaatattagcatcaaagaacttgatctggatgctgcccgtgctgaacgccagctgataaaaaggctgaaaaaggaagccgaggagagaggggaggaatacaaggttaggaagctccgacgaaacaaagaaatggatgagtatgatctgatgcaatggcgtcgttcatttgaagagagggaagcgcttatcagagacatctgctgccggaaagcgcttgatcttcctatcgaagagcccgggcgatacgacgtggacgagacagaggtgtacgggaaggattactatgacccagagaagccaatgtaccggtacgactactggggcgagcccaagaacacggagaagacgaagctggagcgggacgtggagcgccacaaccagcaggtggtcggcgacgcgaagaagtggtgcgagatgtcgtacgacgactacgtccgcaagaagctgcggttggaagcggctgaggcgagggaaaggcggaggaaggcggccgaggcgcaagaggacgagcaggagtacgatgacggcatggacctggacctgaagaagatgaccgatccacgcgccccgcacaaccggttttacatcacgaaatgaaagatggtagctgctgaagtctgaacaactacaaatccctgtc

SEQ ID NO: 74650 - DNA, 2796 bp, Zea Mays
cctgtagtgatgtaagcattttgtaacaactcacataataaatttaagatttattttttatattttttataaatttactactaaaaataaaaatataaatttacgaagcagattatatatcctatttttcacaagaaaataaaaaaactaaaaaataatatataactatcagagtattagttttcatcttaccgacatgtgggccaccacatgaaccttatccccgccgcgcctccgctcccttaaaccccgcgacgggtcactggacggccaccagtccgtgctcccaaaatggcggcctccccagcggccgccgctaccttccttcaccatcacctcccctttcccagtcgccccaagacacttctcagaccacgcctccaccgcctcgccgcgtccatcaacccctcgtccaccgacgagacccccgccgcggacccaccggtcatcccctcgatcagcatcaagaacactgagcccgaggaggtcgcccgccgccgcagttgggtggagcacggatgggctccgtgggaggaaatcatgacgccggaggtcgcctttgcgcgccacagcctcaacgagggcgaggaggtgccgcttcagtcgccggagtccctcgaggctttccggatgctcacgccttcctaccggaagaaggtggaggctgagccaggatacctggagcgcctcttcgcgacgcgcgacacgcccgagcctctcgagacgacgtgggccggccggctcccgctgcggctcgtgccgccgcgggactggccgccgcctggctgggaggtggacccggacgagctggagttcataagggaggcgcacagggcggcctctgagaggctggacatggaggcggcggctgcggcaggggtgaccaacgtggagaagctggaggatgcgccacaggatctggcgctagagaggtacaaaatgttcctgaagcagtacaaggaatgggtggaggcaaaccgagataggttggagcaggagtcctaccagtttgatcaggattacttccctggcagacgaaaaagaggtaaggactacagtgaggatatgcgtgaacttccattctactatcccggacagatatgttacgggcaagtaacgactgttcacctctaccagggagcctttgtgaacattggttgtgtccatgaggggtgggtaccgataaaaggaaatgactggtactggatccgacatcacatcaagcctggcatgaaagtctacgtggagattctggccaaacgagacccttaccgcttccgcttcccacttgagatgcgatttgtatatcctaacattgatcacctaatatttaatagattcgacttcccaccaatatttcaccgtaaggaggatactaacctagagcagttcgtgaagccggacggccacccattcctaggaaaaaacctttaaaagatatggaaaaggaacctttggtatcagaccatccttttgttgacacgctttgggaatggcataatgcagagcagatgattttagactacgaggaacaaaatccagataaattcaagaatacaacatatgagtccacagttgatgcaccctcaatcgatgaagaaaaaagagttgaatacaccgaaggatatttcaaagaaacactgctaaaaaagaaagttgtgaatattagcatcaaagaacttgatctggatgctgcccgtgctgaacgccagctgataaaaaggctgaaaaaggaagccgaggagagaggggaggaatacaaggttaggaagctccgacgaaacaaagaaatggatgagtatgatctgatgcaatggcgtcgttcatttgaagagagggaagcgcttatcagagacatctgctgccggaaagcgcttgatcttcctatcgaagagcccgggcgatacgacgtggacgagacagaggtgtacgggaaggattactatgacccagagaagccaatgtaccggtacgactactggggcgagcccaagaacacggagaagacgaagctggagcgggacgtggagcgccacaaccagcaggtggtcggcgacgcgaagaagtggtgcgagatgtcgtacgacgactacgtccgcaagaagctgcggttggaagcggctgaggcgagggaaaggcggaggaaggcggccgaggcgcaagaggacgagcaggagtacgatgacggcatggacctggacctgaagaagatgaccgatccacgcgccccgcacaaccggttttacatcacgaaatgaaaggttagagatagttgttagttgtgcaaaaggttcgattgccttggttgttgttgttgggccaccgcttccgcctatggtgcaagagttgggggcgcttgatcaggtcgtctgacattctccttgttgacccaaccccattccgattggggcgacctggtcaaacgcgggggcgtgctagctacgctcagtacaagtattcagcatggaatctccagtattttattctagagaacatatcttgtgtatattgaagtttagtgcacatgttacatatattaaatcagtatcactcattttagatttagcatctctagttgtttgatatattttgttaaagacacgctccgacattgtgggtagtggtggacgatgttatttataaattgcaatgatcaaccatataagttagatttatgatggatggtgatgatttatcatgtgcactatgtgcactaagcttctatgtacatgagatatgtcctctttattctatagatggtagctgctgaagtctgaacaactacaaatccctgtc

SEQ ID NO: 74651 - DNA, 2777 bp, Zea Mays
cctgtagtgatgtaagcattttgtaacaactcacataataaatttaagatttattttttatattttttataaatttactactaaaaataaaaatataaatttacgaagcagattatatatcctatttttcacaagaaaataaaaaaactaaaaaataatatataactatcagagtattagttttcatcttaccgacatgtgggccaccacatgaaccttatccccgccgcgcctccgctcccttaaaccccgcgacgggtcactggacggccaccagtccgtgctcccaaaatggcggcctccccagcggccgccgctaccttccttcaccatcacctcccctttcccagtcgccccaagacacttctcagaccacgcctccaccgcctcgccgcgtccatcaacccctcgtccaccgacgagacccccgccgcggacccaccggtcatcccctcgatcagcatcaagaacactgagcccgaggaggtcgcccgccgccgcagttgggtggagcacggatgggctccgtgggaggaaatcatgacgccggaggtcgcctttgcgcgccacagcctcaacgagggcgaggaggtgccgcttcagtcgccggagtccctcgaggctttccggatgctcacgccttcctaccggaagaaggtggaggctgagccaggatacctggagcgcctcttcgcgacgcgcgacacgcccgagcctctcgagacgacgtgggccggccggctcccgctgcggctcgtgccgccgcgggactggccgccgcctggctgggaggtggacccggacgagctggagttcataagggaggcgcacagggcggcctctgagaggctggacatggaggcggcggctgcggcaggggtgaccaacgtggagaagctggaggatgcgccacaggatctggcgctagagaggtacaaaatgttcctgaagcagtacaaggaatgggtggaggcaaaccgagataggttggagcaggagtcctaccagtttgatcaggattacttccctggcagacgaaaaagagcgtgaacttccattctactatcccggacagatatgttacgggcaagtaacgactgttcacctctaccagggagcctttgtgaacattggttgtgtccatgaggggtgggtaccgataaaaggaaatgactggtactggatccgacatcacatcaagcctggcatgaaagtctacgtggagattctggccaaacgagacccttaccgcttccgcttcccacttgagatgcgatttgtatatcctaacattgatcacctaatatttaatagattcgacttcccaccaatatttcaccgtaaggaggatactaacctagagcagttgtggcgtgaagccggacggccacccattcctaggaaaaaacctttaaaagatatggaaaaggaacctttggtatcagaccatccttttgttgacacgctttgggaatggcataatgcagagcagatgattttagactacgaggaacaaaatccagataaattcaagaatacaacatatgagtccacagttgatgcaccctcaatcgatgaagaaaaaagagttgaatacaccgaaggatatttcaaagaaacactgctaaaaaagaaagttgtgaatattagcatcaaagaacttgatctggatgctgcccgtgctgaacgccagctgataaaaaggctgaaaaaggaagccgaggagagaggggaggaatacaaggttaggaagctccgacgaaacaaagaaatggatgagtatgatctgatgcaatggcgtcgttcatttgaagagagggaagcgcttatcagagacatctgctgccggaaagcgcttgatcttcctatcgaagagcccgggcgatacgacgtggacgagacagaggtgtacgggaaggattactatgacccagagaagccaatgtaccggtacgactactggggcgagcccaagaacacggagaagacgaagctggagcgggacgtggagcgccacaaccagcaggtggtcggcgacgcgaagaagtggtgcgagatgtcgtacgacgactacgtccgcaagaagctgcggttggaagcggctgaggcgagggaaaggcggaggaaggcggccgaggcgcaagaggacgagcaggagtacgatgacggcatggacctggacctgaagaagatgaccgatccacgcgccccgcacaaccggttttacatcacgaaatgaaaggttagagatagttgttagttgtgcaaaaggttcgattgccttggttgttgttgttgggccaccgcttccgcctatggtgcaagagttgggggcgcttgatcaggtcgtctgacattctccttgttgacccaaccccattccgattggggcgacctggtcaaacgcgggggcgtgctagctacgctcagtacaagtattcagcatggaatctccagtattttattctagagaacatatcttgtgtatattgaagtttagtgcacatgttacatatattaaatcagtatcactcattttagatttagcatctctagttgtttgatatattttgttaaagacacgctccgacattgtgggtagtggtggacgatgttatttataaattgcaatgatcaaccatataagttagatttatgatggatggtgatgatttatcatgtgcactatgtgcactaagcttctatgtacatgagatatgtcctctttattctatagatggtagctgctgaagtctgaacaactacaaatccctgtc

SEQ ID NO: 74652 - DNA, 1288 bp, Zea Mays
ttggaccaatggctgaagcctaccacggtccacggcagctcttgttccgtgggcgcaagtcgaccgatcggcatattcgccagcagcgcaggcttccattttgatgcctccctccgtccccttccgctccaatcagcggccgagctgctcctctcgcccacgcccgagaccgagaggccgcgccggcgcacccaaataaacccgaggagtgcctacctggcctgggcgcctggttgagcggtaaacaaatccgtgggcgtcctgcggctgcgattagaatagagtagaattcatcagcgggtcgccgtcgccattggcgcggtgcgtgtgcgagcccgagccgtgcgaagcaggtgaggcgaggggacagacgggacacgggagcgaagcaaagcgaaggaaggagtttccagtgagcgcggatcgcggaggcggtttatatagccggagggcgcgcgctccggtccgctaacgtcctgcagggagggaagggcaggattaggcagggcagcgccgcgccggccggaccgcccgcccgcccgcccgtccacgagccacggactttcggccatgggggacgctggcgctgacgcctcctcctcgccgccgccgccgtccgggtccttctcctacttcgccgtcttccgcaactaccccctcgtcgccgccctgctcggcttcgccgtcgcccagtccatcaagttcttcgtcacacggtacaaggagaacagatgggatcccaagcggcttatcggctcgggtggcatgccgtcatcacattccgccacggttacagcactagcagtagcaattggattccaggatggctttagctgctccctctttgcaacagcaactatatttgcaagcgtggtaatgtatgatgcttctggtatcagactgcatgctggaaagcaagcagaggtattgaatcaaatagtttgtgaacttccttctgaacaccccttgtctgagacaagaccactgcgagaacttttaggccatacaccaactcaggtggttgctggtgcattgcttgggtgtacaatagccacagcaggacaattattcctttgaactacgaaggtgcggcagaaatgttgtagcatttgtatcgcagggacttgagaagaagtttctccagtgttctgctactttaggtgacgttcacaggattgctgtacagaacattgttcatggttatgattgatgaaatctaaaatgtgattgaaacagctgcagaactaagggagtgtttggtttgatggacagcaaaaaaaaatgtctg

SEQ ID NO: 74653 - DNA, 1423 bp, Zea Mays
ttggaccaatggctgaagcctaccacggtccacggcagctcttgttccgtgggcgcaagtcgaccgatcggcatattcgccagcagcgcaggcttccattttgatgcctccctccgtccccttccgctccaatcagcggccgagctgctcctctcgcccacgcccgagaccgagaggccgcgccggcgcacccaaataaacccgaggagtgcctacctggcctgggcgcctggttgagcggtaaacaaatccgtgggcgtcctgcggctgcgattagaatagagtagaattcatcagcgggtcgccgtcgccattggcgcggtgcgtgtgcgagcccgagccgtgcgaagcaggtgaggcgaggggacagacgggacacgggagcgaagcaaagcgaaggaaggagtttccagtgagcgcggatcgcggaggcggtttatatagccggagggcgcgcgctccggtccgctaacgtcctgcagggagggaagggcaggattaggcagggcagcgccgcgccggccggaccgcccgcccgcccgcccgtccacgagccacggactttcggccatgggggacgctggcgctgacgcctcctcctcgccgccgccgccgtccgggtccttctcctacttcgccgtcttccgcaactaccccctcgtcgccgccctgctcggcttcgccgtcgcccagtccatcaagttcttcgtcacacggtacaaggagaacagatgggatcccaagcggcttatcggctcgggtggcatgccgtcatcacattccgccacggttacagcactagcagtagcaattggattccaggatggctttagctgctccctctttgcaacagcaactatatttgcaagcgtggtaggctatcagttctccattccaacccatgttccttctgaagagcacaagaggtaatgtatgatgcttctggtatcagactgcatgctggaaagcaagcagaggtattgaatcaaatagtttgtgaacttccttctgaacaccccttgtctgagacaagaccactgcgagaacttttaggccatacaccaactcaggtggttgctggtgcattgcttgggtgtacaatagccacagcaggacaattattcctttgaactacgaaggtgcggcagaaatgttgtagcatttgtatcgcagggacttgagaagaagtttctccagtgttctgctactttaggtattggtaagatttgcatgttggtgctgtagtgttgttgaatgttgtatgttctgatggaatgtggttatatgtcaaaaaggtgacgttcacaggattgctgtacagaacattgttcatggttatgattgatgaaatctaaaatgtgattgaaacagctgcagaactaagggagtgtttggtttgatggacagcaaaaaaaaatgtctg

SEQ ID NO: 74654 - DNA, 1876 bp, Zea Mays
ttggaccaatggctgaagcctaccacggtccacggcagctcttgttccgtgggcgcaagtcgaccgatcggcatattcgccagcagcgcaggcttccattttgatgcctccctccgtccccttccgctccaatcagcggccgagctgctcctctcgcccacgcccgagaccgagaggccgcgccggcgcacccaaataaacccgaggagtgcctacctggcctgggcgcctggttgagcggtaaacaaatccgtgggcgtcctgcggctgcgattagaatagagtagaattcatcagcgggtcgccgtcgccattggcgcggtgcgtgtgcgagcccgagccgtgcgaagcaggtgaggcgaggggacagacgggacacgggagcgaagcaaagcgaaggaaggagtttccagtgagcgcggatcgcggaggcggtttatatagccggagggcgcgcgctccggtccgctaacgtcctgcagggagggaagggcaggattaggcagggcagcgccgcgccggccggaccgcccgcccgcccgcccgtccacgagccacggactttcggccatgggggacgctggcgctgacgcctcctcctcgccgccgccgccgtccgggtccttctcctacttcgccgtcttccgcaactaccccctcgtcgccgccctgctcggcttcgccgtcgcccagtccatcaagttcttcgtcacacggtacaaggagaacagatgggatcccaagcggcttatcggctcgggtggcatgccgtcatcacattccgccacggttacagcactagcagtagcaattggattccaggatggctttagctgctccctctttgcaacagcaactatatttgcaagcgtggtaggctatcagttctccattccaacccatgttccttctgaagagcacaagaggttttacttcttcaatcttgattgaaaaaaaaactggtcatttatattgttgtcgcttggatgcaattttcagccttgttggacgttattctgttgcgtgtgggcatattgtgcacacgtttatgctgacttcctccaatttttgaggtctcacgaatttattttttgtgacttggcaggtaatgtatgatgcttctggtatcagactgcatgctggaaagcaagcagaggtattgaatcaaatagtttgtgaacttccttctgaacaccccttgtctgagacaagaccactgcgagaacttttaggccatacaccaactcaggtttgttcacatgtcctttttattgttttttcaagtgaatgcatttcattgttgttggcaaaacgaaagcgatgggttattggcatagacaccaagtgaacctcaaacgggccgaccccacatgcctctttttacttggcaacaatatgtagatatgcctatctactatcaacatcattcagcttcgtcagcaccactatcttctcgtggcacacatttatgaactacctttttttatgttttactaatttcttgggtgtcaaattgctcccaggtggttgctggtgcattgcttgggtgtacaatagccacagcaggacaattattcctttgaactacgaaggtgcggcagaaatgttgtagcatttgtatcgcagggacttgagaagaagtttctccagtgttctgctactttaggtattggtaagatttgcatgttggtgctgtagtgttgttgaatgttgtatgttctgatggaatgtggttatatgtcaaaaaggtgacgttcacaggattgctgtacagaacattgttcatggttatgattgatgaaatctaaaatgtgattgaaacagctgcagaactaagggagtgtttggtttgatggacagcaaaaaaaaatgtctg

SEQ ID NO: 74655 - DNA, 2026 bp, Zea Mays
atttcagtaaacggtcgattcaaaatggggcgagacggagtgcagcaaaaaccccaagccccgcaaaacccctaaaccctagctccccacccccagcctccccgcggcttccagcgattggaggcgaagcagccgccatggcgatcctccttaggcgcgcgtcgctgcggcgcgtcatcgccttcgccgccgcctcctcctcctcctcttctttgcactctgagatttataagcaaggggtttgtggatccatgtttcattgccgagagttcgcatcaaaagccaaaaaaaagaagtcaagtggaacagactccgatgaggagagtatgtcaaagaaagacttggctttacaccaggctatcgatcaaataacgtctgcatttgggaagggggcaataatgtggcttgggcgttcgcaaggccttagagatgtacctgttgtgtctactgggtctttcgctttggatatggctctaggaactggtggtcttccaaagaggtctatggtccagaggcttcaggcaagacaacacttgctctacatgtcattgcagaagcacaaaagaatgggggttactgtgcctttgtagatgcagaacacgctttggatccagctcttgcagagtcaattggtgttgacactaacaatttgctcgtctctcagccagactgcgctgagcaagcactcagtcttgtggacacactgattcgaagtggatctgttgatgttgttgtagtagacagtgtagctgcgcttgttccaaagactgagcttgatggtgagatgggtgatgcacatgttgctcttcaggctaggttgatgagccaagctcttcgcaagcttagccactcactttcactttcgcagacagttttgttatttattaatcagatcagggccaaggtagccacatttggatttggaggaccaactgaggtcacttctggtggtaacgccttgaagttttatgcttctgttcgcttgaacatcaggcgtattggttttttaaaggaaggtgaagagacaataggtagtcaggttgctgtgaagattgtaaaaaataagcatgccccacccttcaagactgcacagtttgagcttgaatttggaaaggggatatgccgcagttctgagctttttgaacttgggttgaagcacaagcttatccaaaagactggcggtgcatattatagattcaatgatatgagtttcaaaggtaaaaataaccttaaatcttaccttactgaaaacaagagtgttgcaaatgatctggagacgaaactaaggagattgatgggaaccgaagcacctaaagagcaggaggcagaagacagttcgccgagtgatttgcctgaagaggttgtcacacctgaagcatcctcagaagaggatatgggagtcgtaatcgaggcttgaccagtgatctgacgtgctggcaagcgagaccagaatttctggagctgttcctgtaaaacaatattttgggtcctgaagtcaccaccgcttggatcgacatgaccctgcggtgttctggtgattccattgtaacagacttcagcccttaccgtgcttttacagtagtgtagcatgaagagaattggcattgtgtgaaatcatgctgatagctgagaggtggaagttgaaggcggtaaggttgtggtctctggctatctgaactctagtgtagtatatagtgtaggcgacggtaaaatgtagtggcgtggtcgtgtatacatgatgctcacattttgagctcctggtttcacgtcgaagccaatttcaaaagcattctttattgagcgcagctagaattacatcgaattcccccctcttccggtacttgcctggtttctgctttgggatagctgttgcttggttattctgatctgcgctgatccgtgtttgccgatcaggcccgttggcaggtcctttatactggagtatctctttacaggcacattttctttgaggaatggtagacagtctgtggatcaagcaaagtgtcaatttttggaatcgaagtca

SEQ ID NO: 74656 - DNA, 2950 bp, Zea Mays
ctccatttattctcccccttctttcctcccccgccccacgctcttcctcctccttcgtcgtcgccggtaacccccgcggagccgcgttgatagctcgccgtagggggatttgtctgccgtcgctacggcagatatcagtgctggagcgtggttactgacagggtgcggctgcattcggcctcccggcttctccttcacgcgcgcgcttggcctccctacaaggctctgtctgactggctctgaagacgtctgaagatgttggagctcaggtaatagccacccatggaagcaatggaggccgaagaaggtccttttctggctaatgatgccaagttgcacgcaggaatttgtagagcatttcatccttctgtatctaaactttccaccattttcccctttatcgaagcatcaagacccagaagcaagtctggtatacaggcattgtgttcactacatgtggctcttgataaagccaaggggcttcttcaacattgtgcagactgcagcagactctacttggcaatcacttcggaaactgtgcttttaaagtttgagaagtctagaagccagcttcaggagagtctaaggcgcattgaaagcatagtaactgaagatatcggctgtaagattgtggagattgttggtgaactggagcaaattgtttttacattggatagatcagagaaggaagctggtgatgagctgatcaatttgctacagagaaacaataaaacaaatggttctagtgataatggggaacttgaggtcttccatatttctgctcttaaattgggaattacatcttctagggcagcactcaccgaaagaagagcccttaagaagctaattgagaaggctcgttctgatgaagacaagcgtaaggagcttgttgtgtcatacttgtacaatctcatgaggaagtactcaaagttcttcagaagtgagactggtgatgatacagattctcagggatcgtctccatgctcgccaacagtattaggcgtggatgatatgtgtagtccatacatcaatggccgtgcatttggtagacagattttgagcagtcagtcgttcaattcaaggtttggatctttcaattctaggctcggatcattcaattgcagacgtgctgctggtggtggtccaaggtctgggaatatctcagtccctcctgaagaacttaggtgccctatttccttacaactcatgtatgatccagtcatcatttcatccgggcagacttatgagcgtatttgcatcgagaaatggttcaatgatggtcacagcacatgtcctaaaactcagcagcagcttgcccacctgtcattgactccaaactactgtgttaaggccctgattgccagctggtgcgagtcgaacgattttccacttcctgatggtccaccaggaacttttgatgtaaactggagacttgcttcctctgacactgaggctacaggttgtgtgtctgttgaaagctttgattgtaccagtgcaaagagcgtcaagattgtcctgatggaggatgctagaaaagaggagccagcaaacagcgtatctggaacgctggatgacggttcttgtaacgatttcgatctgaacgaaggctatgggagcctgctgctcttgcttcatgaaagaagtaacatggacaagcagtgcaggctggtggagcagataaggtatcttctgaaagacgacgaggaagcaaggatccagctaggctcaaatggctttgccgaggcactggttgagttcttgaggaatgctgtggatgatggaaatgagaaggcacaggaagtcggtgcaatggctcttttcaatctcgcagtcaacaataacagaaacaagggactcctgttatctgccggagtagccggtctacttgagcagatgatatcgaatccacgcctatctggtcctgccacagcactctaccttaacctttcctgccttcctgacgcaaaggccgccatcggttcaagccaggcggtgccattcctagtcgactgtctgtatatccaagacgccagcgacacaaacggcagctccagcaagcacgacgccctgtacacgctgtacaacctgtcgagccaccaggccagcgtgtcggcgcttctagccgcaggcatcgtggacgccctccaccgcctgctcgcggagtctgcagcgcctccggaggaggggcttggctggacagagaaggctctcgcggtgctcatcagcctggcggccaccgaggctggcaggaaggagatcgtgtccacccctggtctggtcagcacgctggcgacggttctggacacgggcgagccgacggagcaggagcaggccgtgtcgtgcctgctggtgatgtgcagcgccgacgacgagtgcgtcgcggcggtgctccgggaaggggtggtcccgtccctggtctccgtctcggcggccgggacggggcggggcagggagaaggcccagaagctcctcaagctgttcagggagcagaggcagcgggacaccgcgccggcgccgcaaccccagcagcagctgctgcagagccagctggcggagggcgggaatggtggcggtgctattatcgcgtgccaccaccgggagtcgaagccgttgttcaatgtcaagtccaggaagctgggcaggacgctgagctctctgtggaagaacaggggcttctcgctgtaccagtgctaggatgcatgctagagtagtatgtgtttttgagttgatcagtgggttgtgtacatcgtcttctgccttgttttccgcttggtccttttcctcttctctggggtattgttctgtttcggggtaagaaagaggagagtgaaaacattggtgttcttcccccacctcctcggtggggtgatgtagggcattttccagtttggctttggccttgtcaagagctgtgtacagttgtttcttctttacaggtcttcggttctct

SEQ ID NO: 74657 - DNA, 2891 bp, Zea Mays
ctccatttattctcccccttctttcctcccccgccccacgctcttcctcctccttcgtcgtcgccggtaacccccgcggagccgcgttgatagctcgccgtagggggatttgtctgccgtcgctacggcagatatcagtgctggagcgtggttactgacaggatgttggagctcaggtaatagccacccatggaagcaatggaggccgaagaaggtccttttctggctaatgatgccaagttgcacgcaggaatttgtagagcatttcatccttctgtatctaaactttccaccattttcccctttatcgaagcatcaagacccagaagcaagtctggtatacaggcattgtgttcactacatgtggctcttgataaagccaaggggcttcttcaacattgtgcagactgcagcagactctacttggcaatcacttcggaaactgtgcttttaaagtttgagaagtctagaagccagcttcaggagagtctaaggcgcattgaaagcatagtaactgaagatatcggctgtaagtgtgtaatatgaactgacatcctgaacgtgtcagattgtggagattgttggtgaactggagcaaattgtttttacattggatagatcagagaaggaagctggtgatgagctgatcaatttgctacagagaaacaataaaacaaatggttctagtgataatggggaacttgaggtcttccatatttctgctcttaaattgggaattacatcttctagggcagcactcaccgaaagaagagcccttaagaagctaattgagaaggctcgttctgatgaagacaagcgtaaggagcttgttgtgtcatacttgtacaatctcatgaggaagtactcaaagttcttcagaagtgagactggtgatgatacagattctcagggatcgtctccatgctcgccaacagtattaggcgtggatgatatgtgtagtccatacatcaatggccgtgcatttggtagacagattttgagcagtcagtcgttcaattcaaggtttggatctttcaattctaggctcggatcattcaattgcagacgtgctgctggtggtggtccaaggtctgggaatatctcagtccctcctgaagaacttaggtgccctatttccttacaactcatgtatgatccagtcatcatttcatccgggcagacttatgagcgtatttgcatcgagaaatggttcaatgatggtcacagcacatgtcctaaaactcagcagcagcttgcccacctgtcattgactccaaactactgtgttaaggccctgattgccagctggtgcgagtcgaacgattttccacttcctgatggtccaccaggaacttttgatgtaaactggagacttgcttcctctgacactgaggctacaggttgtgtgtctgttgaaagctttgattgtaccagtgcaaagagcgtcaagattgtcctgatggaggatgctagaaaagaggagccagcaaacagcgtatctggaacgctggatgacggttcttgtaacgatttcgatctgaacgaaggctatgggagcctgctgctcttgcttcatgaaagaagtaacatggacaagcagtgcaggctggtggagcagataaggtatcttctgaaagacgacgaggaagcaaggatccagctaggctcaaatggctttgccgaggcactggttgagttcttgaggaatgctgtggatgatggaaatgagaaggcacaggaagtcggtgcaatggctcttttcaatctcgcagtcaacaataacagaaacaagggactcctgttatctgccggagtagccggtctacttgagcagatgatatcgaatccacgcctatctggtcctgccacagcactctaccttaacctttcctgccttcctgacgcaaaggccgccatcggttcaagccaggcggtgccattcctagtcgactgtctgtatatccaagacgccagcgacacaaacggcagctccagcaagcacgacgccctgtacacgctgtacaacctgtcgagccaccaggccagcgtgtcggcgcttctagccgcaggcatcgtggacgccctccaccgcctgctcgcggagtctgcagcgcctccggaggaggggcttggctggacagagaaggctctcgcggtgctcatcagcctggcggccaccgaggctggcaggaaggagatcgtgtccacccctggtctggtcagcacgctggcgacggttctggacacgggcgagccgacggagcaggagcaggccgtgtcgtgcctgctggtgatgtgcagcgccgacgacgagtgcgtcgcggcggtgctccgggaaggggtggtcccgtccctggtctccgtctcggcggccgggacggggcggggcagggagaaggcccagaagctcctcaagctgttcagggagcagaggcagcgggacaccgcgccggcgccgcaaccccagcagcagctgctgcagagccagctggcggagggcgggaatggtggcggtgctattatcgcgtgccaccaccgggagtcgaagccgttgttcaatgtcaagtccaggaagctgggcaggacgctgagctctctgtggaagaacaggggcttctcgctgtaccagtgctaggatgcatgctagagtagtatgtgtttttgagttgatcagtgggttgtgtacatcgtcttctgccttgttttccgcttggtccttttcctcttctctggggtattgttctgtttcggggtaagaaagaggagagtgaaaacattggtgttcttcccccacctcctcggtggggtgatgtagggcattttccagtttggctttggccttgtcaagagctgtgtacagttgtttcttctttacaggtcttcggttctct

SEQ ID NO: 74658 - DNA, 2857 bp, Zea Mays
ctccatttattctcccccttctttcctcccccgccccacgctcttcctcctccttcgtcgtcgccggtaacccccgcggagccgcgttgatagctcgccgtagggggatttgtctgccgtcgctacggcagatatcagtgctggagcgtggttactgacaggatgttggagctcaggtaatagccacccatggaagcaatggaggccgaagaaggtccttttctggctaatgatgccaagttgcacgcaggaatttgtagagcatttcatccttctgtatctaaactttccaccattttcccctttatcgaagcatcaagacccagaagcaagtctggtatacaggcattgtgttcactacatgtggctcttgataaagccaaggggcttcttcaacattgtgcagactgcagcagactctacttggcaatcacttcggaaactgtgcttttaaagtttgagaagtctagaagccagcttcaggagagtctaaggcgcattgaaagcatagtaactgaagatatcggctgtaagattgtggagattgttggtgaactggagcaaattgtttttacattggatagatcagagaaggaagctggtgatgagctgatcaatttgctacagagaaacaataaaacaaatggttctagtgataatggggaacttgaggtcttccatatttctgctcttaaattgggaattacatcttctagggcagcactcaccgaaagaagagcccttaagaagctaattgagaaggctcgttctgatgaagacaagcgtaaggagcttgttgtgtcatacttgtacaatctcatgaggaagtactcaaagttcttcagaagtgagactggtgatgatacagattctcagggatcgtctccatgctcgccaacagtattaggcgtggatgatatgtgtagtccatacatcaatggccgtgcatttggtagacagattttgagcagtcagtcgttcaattcaaggtttggatctttcaattctaggctcggatcattcaattgcagacgtgctgctggtggtggtccaaggtctgggaatatctcagtccctcctgaagaacttaggtgccctatttccttacaactcatgtatgatccagtcatcatttcatccgggcagacttatgagcgtatttgcatcgagaaatggttcaatgatggtcacagcacatgtcctaaaactcagcagcagcttgcccacctgtcattgactccaaactactgtgttaaggccctgattgccagctggtgcgagtcgaacgattttccacttcctgatggtccaccaggaacttttgatgtaaactggagacttgcttcctctgacactgaggctacaggttgtgtgtctgttgaaagctttgattgtaccagtgcaaagagcgtcaagattgtcctgatggaggatgctagaaaagaggagccagcaaacagcgtatctggaacgctggatgacggttcttgtaacgatttcgatctgaacgaaggctatgggagcctgctgctcttgcttcatgaaagaagtaacatggacaagcagtgcaggctggtggagcagataaggtatcttctgaaagacgacgaggaagcaaggatccagctaggctcaaatggctttgccgaggcactggttgagttcttgaggaatgctgtggatgatggaaatgagaaggcacaggaagtcggtgcaatggctcttttcaatctcgcagtcaacaataacagaaacaagggactcctgttatctgccggagtagccggtctacttgagcagatgatatcgaatccacgcctatctggtcctgccacagcactctaccttaacctttcctgccttcctgacgcaaaggccgccatcggttcaagccaggcggtgccattcctagtcgactgtctgtatatccaagacgccagcgacacaaacggcagctccagcaagcacgacgccctgtacacgctgtacaacctgtcgagccaccaggccagcgtgtcggcgcttctagccgcaggcatcgtggacgccctccaccgcctgctcgcggagtctgcagcgcctccggaggaggggcttggctggacagagaaggctctcgcggtgctcatcagcctggcggccaccgaggctggcaggaaggagatcgtgtccacccctggtctggtcagcacgctggcgacggttctggacacgggcgagccgacggagcaggagcaggccgtgtcgtgcctgctggtgatgtgcagcgccgacgacgagtgcgtcgcggcggtgctccgggaaggggtggtcccgtccctggtctccgtctcggcggccgggacggggcggggcagggagaaggcccagaagctcctcaagctgttcagggagcagaggcagcgggacaccgcgccggcgccgcaaccccagcagcagctgctgcagagccagctggcggagggcgggaatggtggcggtgctattatcgcgtgccaccaccgggagtcgaagccgttgttcaatgtcaagtccaggaagctgggcaggacgctgagctctctgtggaagaacaggggcttctcgctgtaccagtgctaggatgcatgctagagtagtatgtgtttttgagttgatcagtgggttgtgtacatcgtcttctgccttgttttccgcttggtccttttcctcttctctggggtattgttctgtttcggggtaagaaagaggagagtgaaaacattggtgttcttcccccacctcctcggtggggtgatgtagggcattttccagtttggctttggccttgtcaagagctgtgtacagttgtttcttctttacaggtcttcggttctct

SEQ ID NO: 74659 - DNA, 3129 bp, Zea Mays
ctccatttattctcccccttctttcctcccccgccccacgctcttcctcctccttcgtcgtcgccggtaacccccgcggagccgcgttgatagctcgccgtagggggatttgtctgccgtcgctacggcagatatcagtgctggagcgtggttactgacagggtgcggctgcattcggcctcccggcttctccttcacgcgcgcgcttggcctccctacaaggctctgtctgactggctctgaagacgtctgaaggttaaaccaagctccctgcgctgctgcccaagcggccgacccttcctgccgccgatagacccgtgctggatgcctggatcctctgtctagtgctgccgctgccagcgctactcatcctcatcctcaccctagtggagtggagatccgtccaggcgtggattgatttcttctttttctggatgttggagctcaggtaatagccacccatggaagcaatggaggccgaagaaggtccttttctggctaatgatgccaagttgcacgcaggaatttgtagagcatttcatccttctgtatctaaactttccaccattttcccctttatcgaagcatcaagacccagaagcaagtctggtatacaggcattgtgttcactacatgtggctcttgataaagccaaggggcttcttcaacattgtgcagactgcagcagactctacttggcaatcacttcggaaactgtgcttttaaagtttgagaagtctagaagccagcttcaggagagtctaaggcgcattgaaagcatagtaactgaagatatcggctgtaagattgtggagattgttggtgaactggagcaaattgtttttacattggatagatcagagaaggaagctggtgatgagctgatcaatttgctacagagaaacaataaaacaaatggttctagtgataatggggaacttgaggtcttccatatttctgctcttaaattgggaattacatcttctagggcagcactcaccgaaagaagagcccttaagaagctaattgagaaggctcgttctgatgaagacaagcgtaaggagcttgttgtgtcatacttgtacaatctcatgaggaagtactcaaagttcttcagaagtgagactggtgatgatacagattctcagggatcgtctccatgctcgccaacagtattaggcgtggatgatatgtgtagtccatacatcaatggccgtgcatttggtagacagattttgagcagtcagtcgttcaattcaaggtttggatctttcaattctaggctcggatcattcaattgcagacgtgctgctggtggtggtccaaggtctgggaatatctcagtccctcctgaagaacttaggtgccctatttccttacaactcatgtatgatccagtcatcatttcatccgggcagacttatgagcgtatttgcatcgagaaatggttcaatgatggtcacagcacatgtcctaaaactcagcagcagcttgcccacctgtcattgactccaaactactgtgttaaggccctgattgccagctggtgcgagtcgaacgattttccacttcctgatggtccaccaggaacttttgatgtaaactggagacttgcttcctctgacactgaggctacaggttgtgtgtctgttgaaagctttgattgtaccagtgcaaagagcgtcaagattgtcctgatggaggatgctagaaaagaggagccagcaaacagcgtatctggaacgctggatgacggttcttgtaacgatttcgatctgaacgaaggctatgggagcctgctgctcttgcttcatgaaagaagtaacatggacaagcagtgcaggctggtggagcagataaggtatcttctgaaagacgacgaggaagcaaggatccagctaggctcaaatggctttgccgaggcactggttgagttcttgaggaatgctgtggatgatggaaatgagaaggcacaggaagtcggtgcaatggctcttttcaatctcgcagtcaacaataacagaaacaagggactcctgttatctgccggagtagccggtctacttgagcagatgatatcgaatccacgcctatctggtcctgccacagcactctaccttaacctttcctgccttcctgacgcaaaggccgccatcggttcaagccaggcggtgccattcctagtcgactgtctgtatatccaagacgccagcgacacaaacggcagctccagcaagcacgacgccctgtacacgctgtacaacctgtcgagccaccaggccagcgtgtcggcgcttctagccgcaggcatcgtggacgccctccaccgcctgctcgcggagtctgcagcgcctccggaggaggggcttggctggacagagaaggctctcgcggtgctcatcagcctggcggccaccgaggctggcaggaaggagatcgtgtccacccctggtctggtcagcacgctggcgacggttctggacacgggcgagccgacggagcaggagcaggccgtgtcgtgcctgctggtgatgtgcagcgccgacgacgagtgcgtcgcggcggtgctccgggaaggggtggtcccgtccctggtctccgtctcggcggccgggacggggcggggcagggagaaggcccagaagctcctcaagctgttcagggagcagaggcagcgggacaccgcgccggcgccgcaaccccagcagcagctgctgcagagccagctggcggagggcgggaatggtggcggtgctattatcgcgtgccaccaccgggagtcgaagccgttgttcaatgtcaagtccaggaagctgggcaggacgctgagctctctgtggaagaacaggggcttctcgctgtaccagtgctaggatgcatgctagagtagtatgtgtttttgagttgatcagtgggttgtgtacatcgtcttctgccttgttttccgcttggtccttttcctcttctctggggtattgttctgtttcggggtaagaaagaggagagtgaaaacattggtgttcttcccccacctcctcggtggggtgatgtagggcattttccagtttggctttggccttgtcaagagctgtgtacagttgtttcttctttacaggtcttcggttctct

SEQ ID NO: 74660 - DNA, 1154 bp, Zea Mays
ttgtttcctagctgcatggtgctcgttgattgctgctagtttgaaatgaaacaagggactcctgttatctgccggagtagccggtctacttgagcagatgatatcgaatccacgcctatctggtcctgccacagcactctaccttaacctttcctgccttcctgacgcaaaggccgccatcggttcaagccaggcggtgccattcctagtcgactgtctgtatatccaagacgccagcgacacaaacggcagctccagcaagcacgacgccctgtacacgctgtacaacctgtcgagccaccaggccagcgtgtcggcgcttctagccgcaggcatcgtggacgccctccaccgcctgctcgcggagtctgcagcgcctccggaggaggggcttggctggacagagaaggctctcgcggtgctcatcagcctggcggccaccgaggctggcaggaaggagatcgtgtccacccctggtctggtcagcacgctggcgacggttctggacacgggcgagccgacggagcaggagcaggccgtgtcgtgcctgctggtgatgtgcagcgccgacgacgagtgcgtcgcggcggtgctccgggaaggggtggtcccgtccctggtctccgtctcggcggccgggacggggcggggcagggagaaggcccagaagctcctcaagctgttcagggagcagaggcagcgggacaccgcgccggcgccgcaaccccagcagcagctgctgcagagccagctggcggagggcgggaatggtggcggtgctattatcgcgtgccaccaccgggagtcgaagccgttgttcaatgtcaagtccaggaagctgggcaggacgctgagctctctgtggaagaacaggggcttctcgctgtaccagtgctaggatgcatgctagagtagtatgtgtttttgagttgatcagtgggttgtgtacatcgtcttctgccttgttttccgcttggtccttttcctcttctctggggtattgttctgtttcggggtaagaaagaggagagtgaaaacattggtgttcttcccccacctcctcggtggggtgatgtagggcattttccagtttggctttggccttgtcaagagctgtgtacagttgtttcttctttacaggtcttcggttctct

SEQ ID NO: 74661 - DNA, 456 bp, Zea Mays
atgacatactttcgagttcgagcatcgaacaacttgtacaagccagttccaaatgatatcatgattaccttcacgaattggacaaagttagagcaggttattgagattcctcctgcatttcctacacttacctactccctcactcacatagagcagatccattcgcgcatcgaccataaagactactatacagatgccattgggatagttacttcagtctcgaatgtttcaccacatcgctccagaggacaacaagcttccagcttgaagaggaacatttccatatgtagtgcaagaggtgcttcggtcaatgtcgtgttgtggggtgcccaagccaccctattcccaggagagcgcatatacgaagatgggcagaattccccacagattgtgctatttgttggcacacttgtcaaaaaatatgcagtggtacatcaatccatccattcctgaggc

SEQ ID NO: 74662 - DNA, 4939 bp, Zea Mays
ttaaagccggttcaaaactgcaaagataaggctatccacgtcgcctttatatttttaaccgtccgatcatttacgaacggctacacgaactctctctgcatttccacgtactctgtcaaacgatacgccgcgatgcttccagacaagcgccatccccttcctcgccccacacgccgtcgtgttggccgcgcctctcttcaaccttttcttgagcattggcgagagcccttcacatgatccccaacttgctacgccgccggccgccgcatcggaactccttgcaccgcttgcctttcttctcccattcaaccggcaagcgttccctggctcaataacgcaactgggggatgtctgtcgctatctccatataggaaacgacaggtgcgacagatttagattttcaggtgatgcgtggtcgggatcgccggatcaatcaaaataagtgtgaaatttgagaggccgtggaacttccagatcgagtagtatccatccagatcgatatcccagaagaccaagcctggccatgaaacgcatgctaccccgatctcttcttcaccttttcttatccgcaggtaccaacaaaaaaagtgacccttttgacgacgtattgcgtgggcaaggcatgacagtgcgacaagagagaaactaacaaagagctctgttcgttctgctgattgcttatgattcgactcgcagtggcggtagctgggagagcttgggactggccagacacgaccaactcaccactgtaataagacgacttttatacatagctgacagtacgcaacctcagttcaggcgcaagctccaagcagcagagctgcagagaggcgtcagcggagcacaagctggcgtccaagcaaagcccgctgaagtgtccccccctgcctttcttctctccttcactctctcgttcgtggcgacgcttgtgcgaccactcaccgtagcccgctcgacgccagttattcgccgtgcagctcgccggcgacgagcaccctccagcctaaggaggggagccggagatgttctactcgcagttcatcttggccaagaagggccccctcgggaccatatggattgccgcacacttggagcggaagctgcgcaagaaccaggtcgcggacacggacatcggcgtctcagtagattccatcatattccctgacgttccaatcgcacttcggttatcaagtcatcttatgttaggcgtggtccactgctgttgatctacctcctgaggagtcaactgctccatatcactctataactctgcctgagacattcgatcttgatgattttgaactgccagaagctgtgtttcaaggcgatactgatcatcatgtgagcacaaaagagcagatcactttgcaagacaacccagagaaaacaggatattcaacatcccagtttggcctagatgaaagatttggtgatggcagttcatcacatattggcttggacttggaggaggaattaattctgaacaaggaccactcaattcatctcgagtctgatgatggtattattattcaaggtcggtcatcggtcccttctactgatatggagattgatgataacaaaagtacaaacataacagctgaaggatacagcaacatggacggtgggccttctagtcatgtaaagttaggtccactgaatgcagatgacctaggaggaaacagtatccgtaactggactggttacaatgtacagactcctgatttgaatgatatattattgcataataatgaggatattgcaggcccatcaacttcgtactatcaacctagcccatttacttgtgatgaacctgcatcaccagagttcattagcgctcaggccccagctacacctggtttaatggaagagacagttccttccagagtccatgaaagtcctgttctgagtccacagagaaaggcatcaccatcaactaatgatgaaactgcaaaggctgacactcctgctgcaccagcctcagattttctccattcagctacaggaaatgccagtgatgtggtgggtgctgagatgacagaacttggattggcgaaaccggtgcaagttgagtcttctgttgtgcaggactctgatgcatcggtgcaacagcacacaagtgagggtttaccatcccagggtcaagcttcacacttggaagctgctgctgataagttggtcggctctgatggtatagctgcatcggttgatgaaacggtaactgtcaatgcaaccattgaagatgtacctttggctgtaaatgattcagagccatgtgttgatggttctgctggaccatctgtggtgaacctggtacagatggatggtccattatttgatgcacaaggtacagtactaagtgcagattttcaacatgaagtccaagcaatgcaacaagtagtggcatctaacgatagactgaatgaactatcaacttcagaatttgccgagcctgagaaaatgctgacagctccgaatgctgaattcaatcatgcgattgacttggggcagataactgcggaaaaaggaacaattgaatctgatggaagtaacataataggcagcctaacaagcagaaaaagacacctggaatatagcttaccagctttagagagtgagaccactaaaaagttgcctagccgaccacatgttaaaagaaccaatgattttgttcctcatgatgatgatatactggcatctattttagtcggtaggacccctgggttcacacttgattcaacaccactaccaccaagggaatcatctctgaaacgcccaaggttggggtcgaagatgggtacactcaagagaaaagtgcagatagatgatgccatggtcctgcatgctgatactatacggcaacagttgatcaatactgaggatatacggcgcattcgtaaaaaggctccatgcactcgttccgaaatatggatgattgagaaaggttcactggaagatgatttattccacgagcccatcttttcctgcctatctgaggagctaaacaatttacacaatcggacatatgagactattgtacaccctgctgttcagagaatggaactacatggtcaattagacatgcctgaaacaataccagaatatagaaatattgctgggtttggttctgctactattgatggcccacttcacataccagatgggattcaatcagatgccatgttgtcaggcgcaaatgttgcatatggcgctacagctgcttttggtttgcaaattcctcctgactaccaggttaaccgtgcatctaatgattttgttgtcggcactcagcttcaagaggtggctaaaccttttattggtaatgagcacgaagtggcacctcctgacagagagcatgctcaagtagatacattgtatagtgaccgttttcaaggtgttccatctgatttgcagaggagtaatgatgcaaatgtttctagtcaagatgtggttctagataactctggccaagcttgtgctcatgcagtggacggcatgacaagggagtttaatcattttgttcatagagacgctaatctttttgggagtactgaggtccctgcttctgagattactggggtggaatataatcaagatgcctctggttttcctcgacaaacagaggatgacaacacggtggagtataatcaagatgcctctggttttcctcgaccaacggagggtgggaatgcggtggagtataatcaagatgtctctggttttcctcgaccaacagaggatggaaaaacggtggagtataatcaagatgcctctggttttcctcgaccaacagaggatgaaaacacggtggagtataatcaagatgcctctggttttcctcagccaaccgaggatgaaaacacggtggagtataatcaagatgcctctggttttcctcggccaacggaggatgaaaatgccgcgtctgctacgggagataattctggcttccaagaaaacaacacgggttctcatatggatctggatatgatgaatgactatgaagtgaaggaatgcaacgattttgggagtgcgattcatggcgttgatacagattttctgaactatggtgacgacgacaacgacgacgacttcgtcgacgccgacgagccaaatcccagtgagttccagtctctcgacaacagcggctggtcttctcgcaccaggggtgtcgcgagatatctcaagactctgttcgacgaggagtccggtctggggaggaagagcgtcgccatcgaccatctggtgcgcgggaagacgcggaaggaagcgtcgaggatgttcttcgagaccttggtgctgacgacgaaggactacatcagcgtggaccaaccgaaccccttcgactttgtgagcgtgaagccaggcccgaagctgctcatgtcagagttctagttcaacaaagtcagcgtaccctggcgcgatacattccctcttaccattgtatccatcatcacaccgaccaacaacaacaccgcagatatccccccccccctcctcttccaaaaccatttttgtgtatgttgttgcagttcccctcccctgtagcatctggtgcgctgatccgttgttgttgccagggcgtctgtccgagtaggatggtggttgtgttgtaccgtcggctatccaacagtatatagtagtagtatgattttagcgacactcggtgaagcccgccatgtaatctgctagggttcatgctcccctaagttactgtcgctttagactggctaaagcccgtagaggaattgtatacgagaaggacagggacagcccgagatgatgaatgatgtattgatgtgcctgttgactatgtgaggactgacggttttaactcaataattcaagtgacctttcctgtgaaccatgaatccatgccggatatgaggccgatgggcgatggtggcccagggaagaagagacgagagcaggagaggaacga

SEQ ID NO: 74663 - DNA, 7980 bp, Zea Mays
tttccacgtactctgtcaaacgatacgccgcgatgcttccagacaagcgccatccccttcctcgccccacacgccgtcgtgttggccgcgcctctcttcaaccttttcttgagcattggcgagagcccttcacatggtgcggcgctggcatcgttgttggcgacctctgcgcggtcggatctgcaaaggttgcagctagcgcgcctacagtacgtcaacatggtgcggcatctctttttgcagatccccaacttgctacgccgccggccgccgcatcggaactccttgcaccgcttgcctttcttctcccattcaaccggcaagcgttccctggctcaataacgcaactgggggatgtctgtcgctatctccatataggaaacgacaggtgcgacagatttagattttcaggtgatgcgtggtcgggatcgccggatcaatcaaaataagtgtgaaatttgagaggccgtggaacttccagatcgagtagtatccatccagatcgatatcccagaagaccaagcctggccatgaaacgcatgctaccccgatctcttcttcaccttttcttatccgcaggtaccaacaaaaaaagtgacccttttgacgacgtattgcgtgggcaaggcatgacagtgcgacaagagagaaactaacaaagagctctgttcgttctgctgattgcttatgattcgactcgcagtggcggtagctgggagagcttgggactggccagacacgaccaactcaccactgtaataagacgacttttatacatagctgacagtacgcaacctcagttcaggcgcaaggttagtctgatgatctgccttcattttgaatctcgattttgctgcttcatgcatgtatcatttgcgtcatcgatcatgtgctttttttctaagatctgtcattcgttttgcacgcacatcattttcctttgagttacctttacaaagatgacggacttcagcaagcgtctgcatatgcaattccttttcttgcctatccatcgatttactcatagattttattttcttcttagctcgatcaaatacttacatgttcgttttttgtttctagccattgggttggaattagatgatggatcgcacataacatacatagcactcttttttagcataccacctcatgcttaacgcatttcttatatatatacacaggttaactttccaggtaactcaaaccgacacagcttaagataaagttggcctccatattaattgctacttacatattatcatcatctttttccccaaaaaatcttactagaatactaagaccatttttacacagcaaccacataaagttggacccaacatcaacaatgattttacaaactctcttgaatcacctccaaaaggttcttattatacatctccaatagaattatctaaaattaaaattatgttcgtttcttacaggttgaaacaacaacttttgaagactggccatgaatatctagatagtactacaccatctacatagtttgtaatcaatataatttgcatattattcttcgcacacctttataaccatagcacaacaggacaatagctcatcgactctttaacaacaactgatgttcacctttttctgcacaggtaattgttttgcatgtctatgacgagcatcgtcacttttggaccacgaatcttttttgtgtactgaaaccttttcagttctttatatgtttaagctatctctggctcttgaattaccctagaatctggttaaccttgtctttgctcttatatacttatttactctctaatatacatataatcatcatacatttacattatactatgctgcgctaaacggattggcacgcgcgcatgggcgcgcgctatacactagtatatgtttgatagagaacacatccaagcgtgtgagagcaatttctagtgtgttgtagtgagaggttgcattgatcgacactatattatggtcgagttgcaagttagcggtatatgttatgtttgtaggctgctgcctcttaaatggttgtaacaccaaaatattatgttggaatgtatgaaaattctccaaatgttttgaattaaaactattactaccttttaagttaattttctaaaacaaatagatgataatattaaatcttggatagttcaaatttaggcttgaattttcaaactggcctacaactttagcttataagatggcttgttgttacagcatacagttcccgtgtaagtttatgataaataactttagcttataagatgggttgttattacataaattaagatattagtttaacttaatttaaatataaacaatccgagttgaaccgagctactctggaatcctggatcaaaatgaacgtgctagtaagctactagcttttagtcatgccctaattaagaagtaacagtcaaatcacttcgccctttcgcctagagacctacaccactcctcatttgacgatgcacacgtgtaggaagatctgcatcgactatactgtaccggttatatcggtttcagccggtactgatttatattagaatcgatgtcggttgataccgatcgatcgatgcttgataacatgttaaacgattcgaccagtaccaatccaaatcacttgataatgacggattttaacgacgttataatttaattggtgtacatgtacatcgtgtcagcttatatccgttttaaaccgtttgaaattcaataaatccaaaaaacatattaactaagagaatattcctaccattttctccacagccacgtgaccagtttcacagactcacagctcaaggaggtatttaatttgccaattttgcacctcacccaataactgtcgtacatataatatagtctaacatccaagtttcgaaaagaaggcactaaaattaatttaggatgttattaaccaaaaatcattcttcaacacattcttaaacgaggtatctaaatattccaacttcttaaatattcatatttagtctctagacttagggacctcttgtgcactccttatagcctatttcgtacgtcaatcataccgtaaaatcatttaccagccacgagtgatggactttgaataattgaagccgtggaaagaatgaatttaaaattctcgttggccaagtttgaagatgacttttttcaaaaaaaagagaaaaacgaccaacctgtgattcatacaaaacgaaaatattaataaagagaataacgatgattattgaactttatcgtacaaatgaaatcaaatttaaagctgcaagtacaaatgaaaattcgagcaaataattgagaactatttactaacctaataattgaggactatttatcgtacaaatgaaaattcgagctagaatactttaaatatatttactaacctaataagtgagaactatttggagaccaaggttgattttattcccaaacgaggtgtttggttcgaggaatgaactaatccattatcatttcactcttcattttttatttggtttgaagaatgaaatgagttgatctatcaccacctcattcctcatagttatttagctagtattaatatgagaaatgtggtcatcccaccaaatttgagaaattaatccatgatgcacaaccttatttttgatgcagtgattccttaaatcaagcaaccccaatatgtatctaccaatttgctgaatctaaagaggtgtttagtttctagtttataatctttttttttagaaactactggacgcgtgtcgcctggaaaaggattccgcacaatcacaggagtgagagcacgaaacctgtgccatattttttttgtcttcgatttgcagctccaagcagcagagctgcagagaggcgtcagcggagcacaagctggcgtccaagcaaagcccgctgaagtgtccccccctgcctttcttctctccttcactctctcgttcgtggcgacgcttgtgcgaccactcaccgtagcccgctcgacgccagttattcgccgtgcagctcgccggcgacgagcaccctccagcctaaggaggggagccggagatgttctactcgcagttcatcttggccaagaagggccccctcgggaccatatggattgccgcacacttggagcggaagctgcgcaagaaccaggtcgcggacacggacatcggcgtctcagtagattccatcatattccctgacgttccaatcgcacttcggttatcaagtcatcttatgttaggcgtggtcagaatctattctcggaaggtcaactacctattccatgactgcagcgaagctttgctgaagataaaacaagctttcaggtccactgctgttgatctacctcctgaggagtcaactgctccatatcactctataactctgcctgagacattcgatcttgatgattttgaactgccagaagctgtgtttcaaggcgatactgatcatcatgtgagcacaaaagagcagatcactttgcaagacaacccagagaaaacaggatattcaacatcccagtttggcctagatgaaagatttggtgatggcagttcatcacatattggcttggacttggaggaggaattaattctgaacaaggaccactcaattcatctcgagtctgatgatggtattattattcaaggtcggtcatcggtcccttctactgatatggagattgatgataacaaaagtacaaacataacagctgaaggatacagcaacatggacggtgggccttctagtcatgtaaagttaggtccactgaatgcagatgacctaggaggaaacagtatccgtaactggactggttacaatgtacagactcctgatttgaatgatatattattgcataataatgaggatattgcaggcccatcaacttcgtactatcaacctagcccatttacttgtgatgaacctgcatcaccagagttcattagcgctcaggccccagctacacctggtttaatggaagagacagttccttccagagtccatgaaagtcctgttctgagtccacagagaaaggcatcaccatcaactaatgatgaaactgcaaaggctgacactcctgctgcaccagcctcagattttctccattcagctacaggaaatgccagtgatgtggtgggtgctgagatgacagaacttggattggcgaaaccggtgcaagttgagtcttctgttgtgcaggactctgatgcatcggtgcaacagcacacaagtgagggtttaccatcccagggtcaagcttcacacttggaagctgctgctgataagttggtcggctctgatggtatagctgcatcggttgatgaaacggtaactgtcaatgcaaccattgaagatgtacctttggctgtaaatgattcagagccatgtgttgatggttctgctggaccatctgtggtgaacctggtacagatggatggtccattatttgatgcacaaggtacagtactaagtgcagattttcaacatgaagtccaagcaatgcaacaagtagtggcatctaacgatagactgaatgaactatcaacttcagaatttgccgagcctgagaaaatgctgacagctccgaatgctgaattcaatcatgcgattgacttggggcagataactgcggaaaaaggaacaattgaatctgatggaagtaacataataggcagcctaacaagcagaaaaagacacctggaatatagcttaccagctttagagagtgagaccactaaaaagttgcctagccgaccacatgttaaaagaaccaatgattttgttcctcatgatgatgatatactggcatctattttagtcggtaggacccctgggttcacacttgattcaacaccactaccaccaagggaatcatctctgaaacgcccaaggttggggtcgaagatgggtacactcaagagaaaagtgcagatagatgatgccatggtcctgcatgctgatactatacggcaacagttgatcaatactgaggatatacggcgcattcgtaaaaaggctccatgcactcgttccgaaatatggatgattgagaaaggttcactggaagatgatttattccacgagcccatcttttcctgcctatctgaggagctaaacaatttacacaatcggacatatgagactattgtacaccctgctgttcagagaatggaactacatggtcaattagacatgcctgaaacaataccagaatatagaaatattgctgggtttggttctgctactattgatggcccacttcacataccagatgggattcaatcagatgccatgttgtcaggcgcaaatgttgcatatggcgctacagctgcttttggtttgcaaattcctcctgactaccaggttaaccgtgcatctaatgattttgttgtcggcactcagcttcaagaggtggctaaaccttttattggtaatgagcacgaagtggcacctcctgacagagagcatgctcaagtagatacattgtatagtgaccgttttcaaggtgttccatctgatttgcagaggagtaatgatgcaaatgtttctagtcaagatgtggttctagataactctggccaagcttgtgctcatgcagtggacggcatgacaagggagtttaatcattttgttcatagagacgctaatctttttgggagtactgaggtccctgcttctgagattactggggtggaatataatcaagatgcctctggttttcctcgacaaacagaggatgacaacacggtggagtataatcaagatgcctctggttttcctcgaccaacggagggtgggaatgcggtggagtataatcaagatgtctctggttttcctcgaccaacagaggatggaaaaacggtggagtataatcaagatgcctctggttttcctcgaccaacagaggatgaaaacacggtggagtataatcaagatgcctctggttttcctcagccaaccgaggatgaaaacacggtggagtataatcaagatgcctctggttttcctcggccaacggaggatgaaaatgccgcgtctgctacgggagataattctggcttccaagaaaacaacacgggttctcatatggatctggatatgatgaatgactatgaagtgaaggaatgcaacgattttgggagtgcgattcatggcgttgatacagattttctgaactatggtgacgacgacaacgacgacgacttcgtcgacgccgacgagccaaatcccagtgagttccagtctctcgacaacagcggctggtcttctcgcaccaggggtgtcgcgagatatctcaagactctgttcgacgaggagtccggtctggggaggaagagcgtcgccatcgaccatctggtgcgcgggaagacgcggaaggaagcgtcgaggatgttcttcgagaccttggtgctgacgacgaaggactacatcagcgtggaccaaccgaaccccttcgactttgtgagcgtgaagccaggcccgaagctgctcatgtcagagttctagttcaacaaagtcagcgtaccctggcgcgatacattccctcttaccattgtatccatcatcacaccgaccaacaacaacaccgcagatatccccccccccctcctcttccaaaaccatttttgtgtatgttgttgcagttcccctcccctgtagcatctggtgcgctgatccgttgttgttgccagggcgtctgtccgagtaggatggtggttgtgttgtaccgtcggctatccaacagtatatagtagtagtatgattttagcgacactcggtgaagcccgccatgtaatctgctagggttcatgctcccctaagttactgtcgctttagactggctaaagcccgtagaggaattgtatacgagaaggacagggacagcccgagatgatgaatgatgtattgatgtgcctgttgactatgtgaggactgacggttttaactcaataattcaagtgacctttcctgtgaaccatgaatccatgccgg

SEQ ID NO: 74664 - DNA, 1252 bp, Zea Mays
cacgtactctgtcaaacgatacgccgcgatgcttccagacaagcgccatccccttcctcgccccacacgccgtcgtgttggccgcgcctctcttcaaccttttcttgagcattggcgagagcccttcacatggtgcggcgctggcatcgttgttggcgacctctgcgcggtcggatctgcaaaggttgcagctagcgcgcctacagtacgtcaacatggtgcggcatctctttttgcagatccccaacttgctacgccgccggccgccgcatcggaactccttgcaccgcttgcctttcttctcccattcaaccggcaagcgttccctggctcaataacgcaactgggggatgtctgtcgctatctccatataggaaacgacaggtgcgacagatttagattttcaggtgatgcgtggtcgggatcgccggatcaatcaaaataagtgtgaaatttgagaggccgtggaacttccagatcgagtagtatccatccagatcgatatcccagaagaccaagcctggccatgaaacgcatgctaccccgatctcttcttcaccttttcttatccgcaggtaccaacaaaaaaagtgacccttttgacgacgtattgcgtgggcaaggcatgacagtgcgacaagagagaaactaacaaagagctctgttcgttctgctgattgcttatgattcgtggcggtagctgggagagcttgggactggccagacacgaccaactcaccactgtaataagacgacttttatacatagctgacagtacgcaacctcagttcaggcgcaaggttgaaacaacaacttttgaagactggccatgaatatctagatagtactacaccatctacatagtttgtaatcaatataatttgcatattattcttcgcacacctttataaccatagcacaacaggacaatagctcatcgactctttaacaacaactgatgttcacctttttctgcacaggtaattgttttgcatgtctatgacgagcatcgtcacttttggaccacgaatcttttttgtgtactgaaaccttttcagttctttatatgtttaagctatctctggctcttgaattaccctagaatctggttaaccttgtctttgctcttatatacttatttactctctaatatacatataatcatcatacatttacattatactatgctgcgctaaacggattggcacgcgcgcatgggcgcgcgctatacactagtatatgtttgatagag

SEQ ID NO: 74665 - DNA, 1312 bp, Zea Mays
cacgtactctgtcaaacgatacgccgcgatgcttccagacaagcgccatccccttcctcgccccacacgccgtcgtgttggccgcgcctctcttcaaccttttcttgagcattggcgagagcccttcacatggtgcggcgctggcatcgttgttggcgacctctgcgcggtcggatctgcaaaggttgcagctagcgcgcctacagtacgtcaacatggtgcggcatctctttttgcagatccccaacttgctacgccgccggccgccgcatcggaactccttgcaccgcttgcctttcttctcccattcaaccggcaagcgttccctggctcaataacgcaactgggggatgtctgtcgctatctccatataggaaacgacaggtgcgacagatttagattttcaggtgatgcgtggtcgggatcgccggatcaatcaaaataagtgtgaaatttgagaggccgtggaacttccagatcgagtagtatccatccagatcgatatcccagaagaccaagcctggccatgaaacgcatgctaccccgatctcttcttcaccttttcttatccgcaggtaccaacaaaaaaagtgacccttttgacgacgtattgcgtgggcaaggcatgacagtgcgacaagagagaaactaacaaagagctctgttcgttctgctgattgcttatgattcggtaattacctctacaccatgtccttttcgatcgataatgaacaaagtatatataggtgcacgaacgtgctagatcctagattacttttagctaggtcccaagcagccgaaaatgtgtgcatgctttcagataagcaatgtctctgtctattgcacgattttttcgggcttgttgaatcgcccccgcccctaaaaataattataaggaaatgaagcctgacattcttgctcagactcgcagtggcggtagctgggagagcttgggactggccagacacgaccaactcaccactgtaataagacgacttttatacatagctgacagtacgcaacctcagttcaggcgcaaggtaattgttttgcatgtctatgacgagcatcgtcacttttggaccacgaatcttttttgtgtactgaaaccttttcagttctttatatgtttaagctatctctggctcttgaattaccctagaatctggttaaccttgtctttgctcttatatacttatttactctctaatatacatataatcatcatacatttacattatactatgctgcgctaaacggattggcacgcgcgcatgggcgcgcgctatacactagtatatgtttgatagag

SEQ ID NO: 74666 - DNA, 6032 bp, Zea Mays
cacgtactctgtcaaacgatacgccgcgatgcttccagacaagcgccatccccttcctcgccccacacgccgtcgtgttggccgcgcctctcttcaaccttttcttgagcattggcgagagcccttcacatgatccccaacttgctacgccgccggccgccgcatcggaactccttgcaccgcttgcctttcttctcccattcaaccggcaagcgttccctggctcaataacgcaactgggggatgtctgtcgctatctccatataggaaacgacaggtgcgacagatttagattttcaggtgatgcgtggtcgggatcgccggatcaatcaaaataagtgtgaaatttgagaggccgtggaacttccagatcgagtagtatccatccagatcgatatcccagaagaccaagcctggccatgaaacgcatgctaccccgatctcttcttcaccttttcttatccgcaggtaccaacaaaaaaagtgacccttttgacgacgtattgcgtgggcaaggcatgacagtgcgacaagagagaaactaacaaagagctctgttcgttctgctgattgcttatgattcggtaattacctctacaccatgtccttttcgatcgataatgaacaaagtatatataggtgcacgaacgtgctagatcctagattacttttagctaggtcccaagcagccgaaaatgtgtgcatgctttcagataagcaatgtctctgtctattgcacgattttttcgggcttgttgaatcgcccccgcccctaaaaataattataaggaaatgaagcctgacattcttgctcagactcgcagtggcggtagctgggagagcttgggactggccagacacgaccaactcaccactgtaataagacgacttttatacatagctgacagtacgcaacctcagttcaggcgcaaggttagtctgatgatctgccttcattttgaatctcgattttgctgcttcatgcatgtatcatttgcgtcatcgatcatgtgctttttttctaagatctgtcattcgttttgcacgcacatcattttcctttgagttacctttacaaagatgacggacttcagcaagcgtctgcatatgcaattccttttcttgcctatccatcgatttactcatagattttattttcttcttagctcgatcaaatacttacatgttcgttttttgtttctagccattgggttggaattagatgatggatcgcacataacatacatagcactcttttttagcataccacctcatgcttaacgcatttcttatatatatacacaggttaactttccaggtaactcaaaccgacacagcttaagataaagttggcctccatattaattgctacttacatattatcatcatctttttccccaaaaaatcttactagaatactaagaccatttttacacagcaaccacataaagttggacccaacatcaacaatgattttacaaactctcttgaatcacctccaaaaggttcttattatacatctccaatagaattatctaaaattaaaattatgttcgtttcttacaggttgaaacaacaacttttgaagactggccatgaatatctagatagtactacaccatctacatagtttgtaatcaatataatttgcatattattcttcgcacacctttataaccatagcacaacaggacaatagctcatcgactctttaacaacaactgatgttcacctttttctgcacaggtaattgttttgcatgtctatgacgagcatcgtcacttttggaccacgaatcttttttgttgattccttaaatcaagcaaccccaatatgtatctaccaatttgctgaatctaaagaggtgtttagtttctagctccaagcagcagagctgcagagaggcgtcagcggagcacaagctggcgtccaagcaaagcccgctgaagtgtccccccctgcctttcttctctccttcactctctcgttcgtggcgacgcttgtgcgaccactcaccgtagcccgctcgacgccagttattcgccgtgcagctcgccggcgacgagcaccctccagcctaaggaggggagccggagatgttctactcgcagttcatcttggccaagaagggccccctcgggaccatatggattgccgcacacttggagcggaagctgcgcaagaaccaggtcgcggacacggacatcggcgtctcagtagattccatcatattccctgacgttccaatcgcacttcggttatcaagtcatcttatgttaggcgtggtcagaatctattctcggaaggtcaactacctattccatgactgcagcgaagctttgctgaagataaaacaagctttcaggtccactgctgttgatctacctcctgaggagtcaactgctccatatcactctataactctgcctgagacattcgatcttgatgattttgaactgccagaagctgtgtttcaaggcgatactgatcatcatgtgagcacaaaagagcagatcactttgcaagacaacccagagaaaacaggatattcaacatcccagtttggcctagatgaaagatttggtgatggcagttcatcacatattggcttggacttggaggaggaattaattctgaacaaggaccactcaattcatctcgagtctgatgatggtattattattcaaggtcggtcatcggtcccttctactgatatggagattgatgataacaaaagtacaaacataacagctgaaggatacagcaacatggacggtgggccttctagtcatgtaaagttaggtccactgaatgcagatgacctaggaggaaacagtatccgtaactggactggttacaatgtacagactcctgatttgaatgatatattattgcataataatgaggatattgcaggcccatcaacttcgtactatcaacctagcccatttacttgtgatgaacctgcatcaccagagttcattagcgctcaggccccagctacacctggtttaatggaagagacagttccttccagagtccatgaaagtcctgttctgagtccacagagaaaggcatcaccatcaactaatgatgaaactgcaaaggctgacactcctgctgcaccagcctcagattttctccattcagctacaggaaatgccagtgatgtggtgggtgctgagatgacagaacttggattggcgaaaccggtgcaagttgagtcttctgttgtgcaggactctgatgcatcggtgcaacagcacacaagtgagggtttaccatcccagggtcaagcttcacacttggaagctgctgctgataagttggtcggctctgatggtatagctgcatcggttgatgaaacggtaactgtcaatgcaaccattgaagatgtacctttggctgtaaatgattcagagccatgtgttgatggttctgctggaccatctgtggtgaacctggtacagatggatggtccattatttgatgcacaaggtacagtactaagtgcagattttcaacatgaagtccaagcaatgcaacaagtagtggcatctaacgatagactgaatgaactatcaacttcagaatttgccgagcctgagaaaatgctgacagctccgaatgctgaattcaatcatgcgattgacttggggcagataactgcggaaaaaggaacaattgaatctgatggaagtaacataataggcagcctaacaagcagaaaaagacacctggaatatagcttaccagctttagagagtgagaccactaaaaagttgcctagccgaccacatgttaaaagaaccaatgattttgttcctcatgatgatgatatactggcatctattttagtcggtaggacccctgggttcacacttgattcaacaccactaccaccaagggaatcatctctgaaacgcccaaggttggggtcgaagatgggtacactcaagagaaaagtgcagatagatgatgccatggtcctgcatgctgatactatacggcaacagttgatcaatactgaggatatacggcgcattcgtaaaaaggctccatgcactcgttccgaaatatggatgattgagaaaggttcactggaagatgatttattccacgagcccatcttttcctgcctatctgaggagctaaacaatttacacaatcggacatatgagactattgtacaccctgctgttcagagaatggaactacatggtcaattagacatgcctgaaacaataccagaatatagaaatattgctgggtttggttctgctactattgatggcccacttcacataccagatgggattcaatcagatgccatgttgtcaggcgcaaatgttgcatatggcgctacagctgcttttggtttgcaaattcctcctgactaccaggttaaccgtgcatctaatgattttgttgtcggcactcagcttcaagaggtggctaaaccttttattggtaatgagcacgaagtggcacctcctgacagagagcatgctcaagtagatacattgtatagtgaccgttttcaaggtgttccatctgatttgcagaggagtaatgatgcaaatgtttctagtcaagatgtggttctagataactctggccaagcttgtgctcatgcagtggacggcatgacaagggagtttaatcattttgttcatagagacgctaatctttttgggagtactgaggtccctgcttctgagattactggggtggaatataatcaagatgcctctggttttcctcgacaaacagaggatgacaacacggtggagtataatcaagatgcctctggttttcctcgaccaacggagggtgggaatgcggtggagtataatcaagatgtctctggttttcctcgaccaacagaggatggaaaaacggtggagtataatcaagatgcctctggttttcctcgaccaacagaggatgaaaacacggtggagtataatcaagatgcctctggttttcctcagccaaccgaggatgaaaacacggtggagtataatcaagatgcctctggttttcctcggccaacggaggatgaaaatgccgcgtctgctacgggagataattctggcttccaagaaaacaacacgggttctcatatggatctggatatgatgaatgactatgaagtgaaggaatgcaacgattttgggagtgcgattcatggcgttgatacagattttctgaactatggtgacgacgacaacgacgacgacttcgtcgacgccgacgagccaaatcccagtgagttccagtctctcgacaacagcggctggtcttctcgcaccaggggtgtcgcgagatatctcaagactctgttcgacgaggagtccggtctggggaggaagagcgtcgccatcgaccatctggtgcgcgggaagacgcggaaggaagcgtcgaggatgttcttcgagaccttggtgctgacgacgaaggactacatcagcgtggaccaaccgaaccccttcgactttgtgagcgtgaagccaggcccgaagctgctcatgtcagagttctagttcaacaaagtcagcgtaccctggcgcgatacattccctcttaccattgtatccatcatcacaccgaccaacaacaacaccgcagatatccccccccccctcctcttccaaaaccatttttgtgtatgttgttgcagttcccctcccctgtagcatctggtgcgctgatccgttgttgttgccagggcgtctgtccgagtaggatggtggttgtgttgtaccgtcggctatccaacagtatatagtagtagtatgattttagcgacactcggtgaagcccgccatgtaatctgctagggttcatgctcccctaagttactgtcgctttagactggctaaagcccgtagaggaattgtatacgagaaggacagggacagcccgagatgatgaatgatgtattgatgtgcctgttgactatgtgaggactgacggttttaactcaataattcaagtgacctttcctgtgaaccatgaatccatgccgg

SEQ ID NO: 74667 - DNA, 8126 bp, Zea Mays
cacgtactctgtcaaacgatacgccgcgatgcttccagacaagcgccatccccttcctcgccccacacgccgtcgtgttggccgcgcctctcttcaaccttttcttgagcattggcgagagcccttcacatggtgcggcgctggcatcgttgttggcgacctctgcgcggtcggatctgcaaaggttgcagctagcgcgcctacagtacgtcaacatggtgcggcatctctttttgcagatccccaacttgctacgccgccggccgccgcatcggaactccttgcaccgcttgcctttcttctcccattcaaccggcaagcgttccctggctcaataacgcaactgggggatgtctgtcgctatctccatataggaaacgacaggtgcgacagatttagattttcaggtgatgcgtggtcgggatcgccggatcaatcaaaataagtgtgaaatttgagaggccgtggaacttccagatcgagtagtatccatccagatcgatatcccagaagaccaagcctggccatgaaacgcatgctaccccgatctcttcttcaccttttcttatccgcaggtaccaacaaaaaaagtgacccttttgacgacgtattgcgtgggcaaggcatgacagtgcgacaagagagaaactaacaaagagctctgttcgttctgctgattgcttatgattcgactcgcagtggcggtagctgggagagcttgggactggccagacacgaccaactcaccactgtaataagacgacttttatacatagctgacagtacgcaacctcagttcaggcgcaaggttagtctgatgatctgccttcattttgaatctcgattttgctgcttcatgcatgtatcatttgcgtcatcgatcatgtgctttttttctaagatctgtcattcgttttgcacgcacatcattttcctttgagttacctttacaaagatgacggacttcagcaagcgtctgcatatgcaattccttttcttgcctatccatcgatttactcatagattttattttcttcttagctcgatcaaatacttacatgttcgttttttgtttctagccattgggttggaattagatgatggatcgcacataacatacatagcactcttttttagcataccacctcatgcttaacgcatttcttatatatatacacaggttaactttccaggtaactcaaaccgacacagcttaagataaagttggcctccatattaattgctacttacatattatcatcatctttttccccaaaaaatcttactagaatactaagaccatttttacacagcaaccacataaagttggacccaacatcaacaatgattttacaaactctcttgaatcacctccaaaaggttcttattatacatctccaatagaattatctaaaattaaaattatgttcgtttcttacaggttgaaacaacaacttttgaagactggccatgaatatctagatagtactacaccatctacatagtttgtaatcaatataatttgcatattattcttcgcacacctttataaccatagcacaacaggacaatagctcatcgactctttaacaacaactgatgttcacctttttctgcacaggtaattgttttgcatgtctatgacgagcatcgtcacttttggaccacgaatcttttttgtgtactgaaaccttttcagttctttatatgtttaagctatctctggctcttgaattaccctagaatctggttaaccttgtctttgctcttatatacttatttactctctaatatacatataatcatcatacatttacattatactatgctgcgctaaacggattggcacgcgcgcatgggcgcgcgctatacactagtatatgtttgatagagaacacatccaagcgtgtgagagcaatttctagtgtgttgtagtgagaggttgcattgatcgacactatattatggtcgagttgcaagttagcggtatatgttatgtttgtaggctgctgcctcttaaatggttgtaacaccaaaatattatgttggaatgtatgaaaattctccaaatgttttgaattaaaactattactaccttttaagttaattttctaaaacaaatagatgataatattaaatcttggatagttcaaatttaggcttgaattttcaaactggcctacaactttagcttataagatggcttgttgttacagcatacagttcccgtgtaagtttatgataaataactttagcttataagatgggttgttattacataaattaagatattagtttaacttaatttaaatataaacaatccgagttgaaccgagctactctggaatcctggatcaaaatgaacgtgctagtaagctactagcttttagtcatgccctaattaagaagtaacagtcaaatcacttcgccctttcgcctagagacctacaccactcctcatttgacgatgcacacgtgtaggaagatctgcatcgactatactgtaccggttatatcggtttcagccggtactgatttatattagaatcgatgtcggttgataccgatcgatcgatgcttgataacatgttaaacgattcgaccagtaccaatccaaatcacttgataatgacggattttaacgacgttataatttaattggtgtacatgtacatcgtgtcagcttatatccgttttaaaccgtttgaaattcaataaatccaaaaaacatattaactaagagaatattcctaccattttctccacagccacgtgaccagtttcacagactcacagctcaaggaggtatttaatttgccaattttgcacctcacccaataactgtcgtacatataatatagtctaacatccaagtttcgaaaagaaggcactaaaattaatttaggatgttattaaccaaaaatcattcttcaacacattcttaaacgaggtatctaaatattccaacttcttaaatattcatatttagtctctagacttagggacctcttgtgcactccttatagcctatttcgtacgtcaatcataccgtaaaatcatttaccagccacgagtgatggactttgaataattgaagccgtggaaagaatgaatttaaaattctcgttggccaagtttgaagatgacttttttcaaaaaaaagagaaaaacgaccaacctgtgattcatacaaaacgaaaatattaataaagagaataacgatgattattgaactttatcgtacaaatgaaatcaaatttaaagctgcaagtacaaatgaaaattcgagcaaataattgagaactatttactaacctaataattgaggactatttatcgtacaaatgaaaattcgagctagaatactttaaatatatttactaacctaataagtgagaactatttggagaccaaggttgattttattcccaaacgaggtgtttggttcgaggaatgaactaatccattatcatttcactcttcattttttatttggtttgaagaatgaaatgagttgatctatcaccacctcattcctcatagttatttagctagtattaatatgagaaatgtggtcatcccaccaaatttgagaaattaatccatgatgcacaaccttatttttgatgcagtgattccttaaatcaagcaaccccaatatgtatctaccaatttgctgaatctaaagaggtgtttagtttctaggtactaatttgtagtcactttattttgttctattttaggttcttaaatttgtaaatttaaactctatattgatttcaatatttgacaatttaaaaattaaattaaaataaaatagagggacttaaaattaatccatagaaactaaacacccatcagtttataatctttttttttagaaactactggacgcgtgtcgcctggaaaaggattccgcacaatcacaggagtgagagcacgaaacctgtgccatattttttttgtcttcgatttgcagctccaagcagcagagctgcagagaggcgtcagcggagcacaagctggcgtccaagcaaagcccgctgaagtgtccccccctgcctttcttctctccttcactctctcgttcgtggcgacgcttgtgcgaccactcaccgtagcccgctcgacgccagttattcgccgtgcagctcgccggcgacgagcaccctccagcctaaggaggggagccggagatgttctactcgcagttcatcttggccaagaagggccccctcgggaccatatggattgccgcacacttggagcggaagctgcgcaagaaccaggtcgcggacacggacatcggcgtctcagtagattccatcatattccctgacgttccaatcgcacttcggttatcaagtcatcttatgttaggcgtggtcagaatctattctcggaaggtcaactacctattccatgactgcagcgaagctttgctgaagataaaacaagctttcaggtccactgctgttgatctacctcctgaggagtcaactgctccatatcactctataactctgcctgagacattcgatcttgatgattttgaactgccagaagctgtgtttcaaggcgatactgatcatcatgtgagcacaaaagagcagatcactttgcaagacaacccagagaaaacaggatattcaacatcccagtttggcctagatgaaagatttggtgatggcagttcatcacatattggcttggacttggaggaggaattaattctgaacaaggaccactcaattcatctcgagtctgatgatggtattattattcaaggtcggtcatcggtcccttctactgatatggagattgatgataacaaaagtacaaacataacagctgaaggatacagcaacatggacggtgggccttctagtcatgtaaagttaggtccactgaatgcagatgacctaggaggaaacagtatccgtaactggactggttacaatgtacagactcctgatttgaatgatatattattgcataataatgaggatattgcaggcccatcaacttcgtactatcaacctagcccatttacttgtgatgaacctgcatcaccagagttcattagcgctcaggccccagctacacctggtttaatggaagagacagttccttccagagtccatgaaagtcctgttctgagtccacagagaaaggcatcaccatcaactaatgatgaaactgcaaaggctgacactcctgctgcaccagcctcagattttctccattcagctacaggaaatgccagtgatgtggtgggtgctgagatgacagaacttggattggcgaaaccggtgcaagttgagtcttctgttgtgcaggactctgatgcatcggtgcaacagcacacaagtgagggtttaccatcccagggtcaagcttcacacttggaagctgctgctgataagttggtcggctctgatggtatagctgcatcggttgatgaaacggtaactgtcaatgcaaccattgaagatgtacctttggctgtaaatgattcagagccatgtgttgatggttctgctggaccatctgtggtgaacctggtacagatggatggtccattatttgatgcacaagtactaagtgcagattttcaacatgaagtccaagcaatgcaacaagtagtggcatctaacgatagactgaatgaactatcaacttcagaatttgccgagcctgagaaaatgctgacagctccgaatgctgaattcaatcatgcgattgacttggggcagataactgcggaaaaaggaacaattgaatctgatggaagtaacataataggcagcctaacaagcagaaaaagacacctggaatatagcttaccagctttagagagtgagaccactaaaaagttgcctagccgaccacatgttaaaagaaccaatgattttgttcctcatgatgatgatatactggcatctattttagtcggtaggacccctgggttcacacttgattcaacaccactaccaccaagggaatcatctctgaaacgcccaaggttggggtcgaagatgggtacactcaagagaaaagtgcagatagatgatgccatggtcctgcatgctgatactatacggcaacagttgatcaatactgaggatatacggcgcattcgtaaaaaggctccatgcactcgttccgaaatatggatgattgagaaaggttcactggaagatgatttattccacgagcccatcttttcctgcctatctgaggagctaaacaatttacacaatcggacatatgagactattgtacaccctgctgttcagagaatggaactacatggtcaattagacatgcctgaaacaataccagaatatagaaatattgctgggtttggttctgctactattgatggcccacttcacataccagatgggattcaatcagatgccatgttgtcaggcgcaaatgttgcatatggcgctacagctgcttttggtttgcaaattcctcctgactaccaggttaaccgtgcatctaatgattttgttgtcggcactcagcttcaagaggtggctaaaccttttattggtaatgagcacgaagtggcacctcctgacagagagcatgctcaagtagatacattgtatagtgaccgttttcaaggtgttccatctgatttgcagaggagtaatgatgcaaatgtttctagtcaagatgtggttctagataactctggccaagcttgtgctcatgcagtggacggcatgacaagggagtttaatcattttgttcatagagacgctaatctttttgggagtactgaggtccctgcttctgagattactggggtggaatataatcaagatgcctctggttttcctcgacaaacagaggatgacaacacggtggagtataatcaagatgcctctggttttcctcgaccaacggagggtgggaatgcggtggagtataatcaagatgtctctggttttcctcgaccaacagaggatggaaaaacggtggagtataatcaagatgcctctggttttcctcgaccaacagaggatgaaaacacggtggagtataatcaagatgcctctggttttcctcagccaaccgaggatgaaaacacggtggagtataatcaagatgcctctggttttcctcggccaacggaggatgaaaatgccgcgtctgctacgggagataattctggcttccaagaaaacaacacgggttctcatatggatctggatatgatgaatgactatgaagtgaaggaatgcaacgattttgggagtgcgattcatggcgttgatacagattttctgaactatggtgacgacgacaacgacgacgacttcgtcgacgccgacgagccaaatcccagtgagttccagtctctcgacaacagcggctggtcttctcgcaccaggggtgtcgcgagatatctcaagactctgttcgacgaggagtccggtctggggaggaagagcgtcgccatcgaccatctggtgcgcgggaagacgcggaaggaagcgtcgaggatgttcttcgagaccttggtgctgacgacgaaggactacatcagcgtggaccaaccgaaccccttcgactttgtgagcgtgaagccaggcccgaagctgctcatgtcagagttctagttcaacaaagtcagcgtaccctggcgcgatacattccctcttaccattgtatccatcatcacaccgaccaacaacaacaccgcagatatccccccccccctcctcttccaaaaccatttttgtgtatgttgttgcagttcccctcccctgtagcatctggtgcgctgatccgttgttgttgccagggcgtctgtccgagtaggatggtggttgtgttgtaccgtcggctatccaacagtatatagtagtagtatgattttagcgacactcggtgaagcccgccatgtaatctgctagggttcatgctcccctaagttactgtcgctttagactggctaaagcccgtagaggaattgtatacgagaaggacagggacagcccgagatgatgaatgatgtattgatgtgcctgttgactatgtgaggactgacggttttaactcaataattcaagtgacctttcctgtgaaccatgaatccatgccgg

SEQ ID NO: 74668 - DNA, 5383 bp, Zea Mays
cacgtactctgtcaaacgatacgccgcgatgcttccagacaagcgccatccccttcctcgccccacacgccgtcgtgttggccgcgcctctcttcaaccttttcttgagcattggcgagagcccttcacatggtgcggcgctggcatcgttgttggcgacctctgcgcggtcggatctgcaaaggttgcagctagcgcgcctacagtacgtcaacatggtgcggcatctctttttgcagatccccaacttgctacgccgccggccgccgcatcggaactccttgcaccgcttgcctttcttctcccattcaaccggcaagcgttccctggctcaataacgcaactgggggatgtctgtcgctatctccatataggaaacgacaggtgcgacagatttagattttcaggtgatgcgtggtcgggatcgccggatcaatcaaaataagtgtgaaatttgagaggccgtggaacttccagatcgagtagtatccatccagatcgatatcccagaagaccaagcctggccatgaaacgcatgctaccccgatctcttcttcaccttttcttatccgcaggtaccaacaaaaaaagtgacccttttgacgacgtattgcgtgggcaaggcatgacagtgcgacaagagagaaactaacaaagagctctgttcgttctgctgattgcttatgattcgactcgcagtggcggtagctgggagagcttgggactggccagacacgaccaactcaccactgtaataagacgacttttatacatagctgacagtacgcaacctcagttcaggcgcaagtgattccttaaatcaagcaaccccaatatgtatctaccaatttgctgaatctaaagaggtgtttagtttctaggtactaatttgtagtcactttattttgttctattttaggttcttaaatttgtaaatttaaactctatattgatttcaatatttgacaatttaaaaattaaattaaaataaaatagagggacttaaaattaatccatagaaactaaacacccatcagtttataatctttttttttagaaactactggacgcgtgtcgcctggaaaaggattccgcacaatcacaggagtgagagcacgaaacctgtgccatattttttttgtcttcgatttgcagctccaagcagcagagctgcagagaggcgtcagcggagcacaagctggcgtccaagcaaagcccgctgaagtgtccccccctgcctttcttctctccttcactctctcgttcgtggcgacgcttgtgcgaccactcaccgtagcccgctcgacgccagttattcgccgtgcagctcgccggcgacgagcaccctccagcctaaggaggggagccggagatgttctactcgcagttcatcttggccaagaagggccccctcgggaccatatggattgccgcacacttggagcggaagctgcgcaagaaccaggtcgcggacacggacatcggcgtctcagtagattccatcatattccctgacgttccaatcgcacttcggttatcaagtcatcttatgttaggcgtggtcagaatctattctcggaaggtcaactacctattccatgactgcagcgaagctttgctgaagataaaacaagctttcaggtccactgctgttgatctacctcctgaggagtcaactgctccatatcactctataactctgcctgagacattcgatcttgatgattttgaactgccagaagctgtgtttcaaggcgatactgatcatcatgtgagcacaaaagagcagatcactttgcaagacaacccagagaaaacaggatattcaacatcccagtttggcctagatgaaagatttggtgatggcagttcatcacatattggcttggacttggaggaggaattaattctgaacaaggaccactcaattcatctcgagtctgatgatggtattattattcaaggtcggtcatcggtcccttctactgatatggagattgatgataacaaaagtacaaacataacagctgaaggatacagcaacatggacggtgggccttctagtcatgtaaagttaggtccactgaatgcagatgacctaggaggaaacagtatccgtaactggactggttacaatgtacagactcctgatttgaatgatatattattgcataataatgaggatattgcaggcccatcaacttcgtactatcaacctagcccatttacttgtgatgaacctgcatcaccagagttcattagcgctcaggccccagctacacctggtttaatggaagagacagttccttccagagtccatgaaagtcctgttctgagtccacagagaaaggcatcaccatcaactaatgatgaaactgcaaaggctgacactcctgctgcaccagcctcagattttctccattcagctacaggaaatgccagtgatgtggtgggtgctgagatgacagaacttggattggcgaaaccggtgcaagttgagtcttctgttgtgcaggactctgatgcatcggtgcaacagcacacaagtgagggtttaccatcccagggtcaagcttcacacttggaagctgctgctgataagttggtcggctctgatggtatagctgcatcggttgatgaaacggtaactgtcaatgcaaccattgaagatgtacctttggctgtaaatgattcagagccatgtgttgatggttctgctggaccatctgtggtgaacctggtacagatggatggtccattatttgatgcacaaggtacagtactaagtgcagattttcaacatgaagtccaagcaatgcaacaagtagtggcatctaacgatagactgaatgaactatcaacttcagaatttgccgagcctgagaaaatgctgacagctccgaatgctgaattcaatcatgcgattgacttggggcagataactgcggaaaaaggaacaattgaatctgatggaagtaacataataggcagcctaacaagcagaaaaagacacctggaatatagcttaccagctttagagagtgagaccactaaaaagttgcctagccgaccacatgttaaaagaaccaatgattttgttcctcatgatgatgatatactggcatctattttaggtatgtataacttataaactgcatttctgtcgcctggatttagtgtgtttacctaatcacttgactttgcattagtcggtaggacccctgggttcacacttgattcaacaccactaccaccaagggaatcatctctgaaacgcccaaggttggggtcgaagatgggtacactcaagagaaaagtgcagatagatgatgccatggtcctgcatgctgatactatacggcaacagttgatcaatactgaggatatacggcgcattcgtaaaaaggctccatgcactcgttccgaaatatggatgattgagaaaggttcactggaagatgatttattccacgagcccatcttttcctgcctatctgaggagctaaacaatttacacaatcggacatatgagactattgtacaccctgctgttcagagaatggaactacatggtcaattagacatgcctgaaacaataccagaatatagaaatattgctgggtttggttctgctactattgatggcccacttcacataccagatgggattcaatcagatgccatgttgtcaggcgcaaatgttgcatatggcgctacagctgcttttggtttgcaaattcctcctgactaccaggttaaccgtgcatctaatgattttgttgtcggcactcagcttcaagaggtggctaaaccttttattggtaatgagcacgaagtggcacctcctgacagagagcatgctcaagtagatacattgtatagtgaccgttttcaaggtgttccatctgatttgcagaggagtaatgatgcaaatgtttctagtcaagatgtggttctagataactctggccaagcttgtgctcatgcagtggacggcatgacaagggagtttaatcattttgttcatagagacgctaatctttttgggagtactgaggtccctgcttctgagattactggggtggaatataatcaagatgcctctggttttcctcgacaaacagaggatgacaacacggtggagtataatcaagatgcctctggttttcctcgaccaacggagggtgggaatgcggtggagtataatcaagatgtctctggttttcctcgaccaacagaggatggaaaaacggtggagtataatcaagatgcctctggttttcctcgaccaacagaggatgaaaacacggtggagtataatcaagatgcctctggttttcctcagccaaccgaggatgaaaacacggtggagtataatcaagatgcctctggttttcctcggccaacggaggatgaaaatgccgcgtctgctacgggagataattctggcttccaagaaaacaacacgggttctcatatggatctggatatgatgaatgactatgaagtgaaggaatgcaacgattttgggagtgcgattcatggcgttgatacagattttctgaactatggtgacgacgacaacgacgacgacttcgtcgacgccgacgagccaaatcccagtgagttccagtctctcgacaacagcggctggtcttctcgcaccaggggtgtcgcgagatatctcaagactctgttcgacgaggagtccggtctggggaggaagagcgtcgccatcgaccatctggtgcgcgggaagacgcggaaggaagcgtcgaggatgttcttcgagaccttggtgctgacgacgaaggactacatcagcgtggaccaaccgaaccccttcgactttgtgagcgtgaagccaggcccgaagctgctcatgtcagagttctagttcaacaaagtcagcgtaccctggcgcgatacattccctcttaccattgtatccatcatcacaccgaccaacaacaacaccgcagatatccccccccccctcctcttccaaaaccatttttgtgtatgttgttgcagttcccctcccctgtagcatctggtgcgctgatccgttgttgttgccagggcgtctgtccgagtaggatggtggttgtgttgtaccgtcggctatccaacagtatatagtagtagtatgattttagcgacactcggtgaagcccgccatgtaatctgctagggttcatgctcccctaagttactgtcgctttagactggctaaagcccgtagaggaattgtatacgagaaggacagggacagcccgagatgatgaatgatgtattgatgtgcctgttgactatgtgaggactgacggttttaactcaataattcaagtgacctttcctgtgaaccatgaatccatgccgg

SEQ ID NO: 74669 - DNA, 5013 bp, Zea Mays
cacgtactctgtcaaacgatacgccgcgatgcttccagacaagcgccatccccttcctcgccccacacgccgtcgtgttggccgcgcctctcttcaaccttttcttgagcattggcgagagcccttcacatggtgcggcgctggcatcgttgttggcgacctctgcgcggtcggatctgcaaaggttgcagctagcgcgcctacagtacgtcaacatggtgcggcatctctttttgcagatccccaacttgctacgccgccggccgccgcatcggaactccttgcaccgcttgcctttcttctcccattcaaccggcaagcgttccctggctcaataacgcaactgggggatgtctgtcgctatctccatataggaaacgacaggtgcgacagatttagattttcaggtgatgcgtggtcgggatcgccggatcaatcaaaataagtgtgaaatttgagaggccgtggaacttccagatcgagtagtatccatccagatcgatatcccagaagaccaagcctggccatgaaacgcatgctaccccgatctcttcttcaccttttcttatccgcaggtaccaacaaaaaaagtgacccttttgacgacgtattgcgtgggcaaggcatgacagtgcgacaagagagaaactaacaaagagctctgttcgttctgctgattgcttatgattcgtggcggtagctgggagagcttgggactggccagacacgaccaactcaccactgtaataagacgacttttatacatagctgacagtacgcaacctcagttcaggcgcaaggtaattgttttgcatgtctatgacgagcatcgtcacttttggaccacgaatcttttttgtctccaagcagcagagctgcagagaggcgtcagcggagcacaagctggcgtccaagcaaagcccgctgaagtgtccccccctgcctttcttctctccttcactctctcgttcgtggcgacgcttgtgcgaccactcaccgtagcccgctcgacgccagttattcgccgtgcagctcgccggcgacgagcaccctccagcctaaggaggggagccggagatgttctactcgcagttcatcttggccaagaagggccccctcgggaccatatggattgccgcacacttggagcggaagctgcgcaagaaccaggtcgcggacacggacatcggcgtctcagtagattccatcatattccctgacgttccaatcgcacttcggttatcaagtcatcttatgttaggcgtggtcagaatctattctcggaaggtcaactacctattccatgactgcagcgaagctttgctgaagataaaacaagctttcaggtccactgctgttgatctacctcctgaggagtcaactgctccatatcactctataactctgcctgagacattcgatcttgatgattttgaactgccagaagctgtgtttcaaggcgatactgatcatcatgtgagcacaaaagagcagatcactttgcaagacaacccagagaaaacaggatattcaacatcccagtttggcctagatgaaagatttggtgatggcagttcatcacatattggcttggacttggaggaggaattaattctgaacaaggaccactcaattcatctcgagtctgatgatggtattattattcaaggtcggtcatcggtcccttctactgatatggagattgatgataacaaaagtacaaacataacagctgaaggatacagcaacatggacggtgggccttctagtcatgtaaagttaggtccactgaatgcagatgacctaggaggaaacagtatccgtaactggactggttacaatgtacagactcctgatttgaatgatatattattgcataataatgaggatattgcaggcccatcaacttcgtactatcaacctagcccatttacttgtgatgaacctgcatcaccagagttcattagcgctcaggccccagctacacctggtttaatggaagagacagttccttccagagtccatgaaagtcctgttctgagtccacagagaaaggcatcaccatcaactaatgatgaaactgcaaaggctgacactcctgctgcaccagcctcagattttctccattcagctacaggaaatgccagtgatgtggtgggtgctgagatgacagaacttggattggcgaaaccggtgcaagttgagtcttctgttgtgcaggactctgatgcatcggtgcaacagcacacaagtgagggtttaccatcccagggtcaagcttcacacttggaagctgctgctgataagttggtcggctctgatggtatagctgcatcggttgatgaaacggtaactgtcaatgcaaccattgaagatgtacctttggctgtaaatgattcagagccatgtgttgatggttctgctggaccatctgtggtgaacctggtacagatggatggtccattatttgatgcacaaggtacagtactaagtgcagattttcaacatgaagtccaagcaatgcaacaagtagtggcatctaacgatagactgaatgaactatcaacttcagaatttgccgagcctgagaaaatgctgacagctccgaatgctgaattcaatcatgcgattgacttggggcagataactgcggaaaaaggaacaattgaatctgatggaagtaacataataggcagcctaacaagcagaaaaagacacctggaatatagcttaccagctttagagagtgagaccactaaaaagttgcctagccgaccacatgttaaaagaaccaatgattttgttcctcatgatgatgatatactggcatctattttagtcggtaggacccctgggttcacacttgattcaacaccactaccaccaagggaatcatctctgaaacgcccaaggttggggtcgaagatgggtacactcaagagaaaagtgcagatagatgatgccatggtcctgcatgctgatactatacggcaacagttgatcaatactgaggatatacggcgcattcgtaaaaaggctccatgcactcgttccgaaatatggatgattgagaaaggttcactggaagatgatttattccacgagcccatcttttcctgcctatctgaggagctaaacaatttacacaatcggacatatgagactattgtacaccctgctgttcagagaatggaactacatggtcaattagacatgcctgaaacaataccagaatatagaaatattgctgggtttggttctgctactattgatggcccacttcacataccagatgggattcaatcagatgccatgttgtcaggcgcaaatgttgcatatggcgctacagctgcttttggtttgcaaattcctcctgactaccaggttaaccgtgcatctaatgattttgttgtcggcactcagcttcaagaggtggctaaaccttttattggtaatgagcacgaagtggcacctcctgacagagagcatgctcaagtagatacattgtatagtgaccgttttcaaggtgttccatctgatttgcagaggagtaatgatgcaaatgtttctagtcaagatgtggttctagataactctggccaagcttgtgctcatgcagtggacggcatgacaagggagtttaatcattttgttcatagagacgctaatctttttgggagtactgaggtccctgcttctgagattactggggtggaatataatcaagatgcctctggttttcctcgacaaacagaggatgacaacacggtggagtataatcaagatgcctctggttttcctcgaccaacggagggtgggaatgcggtggagtataatcaagatgtctctggttttcctcgaccaacagaggatggaaaaacggtggagtataatcaagatgcctctggttttcctcgaccaacagaggatgaaaacacggtggagtataatcaagatgcctctggttttcctcagccaaccgaggatgaaaacacggtggagtataatcaagatgcctctggttttcctcggccaacggaggatgaaaatgccgcgtctgctacgggagataattctggcttccaagaaaacaacacgggttctcatatggatctggatatgatgaatgactatgaagtgaaggaatgcaacgattttgggagtgcgattcatggcgttgatacagattttctgaactatggtgacgacgacaacgacgacgacttcgtcgacgccgacgagccaaatcccagtgagttccagtctctcgacaacagcggctggtcttctcgcaccaggggtgtcgcgagatatctcaagactctgttcgacgaggagtccggtctggggaggaagagcgtcgccatcgaccatctggtgcgcgggaagacgcggaaggaagcgtcgaggatgttcttcgagaccttggtgctgacgacgaaggactacatcagcgtggaccaaccgaaccccttcgactttgtgagcgtgaagccaggcccgaagctgctcatgtcagagttctagttcaacaaagtcagcgtaccctggcgcgatacattccctcttaccattgtatccatcatcacaccgaccaacaacaacaccgcagatatccccccccccctcctcttccaaaaccatttttgtgtatgttgttgcagttcccctcccctgtagcatctggtgcgctgatccgttgttgttgccagggcgtctgtccgagtaggatggtggttgtgttgtaccgtcggctatccaacagtatatagtagtagtatgattttagcgacactcggtgaagcccgccatgtaatctgctagggttcatgctcccctaagttactgtcgctttagactggctaaagcccgtagaggaattgtatacgagaaggacagggacagcccgagatgatgaatgatgtattgatgtgcctgttgactatgtgaggactgacggttttaactcaataattcaagtgacctttcctgtgaaccatgaatccatgccgg

SEQ ID NO: 74670 - DNA, 4953 bp, Zea Mays
cacgtactctgtcaaacgatacgccgcgatgcttccagacaagcgccatccccttcctcgccccacacgccgtcgtgttggccgcgcctctcttcaaccttttcttgagcattggcgagagcccttcacatggtgcggcgctggcatcgttgttggcgacctctgcgcggtcggatctgcaaaggttgcagctagcgcgcctacagtacgtcaacatggtgcggcatctctttttgcagatccccaacttgctacgccgccggccgccgcatcggaactccttgcaccgcttgcctttcttctcccattcaaccggcaagcgttccctggctcaataacgcaactgggggatgtctgtcgctatctccatataggaaacgacaggtgcgacagatttagattttcaggtgatgcgtggtcgggatcgccggatcaatcaaaataagtgtgaaatttgagaggccgtggaacttccagatcgagtagtatccatccagatcgatatcccagaagaccaagcctggccatgaaacgcatgctaccccgatctcttcttcaccttttcttatccgcaggtaccaacaaaaaaagtgacccttttgacgacgtattgcgtgggcaaggcatgacagtgcgacaagagagaaactaacaaagagctctgttcgttctgctgattgcttatgattcgtggcggtagctgggagagcttgggactggccagacacgaccaactcaccactgtaataagacgacttttatacatagctgacagtacgcaacctcagttcaggcgcaagctccaagcagcagagctgcagagaggcgtcagcggagcacaagctggcgtccaagcaaagcccgctgaagtgtccccccctgcctttcttctctccttcactctctcgttcgtggcgacgcttgtgcgaccactcaccgtagcccgctcgacgccagttattcgccgtgcagctcgccggcgacgagcaccctccagcctaaggaggggagccggagatgttctactcgcagttcatcttggccaagaagggccccctcgggaccatatggattgccgcacacttggagcggaagctgcgcaagaaccaggtcgcggacacggacatcggcgtctcagtagattccatcatattccctgacgttccaatcgcacttcggttatcaagtcatcttatgttaggcgtggtcagaatctattctcggaaggtcaactacctattccatgactgcagcgaagctttgctgaagataaaacaagctttcaggtccactgctgttgatctacctcctgaggagtcaactgctccatatcactctataactctgcctgagacattcgatcttgatgattttgaactgccagaagctgtgtttcaaggcgatactgatcatcatgtgagcacaaaagagcagatcactttgcaagacaacccagagaaaacaggatattcaacatcccagtttggcctagatgaaagatttggtgatggcagttcatcacatattggcttggacttggaggaggaattaattctgaacaaggaccactcaattcatctcgagtctgatgatggtattattattcaaggtcggtcatcggtcccttctactgatatggagattgatgataacaaaagtacaaacataacagctgaaggatacagcaacatggacggtgggccttctagtcatgtaaagttaggtccactgaatgcagatgacctaggaggaaacagtatccgtaactggactggttacaatgtacagactcctgatttgaatgatatattattgcataataatgaggatattgcaggcccatcaacttcgtactatcaacctagcccatttacttgtgatgaacctgcatcaccagagttcattagcgctcaggccccagctacacctggtttaatggaagagacagttccttccagagtccatgaaagtcctgttctgagtccacagagaaaggcatcaccatcaactaatgatgaaactgcaaaggctgacactcctgctgcaccagcctcagattttctccattcagctacaggaaatgccagtgatgtggtgggtgctgagatgacagaacttggattggcgaaaccggtgcaagttgagtcttctgttgtgcaggactctgatgcatcggtgcaacagcacacaagtgagggtttaccatcccagggtcaagcttcacacttggaagctgctgctgataagttggtcggctctgatggtatagctgcatcggttgatgaaacggtaactgtcaatgcaaccattgaagatgtacctttggctgtaaatgattcagagccatgtgttgatggttctgctggaccatctgtggtgaacctggtacagatggatggtccattatttgatgcacaaggtacagtactaagtgcagattttcaacatgaagtccaagcaatgcaacaagtagtggcatctaacgatagactgaatgaactatcaacttcagaatttgccgagcctgagaaaatgctgacagctccgaatgctgaattcaatcatgcgattgacttggggcagataactgcggaaaaaggaacaattgaatctgatggaagtaacataataggcagcctaacaagcagaaaaagacacctggaatatagcttaccagctttagagagtgagaccactaaaaagttgcctagccgaccacatgttaaaagaaccaatgattttgttcctcatgatgatgatatactggcatctattttagtcggtaggacccctgggttcacacttgattcaacaccactaccaccaagggaatcatctctgaaacgcccaaggttggggtcgaagatgggtacactcaagagaaaagtgcagatagatgatgccatggtcctgcatgctgatactatacggcaacagttgatcaatactgaggatatacggcgcattcgtaaaaaggctccatgcactcgttccgaaatatggatgattgagaaaggttcactggaagatgatttattccacgagcccatcttttcctgcctatctgaggagctaaacaatttacacaatcggacatatgagactattgtacaccctgctgttcagagaatggaactacatggtcaattagacatgcctgaaacaataccagaatatagaaatattgctgggtttggttctgctactattgatggcccacttcacataccagatgggattcaatcagatgccatgttgtcaggcgcaaatgttgcatatggcgctacagctgcttttggtttgcaaattcctcctgactaccaggttaaccgtgcatctaatgattttgttgtcggcactcagcttcaagaggtggctaaaccttttattggtaatgagcacgaagtggcacctcctgacagagagcatgctcaagtagatacattgtatagtgaccgttttcaaggtgttccatctgatttgcagaggagtaatgatgcaaatgtttctagtcaagatgtggttctagataactctggccaagcttgtgctcatgcagtggacggcatgacaagggagtttaatcattttgttcatagagacgctaatctttttgggagtactgaggtccctgcttctgagattactggggtggaatataatcaagatgcctctggttttcctcgacaaacagaggatgacaacacggtggagtataatcaagatgcctctggttttcctcgaccaacggagggtgggaatgcggtggagtataatcaagatgtctctggttttcctcgaccaacagaggatggaaaaacggtggagtataatcaagatgcctctggttttcctcgaccaacagaggatgaaaacacggtggagtataatcaagatgcctctggttttcctcagccaaccgaggatgaaaacacggtggagtataatcaagatgcctctggttttcctcggccaacggaggatgaaaatgccgcgtctgctacgggagataattctggcttccaagaaaacaacacgggttctcatatggatctggatatgatgaatgactatgaagtgaaggaatgcaacgattttgggagtgcgattcatggcgttgatacagattttctgaactatggtgacgacgacaacgacgacgacttcgtcgacgccgacgagccaaatcccagtgagttccagtctctcgacaacagcggctggtcttctcgcaccaggggtgtcgcgagatatctcaagactctgttcgacgaggagtccggtctggggaggaagagcgtcgccatcgaccatctggtgcgcgggaagacgcggaaggaagcgtcgaggatgttcttcgagaccttggtgctgacgacgaaggactacatcagcgtggaccaaccgaaccccttcgactttgtgagcgtgaagccaggcccgaagctgctcatgtcagagttctagttcaacaaagtcagcgtaccctggcgcgatacattccctcttaccattgtatccatcatcacaccgaccaacaacaacaccgcagatatccccccccccctcctcttccaaaaccatttttgtgtatgttgttgcagttcccctcccctgtagcatctggtgcgctgatccgttgttgttgccagggcgtctgtccgagtaggatggtggttgtgttgtaccgtcggctatccaacagtatatagtagtagtatgattttagcgacactcggtgaagcccgccatgtaatctgctagggttcatgctcccctaagttactgtcgctttagactggctaaagcccgtagaggaattgtatacgagaaggacagggacagcccgagatgatgaatgatgtattgatgtgcctgttgactatgtgaggactgacggttttaactcaataattcaagtgacctttcctgtgaaccatgaatccatgccgg

SEQ ID NO: 74671 - DNA, 8090 bp, Zea Mays
cacgtactctgtcaaacgatacgccgcgatgcttccagacaagcgccatccccttcctcgccccacacgccgtcgtgttggccgcgcctctcttcaaccttttcttgagcattggcgagagcccttcacatggtgcggcgctggcatcgttgttggcgacctctgcgcggtcggatctgcaaaggttgcagctagcgcgcctacagtacgtcaacatggtgcggcatctctttttgcagatccccaacttgctacgccgccggccgccgcatcggaactccttgcaccgcttgcctttcttctcccattcaaccggcaagcgttccctggctcaataacgcaactgggggatgtctgtcgctatctccatataggaaacgacaggtgcgacagatttagattttcaggtgatgcgtggtcgggatcgccggatcaatcaaaataagtgtgaaatttgagaggccgtggaacttccagatcgagtagtatccatccagatcgatatcccagaagaccaagcctggccatgaaacgcatgctaccccgatctcttcttcaccttttcttatccgcaggtaccaacaaaaaaagtgacccttttgacgacgtattgcgtgggcaaggcatgacagtgcgacaagagagaaactaacaaagagctctgttcgttctgctgattgcttatgattcgactcgcagtggcggtagctgggagagcttgggactggccagacacgaccaactcaccactgtaataagacgacttttatacatagctgacagtacgcaacctcagttcaggcgcaaggttagtctgatgatctgccttcattttgaatctcgattttgctgcttcatgcatgtatcatttgcgtcatcgatcatgtgctttttttctaagatctgtcattcgttttgcacgcacatcattttcctttgagttacctttacaaagatgacggacttcagcaagcgtctgcatatgcaattccttttcttgcctatccatcgatttactcatagattttattttcttcttagctcgatcaaatacttacatgttcgttttttgtttctagccattgggttggaattagatgatggatcgcacataacatacatagcactcttttttagcataccacctcatgcttaacgcatttcttatatatatacacaggttaactttccaggtaactcaaaccgacacagcttaagataaagttggcctccatattaattgctacttacatattatcatcatctttttccccaaaaaatcttactagaatactaagaccatttttacacagcaaccacataaagttggacccaacatcaacaatgattttacaaactctcttgaatcacctccaaaaggttcttattatacatctccaatagaattatctaaaattaaaattatgttcgtttcttacaggttgaaacaacaacttttgaagactggccatgaatatctagatagtactacaccatctacatagtttgtaatcaatataatttgcatattattcttcgcacacctttataaccatagcacaacaggacaatagctcatcgactctttaacaacaactgatgttcacctttttctgcacaggtaattgttttgcatgtctatgacgagcatcgtcacttttggaccacgaatcttttttgtgtactgaaaccttttcagttctttatatgtttaagctatctctggctcttgaattaccctagaatctggttaaccttgtctttgctcttatatacttatttactctctaatatacatataatcatcatacatttacattatactatgctgcgctaaacggattggcacgcgcgcatgggcgcgcgctatacactagtatatgtttgatagagaacacatccaagcgtgtgagagcaatttctagtgtgttgtagtgagaggttgcattgatcgacactatattatggtcgagttgcaagttagcggtatatgttatgtttgtaggctgctgcctcttaaatggttgtaacaccaaaatattatgttggaatgtatgaaaattctccaaatgttttgaattaaaactattactaccttttaagttaattttctaaaacaaatagatgataatattaaatcttggatagttcaaatttaggcttgaattttcaaactggcctacaactttagcttataagatggcttgttgttacagcatacagttcccgtgtaagtttatgataaataactttagcttataagatgggttgttattacataaattaagatattagtttaacttaatttaaatataaacaatccgagttgaaccgagctactctggaatcctggatcaaaatgaacgtgctagtaagctactagcttttagtcatgccctaattaagaagtaacagtcaaatcacttcgccctttcgcctagagacctacaccactcctcatttgacgatgcacacgtgtaggaagatctgcatcgactatactgtaccggttatatcggtttcagccggtactgatttatattagaatcgatgtcggttgataccgatcgatcgatgcttgataacatgttaaacgattcgaccagtaccaatccaaatcacttgataatgacggattttaacgacgttataatttaattggtgtacatgtacatcgtgtcagcttatatccgttttaaaccgtttgaaattcaataaatccaaaaaacatattaactaagagaatattcctaccattttctccacagccacgtgaccagtttcacagactcacagctcaaggaggtatttaatttgccaattttgcacctcacccaataactgtcgtacatataatatagtctaacatccaagtttcgaaaagaaggcactaaaattaatttaggatgttattaaccaaaaatcattcttcaacacattcttaaacgaggtatctaaatattccaacttcttaaatattcatatttagtctctagacttagggacctcttgtgcactccttatagcctatttcgtacgtcaatcataccgtaaaatcatttaccagccacgagtgatggactttgaataattgaagccgtggaaagaatgaatttaaaattctcgttggccaagtttgaagatgacttttttcaaaaaaaagagaaaaacgaccaacctgtgattcatacaaaacgaaaatattaataaagagaataacgatgattattgaactttatcgtacaaatgaaatcaaatttaaagctgcaagtacaaatgaaaattcgagcaaataattgagaactatttactaacctaataattgaggactatttatcgtacaaatgaaaattcgagctagaatactttaaatatatttactaacctaataagtgagaactatttggagaccaaggttgattttattcccaaacgaggtgtttggttcgaggaatgaactaatccattatcatttcactcttcattttttatttggtttgaagaatgaaatgagttgatctatcaccacctcattcctcatagttatttagctagtattaatatgagaaatgtggtcatcccaccaaatttgagaaattaatccatgatgcacaaccttatttttgatgcagtgattccttaaatcaagcaaccccaatatgtatctaccaatttgctgaatctaaagaggtgtttagtttctaggtactaatttgtagtcactttattttgttctattttaggttcttaaatttgtaaatttaaactctatattgatttcaatatttgacaatttaaaaattaaattaaaataaaatagagggacttaaaattaatccatagaaactaaacacccatcagtttataatctttttttttagaaactactggacgcgtgtcgcctggaaaaggattccgcacaatcacaggagtgagagcacgaaacctgtgccatattttttttgtcttcgatttgcagctccaagcagcagagctgcagagaggcgtcagcggagcacaagctggcgtccaagcaaagcccgctgaagtgtccccccctgcctttcttctctccttcactctctcgttcgtggcgacgcttgtgcgaccactcaccgtagcccgctcgacgccagttattcgccgtgcagctcgccggcgacgagcaccctccagcctaaggaggggagccggagatgttctactcgcagttcatcttggccaagaagggccccctcgggaccatatggattgccgcacacttggagcggaagctgcgcaagaaccaggtcgcggacacggacatcggcgtctcagtagaaaacatacaaagttgcaaacatgtaccacagaaagcaaagcatactcaagattccatcatattccctgacgttccaatcgcacttcggttatcaagtcatcttatgttaggcgtggtcagaatctattctcggaaggtcaactacctattccatgactgcagcgaagctttgctgaagataaaacaagctttcaggtccactgctgttgatctacctcctgaggagtcaactgctccatatcactctataactctgcctgagacattcgatcttgatgattttgaactgccagaagctgtgtttcaaggcgatactgatcatcatgtgagcacaaaagagcagatcactttgcaagacaacccagagaaaacaggatattcaacatcccagtttggcctagatgaaagatttggtgatggcagttcatcacatattggcttggacttggaggaggaattaattctgaacaaggaccactcaattcatctcgagtctgatgatggtattattattcaaggtcggtcatcggtcccttctactgatatggagattgatgataacaaaagtacaaacataacagctgaaggatacagcaacatggacggtgggccttctagtcatgtaaagttaggtccactgaatgcagatgacctaggaggaaacagtatccgtaactggactggttacaatgtacagactcctgatttgaatgatatattattgcataataatgaggatattgcaggcccatcaacttcgtactatcaacctagcccatttacttgtgatgaacctgcatcaccagagttcattagcgctcaggccccagctacacctggtttaatggaagagacagttccttccagagtccatgaaagtcctgttctgagtccacagagaaaggcatcaccatcaactaatgatgaaactgcaaaggctgacactcctgctgcaccagcctcagattttctccattcagctacaggaaatgccagtgatgtggtgggtgctgagatgacagaacttggattggcgaaaccggtgcaagttgagtcttctgttgtgcaggactctgatgcatcggtgcaacagcacacaagtgagggtttaccatcccagggtcaagcttcacacttggaagctgctgctgataagttggtcggctctgatggtatagctgcatcggttgatgaaacggtaactgtcaatgcaaccattgaagatgtacctttggctgtaaatgattcagagccatgtgttgatggttctgctggaccatctgtggtgaacctggtacagatggatggtccattatttgatgcacaaggtacagtactaagtgcagattttcaacatgaagtccaagcaatgcaacaagtagtggcatctaacgatagactgaatgaactatcaacttcagaatttgccgagcctgagaaaatgctgacagctccgaatgctgaattcaatcatgcgattgacttggggcagataactgcggaaaaaggaacaattgaatctgatggaagtaacataataggcagcctaacaagcagaaaaagacacctggaatatagcttaccagctttagagagtgagaccactaaaaagttgcctagccgaccacatgttaaaagaaccaatgattttgttcctcatgatgatgatatactggcatctattttagtcggtaggacccctgggttcacacttgattcaacaccactaccaccaagggaatcatctctgaaacgcccaaggttggggtcgaagatgggtacactcaagagaaaagtgcagatagatgatgccatggtcctgcatgctgatactatacggcaacagttgatcaatactgaggatatacggcgcattcgtaaaaaggctccatgcactcgttccgaaatatggatgattgagaaaggttcactggaagatgatttattccacgagcccatcttttcctgcctatctgaggagctaaacaatttacacaatcggacatatgagactattgtacaccctgctgttcagagaatggaactacatggtcaattagacatgcctgaaacaataccagaatatagaaatattgctgggtttggttctgctactattgatggcccacttcacataccagatgggattcaatcagatgccatgttgtcaggcgcaaatgttgcatatggcgctacagctgcttttggtttgcaaattcctcctgactaccaggttaaccgtgcatctaatgattttgttgtcggcactcagcttcaagaggtggctaaaccttttattggtaatgagcacgaagtggcacctcctgacagagagcatgctcaagtagatacattgtatagtgaccgttttcaaggtgttccatctgatttgcagaggagtaatgatgcaaatgtttctagtcaagatgtggttctagataactctggccaagcttgtgctcatgcagtggacggcatgacaagggagtttaatcattttgttcatagagacgctaatctttttgggagtactgaggtccctgcttctgagattactggggtggaatataatcaagatgcctctggttttcctcgacaaacagaggatgacaacacggtggagtataatcaagatgcctctggttttcctcgaccaacggagggtgggaatgcggtggagtataatcaagatgtctctggttttcctcgaccaacagaggatggaaaaacgccaaccgaggatgaaaacacggtggagtataatcaagatgcctctggttttcctcggccaacggaggatgaaaatgccgcgtctgctacgggagataattctggcttccaagaaaacaacacgggttctcatatggatctggatatgatgaatgactatgaagtgaaggaatgcaacgattttgggagtgcgattcatggcgttgatacagattttctgaactatggtgacgacgacaacgacgacgacttcgtcgacgccgacgagccaaatcccagtgagttccagtctctcgacaacagcggctggtcttctcgcaccaggggtgtcgcgagatatctcaagactctgttcgacgaggagtccggtctggggaggaagagcgtcgccatcgaccatctggtgcgcgggaagacgcggaaggaagcgtcgaggatgttcttcgagaccttggtgctgacgacgaaggactacatcagcgtggaccaaccgaaccccttcgactttgtgagcgtgaagccaggcccgaagctgctcatgtcagagttctagttcaacaaagtcagcgtaccctggcgcgatacattccctcttaccattgtatccatcatcacaccgaccaacaacaacaccgcagatatccccccccccctcctcttccaaaaccatttttgtgtatgttgttgcagttcccctcccctgtagcatctggtgcgctgatccgttgttgttgccagggcgtctgtccgagtaggatggtggttgtgttgtaccgtcggctatccaacagtatatagtagtagtatgattttagcgacactcggtgaagcccgccatgtaatctgctagggttcatgctcccctaagttactgtcgctttagactggctaaagcccgtagaggaattgtatacgagaaggacagggacagcccgagatgatgaatgatgtattgatgtgcctgttgactatgtgaggactgacggttttaactcaataattcaagtgacctttcctgtgaaccatgaatccatgccgg

SEQ ID NO: 74672 - DNA, 7003 bp, Zea Mays
cacgtactctgtcaaacgatacgccgcgatgcttccagacaagcgccatccccttcctcgccccacacgccgtcgtgttggccgcgcctctcttcaaccttttcttgagcattggcgagagcccttcacatggtgcggcgctggcatcgttgttggcgacctctgcgcggtcggatctgcaaaggttgcagctagcgcgcctacagtacgtcaacatggtgcggcatctctttttgcagatccccaacttgctacgccgccggccgccgcatcggaactccttgcaccgcttgcctttcttctcccattcaaccggcaagcgttccctggctcaataacgcaactgggggatgtctgtcgctatctccatataggaaacgacaggtgcgacagatttagattttcaggtgatgcgtggtcgggatcgccggatcaatcaaaataagtgtgaaatttgagaggccgtggaacttccagatcgagtagtatccatccagatcgatatcccagaagaccaagcctggccatgaaacgcatgctaccccgatctcttcttcaccttttcttatccgcaggtaccaacaaaaaaagtgacccttttgacgacgtattgcgtgggcaaggcatgacagtgcgacaagagagaaactaacaaagagctctgttcgttctgctgattgcttatgattcgactcgcagtggcggtagctgggagagcttgggactggccagacacgaccaactcaccactgtaataagacgacttttatacatagctgacagtacgcaacctcagttcaggcgcaaggtaattgttttgcatgtctatgacgagcatcgtcacttttggaccacgaatcttttttgtgtactgaaaccttttcagttctttatatgtttaagctatctctggctcttgaattaccctagaatctggttaaccttgtctttgctcttatatacttatttactctctaatatacatataatcatcatacatttacattatactatgctgcgctaaacggattggcacgcgcgcatgggcgcgcgctatacactagtatatgtttgatagagaacacatccaagcgtgtgagagcaatttctagtgtgttgtagtgagaggttgcattgatcgacactatattatggtcgagttgcaagttagcggtatatgttatgtttgtaggctgctgcctcttaaatggttgtaacaccaaaatattatgttggaatgtatgaaaattctccaaatgttttgaattaaaactattactaccttttaagttaattttctaaaacaaatagatgataatattaaatcttggatagttcaaatttaggcttgaattttcaaactggcctacaactttagcttataagatggcttgttgttacagcatacagttcccgtgtaagtttatgataaataactttagcttataagatgggttgttattacataaattaagatattagtttaacttaatttaaatataaacaatccgagttgaaccgagctactctggaatcctggatcaaaatgaacgtgctagtaagctactagcttttagtcatgccctaattaagaagtaacagtcaaatcacttcgccctttcgcctagagacctacaccactcctcatttgacgatgcacacgtgtaggaagatctgcatcgactatactgtaccggttatatcggtttcagccggtactgatttatattagaatcgatgtcggttgataccgatcgatcgatgcttgataacatgttaaacgattcgaccagtaccaatccaaatcacttgataatgacggattttaacgacgttataatttaattggtgtacatgtacatcgtgtcagcttatatccgttttaaaccgtttgaaattcaataaatccaaaaaacatattaactaagagaatattcctaccattttctccacagccacgtgaccagtttcacagactcacagctcaaggaggtatttaatttgccaattttgcacctcacccaataactgtcgtacatataatatagtctaacatccaagtttcgaaaagaaggcactaaaattaatttaggatgttattaaccaaaaatcattcttcaacacattcttaaacgaggtatctaaatattccaacttcttaaatattcatatttagtctctagacttagggacctcttgtgcactccttatagcctatttcgtacgtcaatcataccgtaaaatcatttaccagccacgagtgatggactttgaataattgaagccgtggaaagaatgaatttaaaattctcgttggccaagtttgaagatgacttttttcaaaaaaaagagaaaaacgaccaacctgtgattcatacaaaacgaaaatattaataaagagaataacgatgattattgaactttatcgtacaaatgaaatcaaatttaaagctgcaagtacaaatgaaaattcgagcaaataattgagaactatttactaacctaataattgaggactatttatcgtacaaatgaaaattcgagctagaatactttaaatatatttactaacctaataagtgagaactatttggagaccaaggttgattttattcccaaacgaggtgtttggttcgaggaatgaactaatccattatcatttcactcttcattttttatttggtttgaagaatgaaatgagttgatctatcaccacctcattcctcatagttatttagctagtattaatatgagaaatgtggtcatcccaccaaatttgagaaattaatccatgatgcacaaccttatttttgatgcagtgattccttaaatcaagcaaccccaatatgtatctaccaatttgctgaatctaaagaggtgtttagtttctagctccaagcagcagagctgcagagaggcgtcagcggagcacaagctggcgtccaagcaaagcccgctgaagtgtccccccctgcctttcttctctccttcactctctcgttcgtggcgacgcttgtgcgaccactcaccgtagcccgctcgacgccagttattcgccgtgcagctcgccggcgacgagcaccctccagcctaaggaggggagccggagatgttctactcgcagttcatcttggccaagaagggccccctcgggaccatatggattgccgcacacttggagcggaagctgcgcaagaaccaggtcgcggacacggacatcggcgtctcagtagaaaacatacaaagttgcaaacatgtaccacagaaagcaaagcatactcaagattccatcatattccctgacgttccaatcgcacttcggttatcaagtcatcttatgttaggcgtggtcagaatctattctcggaaggtcaactacctattccatgactgcagcgaagctttgctgaagataaaacaagctttcaggtccactgctgttgatctacctcctgaggagtcaactgctccatatcactctataactctgcctgagacattcgatcttgatgattttgaactgccagaagctgtgtttcaaggcgatactgatcatcatgtgagcacaaaagagcagatcactttgcaagacaacccagagaaaacaggatattcaacatcccagtttggcctagatgaaagatttggtgatggcagttcatcacatattggcttggacttggaggaggaattaattctgaacaaggaccactcaattcatctcgagtctgatgatggtattattattcaaggtcggtcatcggtcccttctactgatatggagattgatgataacaaaagtacaaacataacagctgaaggatacagcaacatggacggtgggccttctagtcatgtaaagttaggtccactgaatgcagatgacctaggaggaaacagtatccgtaactggactggttacaatgtacagactcctgatttgaatgatatattattgcataataatgaggatattgcaggcccatcaacttcgtactatcaacctagcccatttacttgtgatgaacctgcatcaccagagttcattagcgctcaggccccagctacacctggtttaatggaagagacagttccttccagagtccatgaaagtcctgttctgagtccacagagaaaggcatcaccatcaactaatgatgaaactgcaaaggctgacactcctgctgcaccagcctcagattttctccattcagctacaggaaatgccagtgatgtggtgggtgctgagatgacagaacttggattggcgaaaccggtgcaagttgagtcttctgttgtgcaggactctgatgcatcggtgcaacagcacacaagtgagggtttaccatcccagggtcaagcttcacacttggaagctgctgctgataagttggtcggctctgatggtatagctgcatcggttgatgaaacggtaactgtcaatgcaaccattgaagatgtacctttggctgtaaatgattcagagccatgtgttgatggttctgctggaccatctgtggtgaacctggtacagatggatggtccattatttgatgcacaaggtacagtactaagtgcagattttcaacatgaagtccaagcaatgcaacaagtagtggcatctaacgatagactgaatgaactatcaacttcagaatttgccgagcctgagaaaatgctgacagctccgaatgctgaattcaatcatgcgattgacttggggcagataactgcggaaaaaggaacaattgaatctgatggaagtaacataataggcagcctaacaagcagaaaaagacacctggaatatagcttaccagctttagagagtgagaccactaaaaagttgcctagccgaccacatgttaaaagaaccaatgattttgttcctcatgatgatgatatactggcatctattttagtcggtaggacccctgggttcacacttgattcaacaccactaccaccaagggaatcatctctgaaacgcccaaggttggggtcgaagatgggtacactcaagagaaaagtgcagatagatgatgccatggtcctgcatgctgatactatacggcaacagttgatcaatactgaggatatacggcgcattcgtaaaaaggctccatgcactcgttccgaaatatggatgattgagaaaggttcactggaagatgatttattccacgagcccatcttttcctgcctatctgaggagctaaacaatttacacaatcggacatatgagactattgtacaccctgctgttcagagaatggaactacatggtcaattagacatgcctgaaacaataccagaatatagaaatattgctgggtttggttctgctactattgatggcccacttcacataccagatgggattcaatcagatgccatgttgtcaggcgcaaatgttgcatatggcgctacagctgcttttggtttgcaaattcctcctgactaccaggttaaccgtgcatctaatgattttgttgtcggcactcagcttcaagaggtggctaaaccttttattggtaatgagcacgaagtggcacctcctgacagagagcatgctcaagtagatacattgtatagtgaccgttttcaaggtgttccatctgatttgcagaggagtaatgatgcaaatgtttctagtcaagatgtggttctagataactctggccaagcttgtgctcatgcagtggacggcatgacaagggagtttaatcattttgttcatagagacgctaatctttttgggagtactgaggtccctgcttctgagattactggggtggaatataatcaagatgcctctggttttcctcgacaaacagaggatgacaacacggtggagtataatcaagatgcctctggttttcctcgaccaacggagggtgggaatgcggtggagtataatcaagatgtctctggttttcctcgaccaacagaggatggaaaaacgccaaccgaggatgaaaacacggtggagtataatcaagatgcctctggttttcctcggccaacggaggatgaaaatgccgcgtctgctacgggagataattctggcttccaagaaaacaacacgggttctcatatggatctggatatgatgaatgactatgaagtgaaggaatgcaacgattttgggagtgcgattcatggcgttgatacagattttctgaactatggtgacgacgacaacgacgacgacttcgtcgacgccgacgagccaaatcccagtgagttccagtctctcgacaacagcggctggtcttctcgcaccaggggtgtcgcgagatatctcaagactctgttcgacgaggagtccggtctggggaggaagagcgtcgccatcgaccatctggtgcgcgggaagacgcggaaggaagcgtcgaggatgttcttcgagaccttggtgctgacgacgaaggactacatcagcgtggaccaaccgaaccccttcgactttgtgagcgtgaagccaggcccgaagctgctcatgtcagagttctagttcaacaaagtcagcgtaccctggcgcgatacattccctcttaccattgtatccatcatcacaccgaccaacaacaacaccgcagatatccccccccccctcctcttccaaaaccatttttgtgtatgttgttgcagttcccctcccctgtagcatctggtgcgctgatccgttgttgttgccagggcgtctgtccgagtaggatggtggttgtgttgtaccgtcggctatccaacagtatatagtagtagtatgattttagcgacactcggtgaagcccgccatgtaatctgctagggttcatgctcccctaagttactgtcgctttagactggctaaagcccgtagaggaattgtatacgagaaggacagggacagcccgagatgatgaatgatgtattgatgtgcctgttgactatgtgaggactgacggttttaactcaataattcaagtgacctttcctgtgaaccatgaatccatgccgg

SEQ ID NO: 74673 - DNA, 7304 bp, Zea Mays
cacgtactctgtcaaacgatacgccgcgatgcttccagacaagcgccatccccttcctcgccccacacgccgtcgtgttggccgcgcctctcttcaaccttttcttgagcattggcgagagcccttcacatggtgcggcgctggcatcgttgttggcgacctctgcgcggtcggatctgcaaaggttgcagctagcgcgcctacagtacgtcaacatggtgcggcatctctttttgcagatccccaacttgctacgccgccggccgccgcatcggaactccttgcaccgcttgcctttcttctcccattcaaccggcaagcgttccctggctcaataacgcaactgggggatgtctgtcgctatctccatataggaaacgacaggtgcgacagatttagattttcaggtgatgcgtggtcgggatcgccggatcaatcaaaataagtgtgaaatttgagaggccgtggaacttccagatcgagtagtatccatccagatcgatatcccagaagaccaagcctggccatgaaacgcatgctaccccgatctcttcttcaccttttcttatccgcaggtaccaacaaaaaaagtgacccttttgacgacgtattgcgtgggcaaggcatgacagtgcgacaagagagaaactaacaaagagctctgttcgttctgctgattgcttatgattcgtggcggtagctgggagagcttgggactggccagacacgaccaactcaccactgtaataagacgacttttatacatagctgacagtacgcaacctcagttcaggcgcaaggtaattgttttgcatgtctatgacgagcatcgtcacttttggaccacgaatcttttttgtgtactgaaaccttttcagttctttatatgtttaagctatctctggctcttgaattaccctagaatctggttaaccttgtctttgctcttatatacttatttactctctaatatacatataatcatcatacatttacattatactatgctgcgctaaacggattggcacgcgcgcatgggcgcgcgctatacactagtatatgtttgatagagaacacatccaagcgtgtgagagcaatttctagtgtgttgtagtgagaggttgcattgatcgacactatattatggtcgagttgcaagttagcggtatatgttatgtttgtaggctgctgcctcttaaatggttgtaacaccaaaatattatgttggaatgtatgaaaattctccaaatgttttgaattaaaactattactaccttttaagttaattttctaaaacaaatagatgataatattaaatcttggatagttcaaatttaggcttgaattttcaaactggcctacaactttagcttataagatggcttgttgttacagcatacagttcccgtgtaagtttatgataaataactttagcttataagatgggttgttattacataaattaagatattagtttaacttaatttaaatataaacaatccgagttgaaccgagctactctggaatcctggatcaaaatgaacgtgctagtaagctactagcttttagtcatgccctaattaagaagtaacagtcaaatcacttcgccctttcgcctagagacctacaccactcctcatttgacgatgcacacgtgtaggaagatctgcatcgactatactgtaccggttatatcggtttcagccggtactgatttatattagaatcgatgtcggttgataccgatcgatcgatgcttgataacatgttaaacgattcgaccagtaccaatccaaatcacttgataatgacggattttaacgacgttataatttaattggtgtacatgtacatcgtgtcagcttatatccgttttaaaccgtttgaaattcaataaatccaaaaaacatattaactaagagaatattcctaccattttctccacagccacgtgaccagtttcacagactcacagctcaaggaggtatttaatttgccaattttgcacctcacccaataactgtcgtacatataatatagtctaacatccaagtttcgaaaagaaggcactaaaattaatttaggatgttattaaccaaaaatcattcttcaacacattcttaaacgaggtatctaaatattccaacttcttaaatattcatatttagtctctagacttagggacctcttgtgcactccttatagcctatttcgtacgtcaatcataccgtaaaatcatttaccagccacgagtgatggactttgaataattgaagccgtggaaagaatgaatttaaaattctcgttggccaagtttgaagatgacttttttcaaaaaaaagagaaaaacgaccaacctgtgattcatacaaaacgaaaatattaataaagagaataacgatgattattgaactttatcgtacaaatgaaatcaaatttaaagctgcaagtacaaatgaaaattcgagcaaataattgagaactatttactaacctaataattgaggactatttatcgtacaaatgaaaattcgagctagaatactttaaatatatttactaacctaataagtgagaactatttggagaccaaggttgattttattcccaaacgaggtgtttggttcgaggaatgaactaatccattatcatttcactcttcattttttatttggtttgaagaatgaaatgagttgatctatcaccacctcattcctcatagttatttagctagtattaatatgagaaatgtggtcatcccaccaaatttgagaaattaatccatgatgcacaaccttatttttgatgcagtgattccttaaatcaagcaaccccaatatgtatctaccaatttgctgaatctaaagaggtgtttagtttctaggtactaatttgtagtcactttattttgttctattttaggttcttaaatttgtaaatttaaactctatattgatttcaatatttgacaatttaaaaattaaattaaaataaaatagagggacttaaaattaatccatagaaactaaacacccatcagtttataatctttttttttagaaactactggacgcgtgtcgcctggaaaaggattccgcacaatcacaggagtgagagcacgaaacctgtgccatattttttttgtcttcgatttgcagctccaagcagcagagctgcagagaggcgtcagcggagcacaagctggcgtccaagcaaagcccgctgaagtgtccccccctgcctttcttctctccttcactctctcgttcgtggcgacgcttgtgcgaccactcaccgtagcccgctcgacgccagttattcgccgtgcagctcgccggcgacgagcaccctccagcctaaggaggggagccggagatgttctactcgcagttcatcttggccaagaagggccccctcgggaccatatggattgccgcacacttggagcggaagctgcgcaagaaccaggtcgcggacacggacatcggcgtctcagtagattccatcatattccctgacgttccaatcgcacttcggttatcaagtcatcttatgttaggcgtggtcagaatctattctcggaaggtcaactacctattccatgactgcagcgaagctttgctgaagataaaacaagctttcaggtccactgctgttgatctacctcctgaggagtcaactgctccatatcactctataactctgcctgagacattcgatcttgatgattttgaactgccagaagctgtgtttcaaggcgatactgatcatcatgtgagcacaaaagagcagatcactttgcaagacaacccagagaaaacaggatattcaacatcccagtttggcctagatgaaagatttggtgatggcagttcatcacatattggcttggacttggaggaggaattaattctgaacaaggaccactcaattcatctcgagtctgatgatggtattattattcaaggtcggtcatcggtcccttctactgatatggagattgatgataacaaaagtacaaacataacagctgaaggatacagcaacatggacggtgggccttctagtcatgtaaagttaggtccactgaatgcagatgacctaggaggaaacagtatccgtaactggactggttacaatgtacagactcctgatttgaatgatatattattgcataataatgaggatattgcaggcccatcaacttcgtactatcaacctagcccatttacttgtgatgaacctgcatcaccagagttcattagcgctcaggccccagctacacctggtttaatggaagagacagttccttccagagtccatgaaagtcctgttctgagtccacagagaaaggcatcaccatcaactaatgatgaaactgcaaaggctgacactcctgctgcaccagcctcagattttctccattcagctacaggaaatgccagtgatgtggtgggtgctgagatgacagaacttggattggcgaaaccggtgcaagttgagtcttctgttgtgcaggactctgatgcatcggtgcaacagcacacaagtgagggtttaccatcccagggtcaagcttcacacttggaagctgctgctgataagttggtcggctctgatggtatagctgcatcggttgatgaaacggtaactgtcaatgcaaccattgaagatgtacctttggctgtaaatgattcagagccatgtgttgatggttctgctggaccatctgtggtgaacctggtacagatggatggtccattatttgatgcacaaggtacagtactaagtgcagattttcaacatgaagtccaagcaatgcaacaagtagtggcatctaacgatagactgaatgaactatcaacttcagaatttgccgagcctgagaaaatgctgacagctccgaatgctgaattcaatcatgcgattgacttggggcagataactgcggaaaaaggaacaattgaatctgatggaagtaacataataggcagcctaacaagcagaaaaagacacctggaatatagcttaccagctttagagagtgagaccactaaaaagttgcctagccgaccacatgttaaaagaaccaatgattttgttcctcatgatgatgatatactggcatctattttaggacccctgggttcacacttgattcaacaccactaccaccaagggaatcatctctgaaacgcccaaggttggggtcgaagatgggtacactcaagagaaaagtgcagatagatgatgccatggtcctgcatgctgatactatacggcaacagttgatcaatactgaggatatacggcgcattcgtaaaaaggctccatgcactcgttccgaaatatggatgattgagaaaggttcactggaagatgatttattccacgagcccatcttttcctgcctatctgaggagctaaacaatttacacaatcggacatatgagactattgtacaccctgctgttcagagaatggaactacatggtcaattagacatgcctgaaacaataccagaatatagaaatattgctgggtttggttctgctactattgatggcccacttcacataccagatgggattcaatcagatgccatgttgtcaggcgcaaatgttgcatatggcgctacagctgcttttggtttgcaaattcctcctgactaccaggttaaccgtgcatctaatgattttgttgtcggcactcagcttcaagaggtggctaaaccttttattggtaatgagcacgaagtggcacctcctgacagagagcatgctcaagtagatacattgtatagtgaccgttttcaaggtgttccatctgatttgcagaggagtaatgatgcaaatgtttctagtcaagatgtggttctagataactctggccaagcttgtgctcatgcagtggacggcatgacaagggagtttaatcattttgttcatagagacgctaatctttttgggagtactgaggtccctgcttctgagattactggggtggaatataatcaagatgcctctggttttcctcgacaaacagaggatgacaacacggtggagtataatcaagatgcctctggttttcctcgaccaacggagggtgggaatgcggtggagtataatcaagatgtctctggttttcctcgaccaacagaggatggaaaaacggtggagtataatcaagatgcctctggttttcctcgaccaacagaggatgaaaacacggtggagtataatcaagatgcctctggttttcctcagccaaccgaggatgaaaacacggtggagtataatcaagatgcctctggttttcctcggccaacggaggatgaaaatgccgcgtctgctacgggagataattctggcttccaagaaaacaacacgggttctcatatggatctggatatgatgaatgactatgaagtgaaggaatgcaacgattttgggagtgcgattcatggcgttgatacagattttctgaactatggtgacgacgacaacgacgacgacttcgtcgacgccgacgagccaaatcccagtgagttccagtctctcgacaacagcggctggtcttctcgcaccaggggtgtcgcgagatatctcaagactctgttcgacgaggagtccggtctggggaggaagagcgtcgccatcgaccatctggtgcgcgggaagacgcggaaggaagcgtcgaggatgttcttcgagaccttggtgctgacgacgaaggactacatcagcgtggaccaaccgaaccccttcgactttgtgagcgtgaagccaggcccgaagctgctcatgtcagagttctagttcaacaaagtcagcgtaccctggcgcgatacattccctcttaccattgtatccatcatcacaccgaccaacaacaacaccgcagatatccccccccccctcctcttccaaaaccatttttgtgtatgttgttgcagttcccctcccctgtagcatctggtgcgctgatccgttgttgttgccagggcgtctgtccgagtaggatggtggttgtgttgtaccgtcggctatccaacagtatatagtagtagtatgattttagcgacactcggtgaagcccgccatgtaatctgctagggttcatgctcccctaagttactgtcgctttagactggctaaagcccgtagaggaattgtatacgagaaggacagggacagcccgagatgatgaatgatgtattgatgtgcctgttgactatgtgaggactgacggttttaactcaataattcaagtgacctttcctgtgaaccatgaatccatgccgg

SEQ ID NO: 74674 - DNA, 7858 bp, Zea Mays
cacgtactctgtcaaacgatacgccgcgatgcttccagacaagcgccatccccttcctcgccccacacgccgtcgtgttggccgcgcctctcttcaaccttttcttgagcattggcgagagcccttcacatggtgcggcgctggcatcgttgttggcgacctctgcgcggtcggatctgcaaaggttgcagctagcgcgcctacagtacgtcaacatggtgcggcatctctttttgcagatccccaacttgctacgccgccggccgccgcatcggaactccttgcaccgcttgcctttcttctcccattcaaccggcaagcgttccctggctcaataacgcaactgggggatgtctgtcgctatctccatataggaaacgacaggtgcgacagatttagattttcaggtgatgcgtggtcgggatcgccggatcaatcaaaataagtgtgaaatttgagaggccgtggaacttccagatcgagtagtatccatccagatcgatatcccagaagaccaagcctggccatgaaacgcatgctaccccgatctcttcttcaccttttcttatccgcaggtaccaacaaaaaaagtgacccttttgacgacgtattgcgtgggcaaggcatgacagtgcgacaagagagaaactaacaaagagctctgttcgttctgctgattgcttatgattcgactcgcagtggcggtagctgggagagcttgggactggccagacacgaccaactcaccactgtaataagacgacttttatacatagctgacagtacgcaacctcagttcaggcgcaaggttagtctgatgatctgccttcattttgaatctcgattttgctgcttcatgcatgtatcatttgcgtcatcgatcatgtgctttttttctaagatctgtcattcgttttgcacgcacatcattttcctttgagttacctttacaaagatgacggacttcagcaagcgtctgcatatgcaattccttttcttgcctatccatcgatttactcatagattttattttcttcttagctcgatcaaatacttacatgttcgttttttgtttctagccattgggttggaattagatgatggatcgcacataacatacatagcactcttttttagcataccacctcatgcttaacgcatttcttatatatatacacaggttaactttccaggtaactcaaaccgacacagcttaagataaagttggcctccatattaattgctacttacatattatcatcatctttttccccaaaaaatcttactagaatactaagaccatttttacacagcaaccacataaagttggacccaacatcaacaatgattttacaaactctcttgaatcacctccaaaaggttcttattatacatctccaatagaattatctaaaattaaaattatgttcgtttcttacaggttgaaacaacaacttttgaagactggccatgaatatctagatagtactacaccatctacatagtttgtaatcaatataatttgcatattattcttcgcacacctttataaccatagcacaacaggacaatagctcatcgactctttaacaacaactgatgttcacctttttctgcacaggtaattgttttgcatgtctatgacgagcatcgtcacttttggaccacgaatcttttttgtgtactgaaaccttttcagttctttatatgtttaagctatctctggctcttgaattaccctagaatctggttaaccttgtctttgctcttatatacttatttactctctaatatacatataatcatcatacatttacattatactatgctgcgctaaacggattggcacgcgcgcatgggcgcgcgctatacactagtatatgtttgatagagaacacatccaagcgtgtgagagcaatttctagtgtgttgtagtgagaggttgcattgatcgacactatattatggtcgagttgcaagttagcggtatatgttatgtttgtaggctgctgcctcttaaatggttgtaacaccaaaatattatgttggaatgtatgaaaattctccaaatgttttgaattaaaactattactaccttttaagttaattttctaaaacaaatagatgataatattaaatcttggatagttcaaatttaggcttgaattttcaaactggcctacaactttagcttataagatggcttgttgttacagcatacagttcccgtgtaagtttatgataaataactttagcttataagatgggttgttattacataaattaagatattagtttaacttaatttaaatataaacaatccgagttgaaccgagctactctggaatcctggatcaaaatgaacgtgctagtaagctactagcttttagtcatgccctaattaagaagtaacagtcaaatcacttcgccctttcgcctagagacctacaccactcctcatttgacgatgcacacgtgtaggaagatctgcatcgactatactgtaccggttatatcggtttcagccggtactgatttatattagaatcgatgtcggttgataccgatcgatcgatgcttgataacatgttaaacgattcgaccagtaccaatccaaatcacttgataatgacggattttaacgacgttataatttaattggtgtacatgtacatcgtgtcagcttatatccgttttaaaccgtttgaaattcaataaatccaaaaaacatattaactaagagaatattcctaccattttctccacagccacgtgaccagtttcacagactcacagctcaaggaggtatttaatttgccaattttgcacctcacccaataactgtcgtacatataatatagtctaacatccaagtttcgaaaagaaggcactaaaattaatttaggatgttattaaccaaaaatcattcttcaacacattcttaaacgaggtatctaaatattccaacttcttaaatattcatatttagtctctagacttagggacctcttgtgcactccttatagcctatttcgtacgtcaatcataccgtaaaatcatttaccagccacgagtgatggactttgaataattgaagccgtggaaagaatgaatttaaaattctcgttggccaagtttgaagatgacttttttcaaaaaaaagagaaaaacgaccaacctgtgattcatacaaaacgaaaatattaataaagagaataacgatgattattgaactttatcgtacaaatgaaatcaaatttaaagctgcaagtacaaatgaaaattcgagcaaataattgagaactatttactaacctaataattgaggactatttatcgtacaaatgaaaattcgagctagaatactttaaatatatttactaacctaataagtgagaactatttggagaccaaggttgattttattcccaaacgaggtgtttggttcgaggaatgaactaatccattatcatttcactcttcattttttatttggtttgaagaatgaaatgagttgatctatcaccacctcattcctcatagttatttagctagtattaatatgagaaatgtggtcatcccaccaaatttgagaaattaatccatgatgcacaaccttatttttgatgcagtgattccttaaatcaagcaaccccaatatgtatctaccaatttgctgaatctaaagaggtgtttagtttctagctccaagcagcagagctgcagagaggcgtcagcggagcacaagctggcgtccaagcaaagcccgctgaagtgtccccccctgcctttcttctctccttcactctctcgttcgtggcgacgcttgtgcgaccactcaccgtagcccgctcgacgccagttattcgccgtgcagctcgccggcgacgagcaccctccagcctaaggaggggagccggagatgttctactcgcagttcatcttggccaagaagggccccctcgggaccatatggattgccgcacacttggagcggaagctgcgcaagaaccaggtcgcggacacggacatcggcgtctcagtagattccatcatattccctgacgttccaatcgcacttcggttatcaagtcatcttatgttaggcgtggtcagaatctattctcggaaggtcaactacctattccatgactgcagcgaagctttgctgaagataaaacaagctttcaggtccactgctgttgatctacctcctgaggagtcaactgctccatatcactctataactctgcctgagacattcgatcttgatgattttgaactgccagaagctgtgtttcaaggcgatactgatcatcatgtgagcacaaaagagcagatcactttgcaagacaacccagagaaaacaggatattcaacatcccagtttggcctagatgaaagatttggtgatggcagttcatcacatattggcttggacttggaggaggaattaattctgaacaaggaccactcaattcatctcgagtctgatgatggtattattattcaaggtcggtcatcggtcccttctactgatatggagattgatgataacaaaagtacaaacataacagctgaaggatacagcaacatggacggtgggccttctagtcatgtaaagttaggtccactgaatgcagatgacctaggaggaaacagtatccgtaactggactggttacaatgtacagactcctgatttgaatgatatattattgcataataatgaggatattgcaggcccatcaacttcgtactatcaacctagcccatttacttgtgatgaacctgcatcaccagagttcattagcgctcaggccccagctacacctggtttaatggaagagacagttccttccagagtccatgaaagtcctgttctgagtccacagagaaaggcatcaccatcaactaatgatgaaactgcaaaggctgacactcctgctgcaccagcctcagattttctccattcagctacaggaaatgccagtgatgtggtgggtgctgagatgacagaacttggattggcgaaaccggtgcaagttgagtcttctgttgtgcaggactctgatgcatcggtgcaacagcacacaagtgagggtttaccatcccagggtcaagcttcacacttggaagctgctgctgataagttggtcggctctgatggtatagctgcatcggttgatgaaacggtaactgtcaatgcaaccattgaagatgtacctttggctgtaaatgattcagagccatgtgttgatggttctgctggaccatctgtggtgaacctggtacagatggatggtccattatttgatgcacaaggtacagtactaagtgcagattttcaacatgaagtccaagcaatgcaacaagtagtggcatctaacgatagactgaatgaactatcaacttcagaatttgccgagcctgagaaaatgctgacagctccgaatgctgaattcaatcatgcgattgacttggggcagataactgcggaaaaaggaacaattgaatctgatggaagtaacataataggcagcctaacaagcagaaaaagacacctggaatatagcttaccagctttagagagtgagaccactaaaaagttgcctagccgaccacatgttaaaagaaccaatgattttgttcctcatgatgatgatatactggcatctattttagtcggtaggacccctgggttcacacttgattcaacaccactaccaccaagggaatcatctctgaaacgcccaaggttggggtcgaagatgggtacactcaagagaaaagtgcagatagatgatgccatggtcctgcatgctgatactatacggcaacagttgatcaatactgaggatatacggcgcattcgtaaaaaggctccatgcactcgttccgaaatatggatgattgagaaaggttcactggaagatgatttattccacgagcccatcttttcctgcctatctgaggagctaaacaatttacacaatcggacatatgagactattgtacaccctgctgttcagagaatggaactacatggtcaattagacatgcctgaaacaataccagaatatagaaatattgctgggtttggttctgctactattgatggcccacttcacataccagatgggattcaatcagatgccatgttgtcaggcgcaaatgttgcatatggcgctacagctgcttttggtttgcaaattcctcctgactaccaggttaaccgtgcatctaatgattttgttgtcggcactcagcttcaagaggtggctaaaccttttattggtaatgagcacgaagtggcacctcctgacagagagcatgctcaagtagatacattgtatagtgaccgttttcaaggtgttccatctgatttgcagaggagtaatgatgcaaatgtttctagtcaagatgtggttctagataactctggccaagcttgtgctcatgcagtggacggcatgacaagggagtttaatcattttgttcatagagacgctaatctttttgggagtactgaggtccctgcttctgagattactggggtggaatataatcaagatgcctctggttttcctcgacaaacagaggatgacaacacggtggagtataatcaagatgcctctggttttcctcgaccaacggagggtgggaatgcggtggagtataatcaagatgtctctggttttcctcgaccaacagaggatggaaaaacggtggagtataatcaagatgcctctggttttcctcgaccaacagaggatgaaaacacggtggagtataatcaagatgcctctggttttcctcagccaaccgaggatgaaaacacggtggagtataatcaagatgcctctggttttcctcggccaacggaggatgaaaatgccgcgtctgctacgggagataattctggcttccaagaaaacaacacgggttctcatatggatctggatatgatgaatgactatgaagtgaaggaatgcaacgattttgggagtgcgattcatggcgttgatacagattttctgaactatggtgacgacgacaacgacgacgacttcgtcgacgccgacgagccaaatcccagtgagttccagtctctcgacaacagcggctggtcttctcgcaccaggggtgtcgcgagatatctcaagactctgttcgacgaggagtccggtctggggaggaagagcgtcgccatcgaccatctggtgcgcgggaagacgcggaaggaagcgtcgaggatgttcttcgagaccttggtgctgacgacgaaggactacatcagcgtggaccaaccgaaccccttcgactttgtgagcgtgaagccaggcccgaagctgctcatgtcagagttctagttcaacaaagtcagcgtaccctggcgcgatacattccctcttaccattgtatccatcatcacaccgaccaacaacaacaccgcagatatccccccccccctcctcttccaaaaccatttttgtgtatgttgttgcagttcccctcccctgtagcatctggtgcgctgatccgttgttgttgccagggcgtctgtccgagtaggatggtggttgtgttgtaccgtcggctatccaacagtatatagtagtagtatgattttagcgacactcggtgaagcccgccatgtaatctgctagggttcatgctcccctaagttactgtcgctttagactggctaaagcccgtagaggaattgtatacgagaaggacagggacagcccgagatgatgaatgatgtattgatgtgcctgttgactatgtgaggactgacggttttaactcaataattcaagtgacctttcctgtgaaccatgaatccatgccgg

SEQ ID NO: 74675 - DNA, 7948 bp, Zea Mays
cacgtactctgtcaaacgatacgccgcgatgcttccagacaagcgccatccccttcctcgccccacacgccgtcgtgttggccgcgcctctcttcaaccttttcttgagcattggcgagagcccttcacatggtgcggcgctggcatcgttgttggcgacctctgcgcggtcggatctgcaaaggttgcagctagcgcgcctacagtacgtcaacatggtgcggcatctctttttgcagatccccaacttgctacgccgccggccgccgcatcggaactccttgcaccgcttgcctttcttctcccattcaaccggcaagcgttccctggctcaataacgcaactgggggatgtctgtcgctatctccatataggaaacgacaggtgcgacagatttagattttcaggtgatgcgtggtcgggatcgccggatcaatcaaaataagtgtgaaatttgagaggccgtggaacttccagatcgagtagtatccatccagatcgatatcccagaagaccaagcctggccatgaaacgcatgctaccccgatctcttcttcaccttttcttatccgcaggtaccaacaaaaaaagtgacccttttgacgacgtattgcgtgggcaaggcatgacagtgcgacaagagagaaactaacaaagagctctgttcgttctgctgattgcttatgattcgtggcggtagctgggagagcttgggactggccagacacgaccaactcaccactgtaataagacgacttttatacatagctgacagtacgcaacctcagttcaggcgcaaggttagtctgatgatctgccttcattttgaatctcgattttgctgcttcatgcatgtatcatttgcgtcatcgatcatgtgctttttttctaagatctgtcattcgttttgcacgcacatcattttcctttgagttacctttacaaagatgacggacttcagcaagcgtctgcatatgcaattccttttcttgcctatccatcgatttactcatagattttattttcttcttagctcgatcaaatacttacatgttcgttttttgtttctagccattgggttggaattagatgatggatcgcacataacatacatagcactcttttttagcataccacctcatgcttaacgcatttcttatatatatacacaggttaactttccaggtaactcaaaccgacacagcttaagataaagttggcctccatattaattgctacttacatattatcatcatctttttccccaaaaaatcttactagaatactaagaccatttttacacagcaaccacataaagttggacccaacatcaacaatgattttacaaactctcttgaatcacctccaaaaggttcttattatacatctccaatagaattatctaaaattaaaattatgttcgtttcttacaggttgaaacaacaacttttgaagactggccatgaatatctagatagtactacaccatctacatagtttgtaatcaatataatttgcatattattcttcgcacacctttataaccatagcacaacaggacaatagctcatcgactctttaacaacaactgatgttcacctttttctgcacaggtaattgttttgcatgtctatgacgagcatcgtcacttttggaccacgaatcttttttgtgtactgaaaccttttcagttctttatatgtttaagctatctctggctcttgaattaccctagaatctggttaaccttgtctttgctcttatatacttatttactctctaatatacatataatcatcatacatttacattatactatgctgcgctaaacggattggcacgcgcgcatgggcgcgcgctatacactagtatatgtttgatagagaacacatccaagcgtgtgagagcaatttctagtgtgttgtagtgagaggttgcattgatcgacactatattatggtcgagttgcaagttagcggtatatgttatgtttgtaggctgctgcctcttaaatggttgtaacaccaaaatattatgttggaatgtatgaaaattctccaaatgttttgaattaaaactattactaccttttaagttaattttctaaaacaaatagatgataatattaaatcttggatagttcaaatttaggcttgaattttcaaactggcctacaactttagcttataagatggcttgttgttacagcatacagttcccgtgtaagtttatgataaataactttagcttataagatgggttgttattacataaattaagatattagtttaacttaatttaaatataaacaatccgagttgaaccgagctactctggaatcctggatcaaaatgaacgtgctagtaagctactagcttttagtcatgccctaattaagaagtaacagtcaaatcacttcgccctttcgcctagagacctacaccactcctcatttgacgatgcacacgtgtaggaagatctgcatcgactatactgtaccggttatatcggtttcagccggtactgatttatattagaatcgatgtcggttgataccgatcgatcgatgcttgataacatgttaaacgattcgaccagtaccaatccaaatcacttgataatgacggattttaacgacgttataatttaattggtgtacatgtacatcgtgtcagcttatatccgttttaaaccgtttgaaattcaataaatccaaaaaacatattaactaagagaatattcctaccattttctccacagccacgtgaccagtttcacagactcacagctcaaggaggtatttaatttgccaattttgcacctcacccaataactgtcgtacatataatatagtctaacatccaagtttcgaaaagaaggcactaaaattaatttaggatgttattaaccaaaaatcattcttcaacacattcttaaacgaggtatctaaatattccaacttcttaaatattcatatttagtctctagacttagggacctcttgtgcactccttatagcctatttcgtacgtcaatcataccgtaaaatcatttaccagccacgagtgatggactttgaataattgaagccgtggaaagaatgaatttaaaattctcgttggccaagtttgaagatgacttttttcaaaaaaaagagaaaaacgaccaacctgtgattcatacaaaacgaaaatattaataaagagaataacgatgattattgaactttatcgtacaaatgaaatcaaatttaaagctgcaagtacaaatgaaaattcgagcaaataattgagaactatttactaacctaataattgaggactatttatcgtacaaatgaaaattcgagctagaatactttaaatatatttactaacctaataagtgagaactatttggagaccaaggttgattttattcccaaacgaggtgtttggttcgaggaatgaactaatccattatcatttcactcttcattttttatttggtttgaagaatgaaatgagttgatctatcaccacctcattcctcatagttatttagctagtattaatatgagaaatgtggtcatcccaccaaatttgagaaattaatccatgatgcacaaccttatttttgatgcagtgattccttaaatcaagcaaccccaatatgtatctaccaatttgctgaatctaaagaggtgtttagtttctagaaactactggacgcgtgtcgcctggaaaaggattccgcacaatcacaggagtgagagcacgaaacctgtgccatattttttttgtcttcgatttgcagctccaagcagcagagctgcagagaggcgtcagcggagcacaagctggcgtccaagcaaagcccgctgaagtgtccccccctgcctttcttctctccttcactctctcgttcgtggcgacgcttgtgcgaccactcaccgtagcccgctcgacgccagttattcgccgtgcagctcgccggcgacgagcaccctccagcctaaggaggggagccggagatgttctactcgcagttcatcttggccaagaagggccccctcgggaccatatggattgccgcacacttggagcggaagctgcgcaagaaccaggtcgcggacacggacatcggcgtctcagtagattccatcatattccctgacgttccaatcgcacttcggttatcaagtcatcttatgttaggcgtggtcagaatctattctcggaaggtcaactacctattccatgactgcagcgaagctttgctgaagataaaacaagctttcaggtccactgctgttgatctacctcctgaggagtcaactgctccatatcactctataactctgcctgagacattcgatcttgatgattttgaactgccagaagctgtgtttcaaggcgatactgatcatcatgtgagcacaaaagagcagatcactttgcaagacaacccagagaaaacaggatattcaacatcccagtttggcctagatgaaagatttggtgatggcagttcatcacatattggcttggacttggaggaggaattaattctgaacaaggaccactcaattcatctcgagtctgatgatggtattattattcaaggtcggtcatcggtcccttctactgatatggagattgatgataacaaaagtacaaacataacagctgaaggatacagcaacatggacggtgggccttctagtcatgtaaagttaggtccactgaatgcagatgacctaggaggaaacagtatccgtaactggactggttacaatgtacagactcctgatttgaatgatatattattgcataataatgaggatattgcaggcccatcaacttcgtactatcaacctagcccatttacttgtgatgaacctgcatcaccagagttcattagcgctcaggccccagctacacctggtttaatggaagagacagttccttccagagtccatgaaagtcctgttctgagtccacagagaaaggcatcaccatcaactaatgatgaaactgcaaaggctgacactcctgctgcaccagcctcagattttctccattcagctacaggaaatgccagtgatgtggtgggtgctgagatgacagaacttggattggcgaaaccggtgcaagttgagtcttctgttgtgcaggactctgatgcatcggtgcaacagcacacaagtgagggtttaccatcccagggtcaagcttcacacttggaagctgctgctgataagttggtcggctctgatggtatagctgcatcggttgatgaaacggtaactgtcaatgcaaccattgaagatgtacctttggctgtaaatgattcagagccatgtgttgatggttctgctggaccatctgtggtgaacctggtacagatggatggtccattatttgatgcacaaggtacagtactaagtgcagattttcaacatgaagtccaagcaatgcaacaagtagtggcatctaacgatagactgaatgaactatcaacttcagaatttgccgagcctgagaaaatgctgacagctccgaatgctgaattcaatcatgcgattgacttggggcagataactgcggaaaaaggaacaattgaatctgatggaagtaacataataggcagcctaacaagcagaaaaagacacctggaatatagcttaccagctttagagagtgagaccactaaaaagttgcctagccgaccacatgttaaaagaaccaatgattttgttcctcatgatgatgatatactggcatctattttagtcggtaggacccctgggttcacacttgattcaacaccactaccaccaagggaatcatctctgaaacgcccaaggttggggtcgaagatgggtacactcaagagaaaagtgcagatagatgatgccatggtcctgcatgctgatactatacggcaacagttgatcaatactgaggatatacggcgcattcgtaaaaaggctccatgcactcgttccgaaatatggatgattgagaaaggttcactggaagatgatttattccacgagcccatcttttcctgcctatctgaggagctaaacaatttacacaatcggacatatgagactattgtacaccctgctgttcagagaatggaactacatggtcaattagacatgcctgaaacaataccagaatatagaaatattgctgggtttggttctgctactattgatggcccacttcacataccagatgggattcaatcagatgccatgttgtcaggcgcaaatgttgcatatggcgctacagctgcttttggtttgcaaattcctcctgactaccaggttaaccgtgcatctaatgattttgttgtcggcactcagcttcaagaggtggctaaaccttttattggtaatgagcacgaagtggcacctcctgacagagagcatgctcaagtagatacattgtatagtgaccgttttcaaggtgttccatctgatttgcagaggagtaatgatgcaaatgtttctagtcaagatgtggttctagataactctggccaagcttgtgctcatgcagtggacggcatgacaagggagtttaatcattttgttcatagagacgctaatctttttgggagtactgaggtccctgcttctgagattactggggtggaatataatcaagatgcctctggttttcctcgacaaacagaggatgacaacacggtggagtataatcaagatgcctctggttttcctcgaccaacggagggtgggaatgcggtggagtataatcaagatgtctctggttttcctcgaccaacagaggatggaaaaacggtggagtataatcaagatgcctctggttttcctcgaccaacagaggatgaaaacacggtggagtataatcaagatgcctctggttttcctcagccaaccgaggatgaaaacacggtggagtataatcaagatgcctctggttttcctcggccaacggaggatgaaaatgccgcgtctgctacgggagataattctggcttccaagaaaacaacacgggttctcatatggatctggatatgatgaatgactatgaagtgaaggaatgcaacgattttgggagtgcgattcatggcgttgatacagattttctgaactatggtgacgacgacaacgacgacgacttcgtcgacgccgacgagccaaatcccagtgagttccagtctctcgacaacagcggctggtcttctcgcaccaggggtgtcgcgagatatctcaagactctgttcgacgaggagtccggtctggggaggaagagcgtcgccatcgaccatctggtgcgcgggaagacgcggaaggaagcgtcgaggatgttcttcgagaccttggtgctgacgacgaaggactacatcagcgtggaccaaccgaaccccttcgactttgtgagcgtgaagccaggcccgaagctgctcatgtcagagttctagttcaacaaagtcagcgtaccctggcgcgatacattccctcttaccattgtatccatcatcacaccgaccaacaacaacaccgcagatatccccccccccctcctcttccaaaaccatttttgtgtatgttgttgcagttcccctcccctgtagcatctggtgcgctgatccgttgttgttgccagggcgtctgtccgagtaggatggtggttgtgttgtaccgtcggctatccaacagtatatagtagtagtatgattttagcgacactcggtgaagcccgccatgtaatctgctagggttcatgctcccctaagttactgtcgctttagactggctaaagcccgtagaggaattgtatacgagaaggacagggacagcccgagatgatgaatgatgtattgatgtgcctgttgactatgtgaggactgacggttttaactcaataattcaagtgacctttcctgtgaaccatgaatccatgccgg

SEQ ID NO: 74676 - DNA, 6155 bp, Zea Mays
cacgtactctgtcaaacgatacgccgcgatgcttccagacaagcgccatccccttcctcgccccacacgccgtcgtgttggccgcgcctctcttcaaccttttcttgagcattggcgagagcccttcacatggtgcggcgctggcatcgttgttggcgacctctgcgcggtcggatctgcaaaggttgcagctagcgcgcctacagtacgtcaacatggtgcggcatctctttttgcagatccccaacttgctacgccgccggccgccgcatcggaactccttgcaccgcttgcctttcttctcccattcaaccggcaagcgttccctggctcaataacgcaactgggggatgtctgtcgctatctccatataggaaacgacaggtgcgacagatttagattttcaggtgatgcgtggtcgggatcgccggatcaatcaaaataagtgtgaaatttgagaggccgtggaacttccagatcgagtagtatccatccagatcgatatcccagaagaccaagcctggccatgaaacgcatgctaccccgatctcttcttcaccttttcttatccgcaggtaccaacaaaaaaagtgacccttttgacgacgtattgcgtgggcaaggcatgacagtgcgacaagagagaaactaacaaagagctctgttcgttctgctgattgcttatgattcggtaattacctctacaccatgtccttttcgatcgataatgaacaaagtatatataggtgcacgaacgtgctagatcctagattacttttagctaggtcccaagcagccgaaaatgtgtgcatgctttcagataagcaatgtctctgtctattgcacgattttttcgggcttgttgaatcgcccccgcccctaaaaataattataaggaaatgaagcctgacattcttgctcagactcgcagtggcggtagctgggagagcttgggactggccagacacgaccaactcaccactgtaataagacgacttttatacatagctgacagtacgcaacctcagttcaggcgcaaggttagtctgatgatctgccttcattttgaatctcgattttgctgcttcatgcatgtatcatttgcgtcatcgatcatgtgctttttttctaagatctgtcattcgttttgcacgcacatcattttcctttgagttacctttacaaagatgacggacttcagcaagcgtctgcatatgcaattccttttcttgcctatccatcgatttactcatagattttattttcttcttagctcgatcaaatacttacatgttcgttttttgtttctagccattgggttggaattagatgatggatcgcacataacatacatagcactcttttttagcataccacctcatgcttaacgcatttcttatatatatacacaggttaactttccaggtaactcaaaccgacacagcttaagataaagttggcctccatattaattgctacttacatattatcatcatctttttccccaaaaaatcttactagaatactaagaccatttttacacagcaaccacataaagttggacccaacatcaacaatgattttacaaactctcttgaatcacctccaaaaggttcttattatacatctccaatagaattatctaaaattaaaattatgttcgtttcttacaggttgaaacaacaacttttgaagactggccatgaatatctagatagtactacaccatctacatagtttgtaatcaatataatttgcatattattcttcgcacacctttataaccatagcacaacaggacaatagctcatcgactctttaacaacaactgatgttcacctttttctgcacagaaactactggacgcgtgtcgcctggaaaaggattccgcacaatcacaggagtgagagcacgaaacctgtgccatattttttttgtcttcgatttgcagctccaagcagcagagctgcagagaggcgtcagcggagcacaagctggcgtccaagcaaagcccgctgaagtgtccccccctgcctttcttctctccttcactctctcgttcgtggcgacgcttgtgcgaccactcaccgtagcccgctcgacgccagttattcgccgtgcagctcgccggcgacgagcaccctccagcctaaggaggggagccggagatgttctactcgcagttcatcttggccaagaagggccccctcgggaccatatggattgccgcacacttggagcggaagctgcgcaagaaccaggtcgcggacacggacatcggcgtctcagtagaaaacatacaaagttgcaaacatgtaccacagaaagcaaagcatactcaagattccatcatattccctgacgttccaatcgcacttcggttatcaagtcatcttatgttaggcgtggtcagaatctattctcggaaggtcaactacctattccatgactgcagcgaagctttgctgaagataaaacaagctttcaggtccactgctgttgatctacctcctgaggagtcaactgctccatatcactctataactctgcctgagacattcgatcttgatgattttgaactgccagaagctgtgtttcaaggcgatactgatcatcatgtgagcacaaaagagcagatcactttgcaagacaacccagagaaaacaggatattcaacatcccagtttggcctagatgaaagatttggtgatggcagttcatcacatattggcttggacttggaggaggaattaattctgaacaaggaccactcaattcatctcgagtctgatgatggtattattattcaaggtcggtcatcggtcccttctactgatatggagattgatgataacaaaagtacaaacataacagctgaaggatacagcaacatggacggtgggccttctagtcatgtaaagttaggtccactgaatgcagatgacctaggaggaaacagtatccgtaactggactggttacaatgtacagactcctgatttgaatgatatattattgcataataatgaggatattgcaggcccatcaacttcgtactatcaacctagcccatttacttgtgatgaacctgcatcaccagagttcattagcgctcaggccccagctacacctggtttaatggaagagacagttccttccagagtccatgaaagtcctgttctgagtccacagagaaaggcatcaccatcaactaatgatgaaactgcaaaggctgacactcctgctgcaccagcctcagattttctccattcagctacaggaaatgccagtgatgtggtgggtgctgagatgacagaacttggattggcgaaaccggtgcaagttgagtcttctgttgtgcaggactctgatgcatcggtgcaacagcacacaagtgagggtttaccatcccagggtcaagcttcacacttggaagctgctgctgataagttggtcggctctgatggtatagctgcatcggttgatgaaacggtaactgtcaatgcaaccattgaagatgtacctttggctgtaaatgattcagagccatgtgttgatggttctgctggaccatctgtggtgaacctggtacagatggatggtccattatttgatgcacaaggtacagtactaagtgcagattttcaacatgaagtccaagcaatgcaacaagtagtggcatctaacgatagactgaatgaactatcaacttcagaatttgccgagcctgagaaaatgctgacagctccgaatgctgaattcaatcatgcgattgacttggggcagataactgcggaaaaaggaacaattgaatctgatggaagtaacataataggcagcctaacaagcagaaaaagacacctggaatatagcttaccagctttagagagtgagaccactaaaaagttgcctagccgaccacatgttaaaagaaccaatgattttgttcctcatgatgatgatatactggcatctattttagtcggtaggacccctgggttcacacttgattcaacaccactaccaccaagggaatcatctctgaaacgcccaaggttggggtcgaagatgggtacactcaagagaaaagtgcagatagatgatgccatggtcctgcatgctgatactatacggcaacagttgatcaatactgaggatatacggcgcattcgtaaaaaggctccatgcactcgttccgaaatatggatgattgagaaaggttcactggaagatgatttattccacgagcccatcttttcctgcctatctgaggagctaaacaatttacacaatcggacatatgagactattgtacaccctgctgttcagagaatggaactacatggtcaattagacatgcctgaaacaataccagaatatagaaatattgctgggtttggttctgctactattgatggcccacttcacataccagatgggattcaatcagatgccatgttgtcaggcgcaaatgttgcatatggcgctacagctgcttttggtttgcaaattcctcctgactaccaggttaaccgtgcatctaatgattttgttgtcggcactcagcttcaagaggtggctaaaccttttattggtaatgagcacgaagtggcacctcctgacagagagcatgctcaagtagatacattgtatagtgaccgttttcaaggtgttccatctgatttgcagaggagtaatgatgcaaatgtttctagtcaagatgtggttctagataactctggccaagcttgtgctcatgcagtggacggcatgacaagggagtttaatcattttgttcatagagacgctaatctttttgggagtactgaggtccctgcttctgagattactggggtggaatataatcaagatgcctctggttttcctcgacaaacagaggatgacaacacggtggagtataatcaagatgcctctggttttcctcgaccaacggagggtgggaatgcggtggagtataatcaagatgtctctggttttcctcgaccaacagaggatggaaaaacggtggagtataatcaagatgcctctggttttcctcgaccaacagaggatgaaaacacggtggagtataatcaagatgcctctggttttcctcagccaaccgaggatgaaaacacggtggagtataatcaagatgcctctggttttcctcggccaacggaggatgaaaatgccgcgtctgctacgggagataattctggcttccaagaaaacaacacgggttctcatatggatctggatatgatgaatgactatgaagtgaaggaatgcaacgattttgggagtgcgattcatggcgttgatacagattttctgaactatggtgacgacgacaacgacgacgacttcgtcgacgccgacgagccaaatcccagtgagttccagtctctcgacaacagcggctggtcttctcgcaccaggggtgtcgcgagatatctcaagactctgttcgacgaggagtccggtctggggaggaagagcgtcgccatcgaccatctggtgcgcgggaagacgcggaaggaagcgtcgaggatgttcttcgagaccttggtgctgacgacgaaggactacatcagcgtggaccaaccgaaccccttcgactttgtgagcgtgaagccaggcccgaagctgctcatgtcagagttctagttcaacaaagtcagcgtaccctggcgcgatacattccctcttaccattgtatccatcatcacaccgaccaacaacaacaccgcagatatccccccccccctcctcttccaaaaccatttttgtgtatgttgttgcagttcccctcccctgtagcatctggtgcgctgatccgttgttgttgccagggcgtctgtccgagtaggatggtggttgtgttgtaccgtcggctatccaacagtatatagtagtagtatgattttagcgacactcggtgaagcccgccatgtaatctgctagggttcatgctcccctaagttactgtcgctttagactggctaaagcccgtagaggaattgtatacgagaaggacagggacagcccgagatgatgaatgatgtattgatgtgcctgttgactatgtgaggactgacggttttaactcaataattcaagtgacctttcctgtgaaccatgaatccatgccgg

SEQ ID NO: 74677 - DNA, 7319 bp, Zea Mays
cacgtactctgtcaaacgatacgccgcgatgcttccagacaagcgccatccccttcctcgccccacacgccgtcgtgttggccgcgcctctcttcaaccttttcttgagcattggcgagagcccttcacatggtgcggcgctggcatcgttgttggcgacctctgcgcggtcggatctgcaaaggttgcagctagcgcgcctacagtacgtcaacatggtgcggcatctctttttgcagatccccaacttgctacgccgccggccgccgcatcggaactccttgcaccgcttgcctttcttctcccattcaaccggcaagcgttccctggctcaataacgcaactgggggatgtctgtcgctatctccatataggaaacgacaggtgcgacagatttagattttcaggtgatgcgtggtcgggatcgccggatcaatcaaaataagtgtgaaatttgagaggccgtggaacttccagatcgagtagtatccatccagatcgatatcccagaagaccaagcctggccatgaaacgcatgctaccccgatctcttcttcaccttttcttatccgcaggtaccaacaaaaaaagtgacccttttgacgacgtattgcgtgggcaaggcatgacagtgcgacaagagagaaactaacaaagagctctgttcgttctgctgattgcttatgattcgactcgcagtggcggtagctgggagagcttgggactggccagacacgaccaactcaccactgtaataagacgacttttatacatagctgacagtacgcaacctcagttcaggcgcaaggtaattgttttgcatgtctatgacgagcatcgtcacttttggaccacgaatcttttttgtgtactgaaaccttttcagttctttatatgtttaagctatctctggctcttgaattaccctagaatctggttaaccttgtctttgctcttatatacttatttactctctaatatacatataatcatcatacatttacattatactatgctgcgctaaacggattggcacgcgcgcatgggcgcgcgctatacactagtatatgtttgatagagaacacatccaagcgtgtgagagcaatttctagtgtgttgtagtgagaggttgcattgatcgacactatattatggtcgagttgcaagttagcggtatatgttatgtttgtaggctgctgcctcttaaatggttgtaacaccaaaatattatgttggaatgtatgaaaattctccaaatgttttgaattaaaactattactaccttttaagttaattttctaaaacaaatagatgataatattaaatcttggatagttcaaatttaggcttgaattttcaaactggcctacaactttagcttataagatggcttgttgttacagcatacagttcccgtgtaagtttatgataaataactttagcttataagatgggttgttattacataaattaagatattagtttaacttaatttaaatataaacaatccgagttgaaccgagctactctggaatcctggatcaaaatgaacgtgctagtaagctactagcttttagtcatgccctaattaagaagtaacagtcaaatcacttcgccctttcgcctagagacctacaccactcctcatttgacgatgcacacgtgtaggaagatctgcatcgactatactgtaccggttatatcggtttcagccggtactgatttatattagaatcgatgtcggttgataccgatcgatcgatgcttgataacatgttaaacgattcgaccagtaccaatccaaatcacttgataatgacggattttaacgacgttataatttaattggtgtacatgtacatcgtgtcagcttatatccgttttaaaccgtttgaaattcaataaatccaaaaaacatattaactaagagaatattcctaccattttctccacagccacgtgaccagtttcacagactcacagctcaaggaggtatttaatttgccaattttgcacctcacccaataactgtcgtacatataatatagtctaacatccaagtttcgaaaagaaggcactaaaattaatttaggatgttattaaccaaaaatcattcttcaacacattcttaaacgaggtatctaaatattccaacttcttaaatattcatatttagtctctagacttagggacctcttgtgcactccttatagcctatttcgtacgtcaatcataccgtaaaatcatttaccagccacgagtgatggactttgaataattgaagccgtggaaagaatgaatttaaaattctcgttggccaagtttgaagatgacttttttcaaaaaaaagagaaaaacgaccaacctgtgattcatacaaaacgaaaatattaataaagagaataacgatgattattgaactttatcgtacaaatgaaatcaaatttaaagctgcaagtacaaatgaaaattcgagcaaataattgagaactatttactaacctaataattgaggactatttatcgtacaaatgaaaattcgagctagaatactttaaatatatttactaacctaataagtgagaactatttggagaccaaggttgattttattcccaaacgaggtgtttggttcgaggaatgaactaatccattatcatttcactcttcattttttatttggtttgaagaatgaaatgagttgatctatcaccacctcattcctcatagttatttagctagtattaatatgagaaatgtggtcatcccaccaaatttgagaaattaatccatgatgcacaaccttatttttgatgcagtgattccttaaatcaagcaaccccaatatgtatctaccaatttgctgaatctaaagaggtgtttagtttctaggtactaatttgtagtcactttattttgttctattttaggttcttaaatttgtaaatttaaactctatattgatttcaatatttgacaatttaaaaattaaattaaaataaaatagagggacttaaaattaatccatagaaactaaacacccatcagtttataatctttttttttagaaactactggacgcgtgtcgcctggaaaaggattccgcacaatcacaggagtgagagcacgaaacctgtgccatattttttttgtcttcgatttgcagctccaagcagcagagctgcagagaggcgtcagcggagcacaagctggcgtccaagcaaagcccgctgaagtgtccccccctgcctttcttctctccttcactctctcgttcgtggcgacgcttgtgcgaccactcaccgtagcccgctcgacgccagttattcgccgtgcagctcgccggcgacgagcaccctccagcctaaggaggggagccggagatgttctactcgcagttcatcttggccaagaagggccccctcgggaccatatggattgccgcacacttggagcggaagctgcgcaagaaccaggtcgcggacacggacatcggcgtctcagtagattccatcatattccctgacgttccaatcgcacttcggttatcaagtcatcttatgttaggcgtggtcagaatctattctcggaaggtcaactacctattccatgactgcagcgaagctttgctgaagataaaacaagctttcaggtccactgctgttgatctacctcctgaggagtcaactgctccatatcactctataactctgcctgagacattcgatcttgatgattttgaactgccagaagctgtgtttcaaggcgatactgatcatcatgtgagcacaaaagagcagatcactttgcaagacaacccagagaaaacaggatattcaacatcccagtttggcctagatgaaagatttggtgatggcagttcatcacatattggcttggacttggaggaggaattaattctgaacaaggaccactcaattcatctcgagtctgatgatggtattattattcaaggtcggtcatcggtcccttctactgatatggagattgatgataacaaaagtacaaacataacagctgaaggatacagcaacatggacggtgggccttctagtcatgtaaagttaggtccactgaatgcagatgacctaggaggaaacagtatccgtaactggactggttacaatgtacagactcctgatttgaatgatatattattgcataataatgaggatattgcaggcccatcaacttcgtactatcaacctagcccatttacttgtgatgaacctgcatcaccagagttcattagcgctcaggccccagctacacctggtttaatggaagagacagttccttccagagtccatgaaagtcctgttctgagtccacagagaaaggcatcaccatcaactaatgatgaaactgcaaaggctgacactcctgctgcaccagcctcagattttctccattcagctacaggaaatgccagtgatgtggtgggtgctgagatgacagaacttggattggcgaaaccggtgcaagttgagtcttctgttgtgcaggactctgatgcatcggtgcaacagcacacaagtgagggtttaccatcccagggtcaagcttcacacttggaagctgctgctgataagttggtcggctctgatggtatagctgcatcggttgatgaaacggtaactgtcaatgcaaccattgaagatgtacctttggctgtaaatgattcagagccatgtgttgatggttctgctggaccatctgtggtgaacctggtacagatggatggtccattatttgatgcacaaggtacagtactaagtgcagattttcaacatgaagtccaagcaatgcaacaagtagtggcatctaacgatagactgaatgaactatcaacttcagaatttgccgagcctgagaaaatgctgacagctccgaatgctgaattcaatcatgcgattgacttggggcagataactgcggaaaaaggaacaattgaatctgatggaagtaacataataggcagcctaacaagcagaaaaagacacctggaatatagcttaccagctttagagagtgagaccactaaaaagttgcctagccgaccacatgttaaaagaaccaatgattttgttcctcatgatgatgatatactggcatctattttagtcggtaggacccctgggttcacacttgattcaacaccactaccaccaagggaatcatctctgaaacgcccaaggttggggtcgaagatgggtacactcaagagaaaagtgcagatagatgatgccatggtcctgcatgctgatactatacggcaacagttgatcaatactgaggatatacggcgcattcgtaaaaaggctccatgcactcgttccgaaatatggatgattgagaaaggttcactggaagatgatttattccacgagcccatcttttcctgcctatctgaggagctaaacaatttacacaatcggacatatgagactattgtacaccctgctgttcagagaatggaactacatggtcaattagacatgcctgaaacaataccagaatatagaaatattgctgggtttggttctgctactattgatggcccacttcacataccagatgggattcaatcagatgccatgttgtcaggcgcaaatgttgcatatggcgctacagctgcttttggtttgcaaattcctcctgactaccaggttaaccgtgcatctaatgattttgttgtcggcactcagcttcaagaggtggctaaaccttttattggtaatgagcacgaagtggcacctcctgacagagagcatgctcaagtagatacattgtatagtgaccgttttcaaggtgttccatctgatttgcagaggagtaatgatgcaaatgtttctagtcaagatgtggttctagataactctggccaagcttgtgctcatgcagtggacggcatgacaagggagtttaatcattttgttcatagagacgctaatctttttgggagtactgaggtccctgcttctgagattactggggtggaatataatcaagatgcctctggttttcctcgacaaacagaggatgacaacacggtggagtataatcaagatgcctctggttttcctcgaccaacggagggtgggaatgcggtggagtataatcaagatgtctctggttttcctcgaccaacagaggatggaaaaacggtggagtataatcaagatgcctctggttttcctcgaccaacagaggatgaaaacacggtggagtataatcaagatgcctctggttttcctcagccaaccgaggatgaaaacacggtggagtataatcaagatgcctctggttttcctcggccaacggaggatgaaaatgccgcgtctgctacgggagataattctggcttccaagaaaacaacacgggttctcatatggatctggatatgatgaatgactatgaagtgaaggaatgcaacgattttgggagtgcgattcatggcgttgatacagattttctgaactatggtgacgacgacaacgacgacgacttcgtcgacgccgacgagccaaatcccagtgagttccagtctctcgacaacagcggctggtcttctcgcaccaggggtgtcgcgagatatctcaagactctgttcgacgaggagtccggtctggggaggaagagcgtcgccatcgaccatctggtgcgcgggaagacgcggaaggaagcgtcgaggatgttcttcgagaccttggtgctgacgacgaaggactacatcagcgtggaccaaccgaaccccttcgactttgtgagcgtgaagccaggcccgaagctgctcatgtcagagttctagttcaacaaagtcagcgtaccctggcgcgatacattccctcttaccattgtatccatcatcacaccgaccaacaacaacaccgcagatatccccccccccctcctcttccaaaaccatttttgtgtatgttgttgcagttcccctcccctgtagcatctggtgcgctgatccgttgttgttgccagggcgtctgtccgagtaggatggtggttgtgttgtaccgtcggctatccaacagtatatagtagtagtatgattttagcgacactcggtgaagcccgccatgtaatctgctagggttcatgctcccctaagttactgtcgctttagactggctaaagcccgtagaggaattgtatacgagaaggacagggacagcccgagatgatgaatgatgtattgatgtgcctgttgactatgtgaggactgacggttttaactcaataattcaagtgacctttcctgtgaaccatgaatccatgccgg

SEQ ID NO: 74678 - DNA, 5059 bp, Zea Mays
cacgtactctgtcaaacgatacgccgcgatgcttccagacaagcgccatccccttcctcgccccacacgccgtcgtgttggccgcgcctctcttcaaccttttcttgagcattggcgagagcccttcacatggtgcggcgctggcatcgttgttggcgacctctgcgcggtcggatctgcaaaggttgcagctagcgcgcctacagtacgtcaacatggtgcggcatctctttttgcagatccccaacttgctacgccgccggccgccgcatcggaactccttgcaccgcttgcctttcttctcccattcaaccggcaagcgttccctggctcaataacgcaactgggggatgtctgtcgctatctccatataggaaacgacaggtgcgacagatttagattttcaggtgatgcgtggtcgggatcgccggatcaatcaaaataagtgtgaaatttgagaggccgtggaacttccagatcgagtagtatccatccagatcgatatcccagaagaccaagcctggccatgaaacgcatgctaccccgatctcttcttcaccttttcttatccgcaggtaccaacaaaaaaagtgacccttttgacgacgtattgcgtgggcaaggcatgacagtgcgacaagagagaaactaacaaagagctctgttcgttctgctgattgcttatgattcgactcgcagtggcggtagctgggagagcttgggactggccagacacgaccaactcaccactgtaataagacgacttttatacatagctgacagtacgcaacctcagttcaggcgcaagaaactactggacgcgtgtcgcctggaaaaggattccgcacaatcacaggagtgagagcacgaaacctgtgccatattttttttgtcttcgatttgcagctccaagcagcagagctgcagagaggcgtcagcggagcacaagctggcgtccaagcaaagcccgctgaagtgtccccccctgcctttcttctctccttcactctctcgttcgtggcgacgcttgtgcgaccactcaccgtagcccgctcgacgccagttattcgccgtgcagctcgccggcgacgagcaccctccagcctaaggaggggagccggagatgttctactcgcagttcatcttggccaagaagggccccctcgggaccatatggattgccgcacacttggagcggaagctgcgcaagaaccaggtcgcggacacggacatcggcgtctcagtagattccatcatattccctgacgttccaatcgcacttcggttatcaagtcatcttatgttaggcgtggtcagaatctattctcggaaggtcaactacctattccatgactgcagcgaagctttgctgaagataaaacaagctttcaggtccactgctgttgatctacctcctgaggagtcaactgctccatatcactctataactctgcctgagacattcgatcttgatgattttgaactgccagaagctgtgtttcaaggcgatactgatcatcatgtgagcacaaaagagcagatcactttgcaagacaacccagagaaaacaggatattcaacatcccagtttggcctagatgaaagatttggtgatggcagttcatcacatattggcttggacttggaggaggaattaattctgaacaaggaccactcaattcatctcgagtctgatgatggtattattattcaaggtcggtcatcggtcccttctactgatatggagattgatgataacaaaagtacaaacataacagctgaaggatacagcaacatggacggtgggccttctagtcatgtaaagttaggtccactgaatgcagatgacctaggaggaaacagtatccgtaactggactggttacaatgtacagactcctgatttgaatgatatattattgcataataatgaggatattgcaggcccatcaacttcgtactatcaacctagcccatttacttgtgatgaacctgcatcaccagagttcattagcgctcaggccccagctacacctggtttaatggaagagacagttccttccagagtccatgaaagtcctgttctgagtccacagagaaaggcatcaccatcaactaatgatgaaactgcaaaggctgacactcctgctgcaccagcctcagattttctccattcagctacaggaaatgccagtgatgtggtgggtgctgagatgacagaacttggattggcgaaaccggtgcaagttgagtcttctgttgtgcaggactctgatgcatcggtgcaacagcacacaagtgagggtttaccatcccagggtcaagcttcacacttggaagctgctgctgataagttggtcggctctgatggtatagctgcatcggttgatgaaacggtaactgtcaatgcaaccattgaagatgtacctttggctgtaaatgattcagagccatgtgttgatggttctgctggaccatctgtggtgaacctggtacagatggatggtccattatttgatgcacaaggtacagtactaagtgcagattttcaacatgaagtccaagcaatgcaacaagtagtggcatctaacgatagactgaatgaactatcaacttcagaatttgccgagcctgagaaaatgctgacagctccgaatgctgaattcaatcatgcgattgacttggggcagataactgcggaaaaaggaacaattgaatctgatggaagtaacataataggcagcctaacaagcagaaaaagacacctggaatatagcttaccagctttagagagtgagaccactaaaaagttgcctagccgaccacatgttaaaagaaccaatgattttgttcctcatgatgatgatatactggcatctattttagtcggtaggacccctgggttcacacttgattcaacaccactaccaccaagggaatcatctctgaaacgcccaaggttggggtcgaagatgggtacactcaagagaaaagtgcagatagatgatgccatggtcctgcatgctgatactatacggcaacagttgatcaatactgaggatatacggcgcattcgtaaaaaggctccatgcactcgttccgaaatatggatgattgagaaaggttcactggaagatgatttattccacgagcccatcttttcctgcctatctgaggagctaaacaatttacacaatcggacatatgagactattgtacaccctgctgttcagagaatggaactacatggtcaattagacatgcctgaaacaataccagaatatagaaatattgctgggtttggttctgctactattgatggcccacttcacataccagatgggattcaatcagatgccatgttgtcaggcgcaaatgttgcatatggcgctacagctgcttttggtttgcaaattcctcctgactaccaggttaaccgtgcatctaatgattttgttgtcggcactcagcttcaagaggtggctaaaccttttattggtaatgagcacgaagtggcacctcctgacagagagcatgctcaagtagatacattgtatagtgaccgttttcaaggtgttccatctgatttgcagaggagtaatgatgcaaatgtttctagtcaagatgtggttctagataactctggccaagcttgtgctcatgcagtggacggcatgacaagggagtttaatcattttgttcatagagacgctaatctttttgggagtactgaggtccctgcttctgagattactggggtggaatataatcaagatgcctctggttttcctcgacaaacagaggatgacaacacggtggagtataatcaagatgcctctggttttcctcgaccaacggagggtgggaatgcggtggagtataatcaagatgtctctggttttcctcgaccaacagaggatggaaaaacggtggagtataatcaagatgcctctggttttcctcgaccaacagaggatgaaaacacggtggagtataatcaagatgcctctggttttcctcagccaaccgaggatgaaaacacggtggagtataatcaagatgcctctggttttcctcggccaacggaggatgaaaatgccgcgtctgctacgggagataattctggcttccaagaaaacaacacgggttctcatatggatctggatatgatgaatgactatgaagtgaaggaatgcaacgattttgggagtgcgattcatggcgttgatacagattttctgaactatggtgacgacgacaacgacgacgacttcgtcgacgccgacgagccaaatcccagtgagttccagtctctcgacaacagcggctggtcttctcgcaccaggggtgtcgcgagatatctcaagactctgttcgacgaggagtccggtctggggaggaagagcgtcgccatcgaccatctggtgcgcgggaagacgcggaaggaagcgtcgaggatgttcttcgagaccttggtgctgacgacgaaggactacatcagcgtggaccaaccgaaccccttcgactttgtgagcgtgaagccaggcccgaagctgctcatgtcagagttctagttcaacaaagtcagcgtaccctggcgcgatacattccctcttaccattgtatccatcatcacaccgaccaacaacaacaccgcagatatccccccccccctcctcttccaaaaccatttttgtgtatgttgttgcagttcccctcccctgtagcatctggtgcgctgatccgttgttgttgccagggcgtctgtccgagtaggatggtggttgtgttgtaccgtcggctatccaacagtatatagtagtagtatgattttagcgacactcggtgaagcccgccatgtaatctgctagggttcatgctcccctaagttactgtcgctttagactggctaaagcccgtagaggaattgtatacgagaaggacagggacagcccgagatgatgaatgatgtattgatgtgcctgttgactatgtgaggactgacggttttaactcaataattcaagtgacctttcctgtgaaccatgaatccatgccgg

SEQ ID NO: 74679 - DNA, 4955 bp, Zea Mays
cacgtactctgtcaaacgatacgccgcgatgcttccagacaagcgccatccccttcctcgccccacacgccgtcgtgttggccgcgcctctcttcaaccttttcttgagcattggcgagagcccttcacatggtgcggcgctggcatcgttgttggcgacctctgcgcggtcggatctgcaaaggttgcagctagcgcgcctacagtacgtcaacatggtgcggcatctctttttgcagatccccaacttgctacgccgccggccgccgcatcggaactccttgcaccgcttgcctttcttctcccattcaaccggcaagcgttccctggctcaataacgcaactgggggatgtctgtcgctatctccatataggaaacgacaggtgcgacagatttagattttcaggtgatgcgtggtcgggatcgccggatcaatcaaaataagtgtgaaatttgagaggccgtggaacttccagatcgagtagtatccatccagatcgatatcccagaagaccaagcctggccatgaaacgcatgctaccccgatctcttcttcaccttttcttatccgcaggtaccaacaaaaaaagtgacccttttgacgacgtattgcgtgggcaaggcatgacagtgcgacaagagagaaactaacaaagagctctgttcgttctgctgattgcttatgattcgactcgcagtggcggtagctgggagagcttgggactggccagacacgaccaactcaccactgtaataagacgacttttatacatagctgacagtacgcaacctcagttcaggcgcaagctccaagcagcagagctgcagagaggcgtcagcggagcacaagctggcgtccaagcaaagcccgctgaagtgtccccccctgcctttcttctctccttcactctctcgttcgtggcgacgcttgtgcgaccactcaccgtagcccgctcgacgccagttattcgccgtgcagctcgccggcgacgagcaccctccagcctaaggaggggagccggagatgttctactcgcagttcatcttggccaagaagggccccctcgggaccatatggattgccgcacacttggagcggaagctgcgcaagaaccaggtcgcggacacggacatcggcgtctcagtagattccatcatattccctgacgttccaatcgcacttcggttatcaagtcatcttatgttaggcgtggtcagaatctattctcggaaggtcaactacctattccatgactgcagcgaagctttgctgaagataaaacaagctttcaggtccactgctgttgatctacctcctgaggagtcaactgctccatatcactctataactctgcctgagacattcgatcttgatgattttgaactgccagaagctgtgtttcaaggcgatactgatcatcatgtgagcacaaaagagcagatcactttgcaagacaacccagagaaaacaggatattcaacatcccagtttggcctagatgaaagatttggtgatggcagttcatcacatattggcttggacttggaggaggaattaattctgaacaaggaccactcaattcatctcgagtctgatgatggtattattattcaaggtcggtcatcggtcccttctactgatatggagattgatgataacaaaagtacaaacataacagctgaaggatacagcaacatggacggtgggccttctagtcatgtaaagttaggtccactgaatgcagatgacctaggaggaaacagtatccgtaactggactggttacaatgtacagactcctgatttgaatgatatattattgcataataatgaggatattgcaggcccatcaacttcgtactatcaacctagcccatttacttgtgatgaacctgcatcaccagagttcattagcgctcaggccccagctacacctggtttaatggaagagacagttccttccagagtccatgaaagtcctgttctgagtccacagagaaaggcatcaccatcaactaatgatgaaactgcaaaggctgacactcctgctgcaccagcctcagattttctccattcagctacaggaaatgccagtgatgtggtgggtgctgagatgacagaacttggattggcgaaaccggtgcaagttgagtcttctgttgtgcaggactctgatgcatcggtgcaacagcacacaagtgagggtttaccatcccagggtcaagcttcacacttggaagctgctgctgataagttggtcggctctgatggtatagctgcatcggttgatgaaacggtaactgtcaatgcaaccattgaagatgtacctttggctgtaaatgattcagagccatgtgttgatggttctgctggaccatctgtggtgaacctggtacagatggatggtccattatttgatgcacaagtactaagtgcagattttcaacatgaagtccaagcaatgcaacaagtagtggcatctaacgatagactgaatgaactatcaacttcagaatttgccgagcctgagaaaatgctgacagctccgaatgctgaattcaatcatgcgattgacttggggcagataactgcggaaaaaggaacaattgaatctgatggaagtaacataataggcagcctaacaagcagaaaaagacacctggaatatagcttaccagctttagagagtgagaccactaaaaagttgcctagccgaccacatgttaaaagaaccaatgattttgttcctcatgatgatgatatactggcatctattttagtcggtaggacccctgggttcacacttgattcaacaccactaccaccaagggaatcatctctgaaacgcccaaggttggggtcgaagatgggtacactcaagagaaaagtgcagatagatgatgccatggtcctgcatgctgatactatacggcaacagttgatcaatactgaggatatacggcgcattcgtaaaaaggctccatgcactcgttccgaaatatggatgattgagaaaggttcactggaagatgatttattccacgagcccatcttttcctgcctatctgaggagctaaacaatttacacaatcggacatatgagactattgtacaccctgctgttcagagaatggaactacatggtcaattagacatgcctgaaacaataccagaatatagaaatattgctgggtttggttctgctactattgatggcccacttcacataccagatgggattcaatcagatgccatgttgtcaggcgcaaatgttgcatatggcgctacagctgcttttggtttgcaaattcctcctgactaccaggttaaccgtgcatctaatgattttgttgtcggcactcagcttcaagaggtggctaaaccttttattggtaatgagcacgaagtggcacctcctgacagagagcatgctcaagtagatacattgtatagtgaccgttttcaaggtgttccatctgatttgcagaggagtaatgatgcaaatgtttctagtcaagatgtggttctagataactctggccaagcttgtgctcatgcagtggacggcatgacaagggagtttaatcattttgttcatagagacgctaatctttttgggagtactgaggtccctgcttctgagattactggggtggaatataatcaagatgcctctggttttcctcgacaaacagaggatgacaacacggtggagtataatcaagatgcctctggttttcctcgaccaacggagggtgggaatgcggtggagtataatcaagatgtctctggttttcctcgaccaacagaggatggaaaaacggtggagtataatcaagatgcctctggttttcctcgaccaacagaggatgaaaacacggtggagtataatcaagatgcctctggttttcctcagccaaccgaggatgaaaacacggtggagtataatcaagatgcctctggttttcctcggccaacggaggatgaaaatgccgcgtctgctacgggagataattctggcttccaagaaaacaacacgggttctcatatggatctggatatgatgaatgactatgaagtgaaggaatgcaacgattttgggagtgcgattcatggcgttgatacagattttctgaactatggtgacgacgacaacgacgacgacttcgtcgacgccgacgagccaaatcccagtgagttccagtctctcgacaacagcggctggtcttctcgcaccaggggtgtcgcgagatatctcaagactctgttcgacgaggagtccggtctggggaggaagagcgtcgccatcgaccatctggtgcgcgggaagacgcggaaggaagcgtcgaggatgttcttcgagaccttggtgctgacgacgaaggactacatcagcgtggaccaaccgaaccccttcgactttgtgagcgtgaagccaggcccgaagctgctcatgtcagagttctagttcaacaaagtcagcgtaccctggcgcgatacattccctcttaccattgtatccatcatcacaccgaccaacaacaacaccgcagatatccccccccccctcctcttccaaaaccatttttgtgtatgttgttgcagttcccctcccctgtagcatctggtgcgctgatccgttgttgttgccagggcgtctgtccgagtaggatggtggttgtgttgtaccgtcggctatccaacagtatatagtagtagtatgattttagcgacactcggtgaagcccgccatgtaatctgctagggttcatgctcccctaagttactgtcgctttagactggctaaagcccgtagaggaattgtatacgagaaggacagggacagcccgagatgatgaatgatgtattgatgtgcctgttgactatgtgaggactgacggttttaactcaataattcaagtgacctttcctgtgaaccatgaatccatgccgg

SEQ ID NO: 74680 - DNA, 4844 bp, Zea Mays
cacgtactctgtcaaacgatacgccgcgatgcttccagacaagcgccatccccttcctcgccccacacgccgtcgtgttggccgcgcctctcttcaaccttttcttgagcattggcgagagcccttcacatggtgcggcgctggcatcgttgttggcgacctctgcgcggtcggatctgcaaaggttgcagctagcgcgcctacagtacgtcaacatggtgcggcatctctttttgcagatccccaacttgctacgccgccggccgccgcatcggaactccttgcaccgcttgcctttcttctcccattcaaccggcaagcgttccctggctcaataacgcaactgggggatgtctgtcgctatctccatataggaaacgacaggtgcgacagatttagattttcaggtgatgcgtggtcgggatcgccggatcaatcaaaataagtgtgaaatttgagaggccgtggaacttccagatcgagtagtatccatccagatcgatatcccagaagaccaagcctggccatgaaacgcatgctaccccgatctcttcttcaccttttcttatccgcaggtaccaacaaaaaaagtgacccttttgacgacgtattgcgtgggcaaggcatgacagtgcgacaagagagaaactaacaaagagctctgttcgttctgctgattgcttatgattcgctccaagcagcagagctgcagagaggcgtcagcggagcacaagctggcgtccaagcaaagcccgctgaagtgtccccccctgcctttcttctctccttcactctctcgttcgtggcgacgcttgtgcgaccactcaccgtagcccgctcgacgccagttattcgccgtgcagctcgccggcgacgagcaccctccagcctaaggaggggagccggagatgttctactcgcagttcatcttggccaagaagggccccctcgggaccatatggattgccgcacacttggagcggaagctgcgcaagaaccaggtcgcggacacggacatcggcgtctcagtagattccatcatattccctgacgttccaatcgcacttcggttatcaagtcatcttatgttaggcgtggtcagaatctattctcggaaggtcaactacctattccatgactgcagcgaagctttgctgaagataaaacaagctttcaggtccactgctgttgatctacctcctgaggagtcaactgctccatatcactctataactctgcctgagacattcgatcttgatgattttgaactgccagaagctgtgtttcaaggcgatactgatcatcatgtgagcacaaaagagcagatcactttgcaagacaacccagagaaaacaggatattcaacatcccagtttggcctagatgaaagatttggtgatggcagttcatcacatattggcttggacttggaggaggaattaattctgaacaaggaccactcaattcatctcgagtctgatgatggtattattattcaaggtcggtcatcggtcccttctactgatatggagattgatgataacaaaagtacaaacataacagctgaaggatacagcaacatggacggtgggccttctagtcatgtaaagttaggtccactgaatgcagatgacctaggaggaaacagtatccgtaactggactggttacaatgtacagactcctgatttgaatgatatattattgcataataatgaggatattgcaggcccatcaacttcgtactatcaacctagcccatttacttgtgatgaacctgcatcaccagagttcattagcgctcaggccccagctacacctggtttaatggaagagacagttccttccagagtccatgaaagtcctgttctgagtccacagagaaaggcatcaccatcaactaatgatgaaactgcaaaggctgacactcctgctgcaccagcctcagattttctccattcagctacaggaaatgccagtgatgtggtgggtgctgagatgacagaacttggattggcgaaaccggtgcaagttgagtcttctgttgtgcaggactctgatgcatcggtgcaacagcacacaagtgagggtttaccatcccagggtcaagcttcacacttggaagctgctgctgataagttggtcggctctgatggtatagctgcatcggttgatgaaacggtaactgtcaatgcaaccattgaagatgtacctttggctgtaaatgattcagagccatgtgttgatggttctgctggaccatctgtggtgaacctggtacagatggatggtccattatttgatgcacaaggtacagtactaagtgcagattttcaacatgaagtccaagcaatgcaacaagtagtggcatctaacgatagactgaatgaactatcaacttcagaatttgccgagcctgagaaaatgctgacagctccgaatgctgaattcaatcatgcgattgacttggggcagataactgcggaaaaaggaacaattgaatctgatggaagtaacataataggcagcctaacaagcagaaaaagacacctggaatatagcttaccagctttagagagtgagaccactaaaaagttgcctagccgaccacatgttaaaagaaccaatgattttgttcctcatgatgatgatatactggcatctattttagtcggtaggacccctgggttcacacttgattcaacaccactaccaccaagggaatcatctctgaaacgcccaaggttggggtcgaagatgggtacactcaagagaaaagtgcagatagatgatgccatggtcctgcatgctgatactatacggcaacagttgatcaatactgaggatatacggcgcattcgtaaaaaggctccatgcactcgttccgaaatatggatgattgagaaaggttcactggaagatgatttattccacgagcccatcttttcctgcctatctgaggagctaaacaatttacacaatcggacatatgagactattgtacaccctgctgttcagagaatggaactacatggtcaattagacatgcctgaaacaataccagaatatagaaatattgctgggtttggttctgctactattgatggcccacttcacataccagatgggattcaatcagatgccatgttgtcaggcgcaaatgttgcatatggcgctacagctgcttttggtttgcaaattcctcctgactaccaggttaaccgtgcatctaatgattttgttgtcggcactcagcttcaagaggtggctaaaccttttattggtaatgagcacgaagtggcacctcctgacagagagcatgctcaagtagatacattgtatagtgaccgttttcaaggtgttccatctgatttgcagaggagtaatgatgcaaatgtttctagtcaagatgtggttctagataactctggccaagcttgtgctcatgcagtggacggcatgacaagggagtttaatcattttgttcatagagacgctaatctttttgggagtactgaggtccctgcttctgagattactggggtggaatataatcaagatgcctctggttttcctcgacaaacagaggatgacaacacggtggagtataatcaagatgcctctggttttcctcgaccaacggagggtgggaatgcggtggagtataatcaagatgtctctggttttcctcgaccaacagaggatggaaaaacggtggagtataatcaagatgcctctggttttcctcgaccaacagaggatgaaaacacggtggagtataatcaagatgcctctggttttcctcagccaaccgaggatgaaaacacggtggagtataatcaagatgcctctggttttcctcggccaacggaggatgaaaatgccgcgtctgctacgggagataattctggcttccaagaaaacaacacgggttctcatatggatctggatatgatgaatgactatgaagtgaaggaatgcaacgattttgggagtgcgattcatggcgttgatacagattttctgaactatggtgacgacgacaacgacgacgacttcgtcgacgccgacgagccaaatcccagtgagttccagtctctcgacaacagcggctggtcttctcgcaccaggggtgtcgcgagatatctcaagactctgttcgacgaggagtccggtctggggaggaagagcgtcgccatcgaccatctggtgcgcgggaagacgcggaaggaagcgtcgaggatgttcttcgagaccttggtgctgacgacgaaggactacatcagcgtggaccaaccgaaccccttcgactttgtgagcgtgaagccaggcccgaagctgctcatgtcagagttctagttcaacaaagtcagcgtaccctggcgcgatacattccctcttaccattgtatccatcatcacaccgaccaacaacaacaccgcagatatccccccccccctcctcttccaaaaccatttttgtgtatgttgttgcagttcccctcccctgtagcatctggtgcgctgatccgttgttgttgccagggcgtctgtccgagtaggatggtggttgtgttgtaccgtcggctatccaacagtatatagtagtagtatgattttagcgacactcggtgaagcccgccatgtaatctgctagggttcatgctcccctaagttactgtcgctttagactggctaaagcccgtagaggaattgtatacgagaaggacagggacagcccgagatgatgaatgatgtattgatgtgcctgttgactatgtgaggactgacggttttaactcaataattcaagtgacctttcctgtgaaccatgaatccatgccgg

SEQ ID NO: 74681 - DNA, 4962 bp, Zea Mays
cacgtactctgtcaaacgatacgccgcgatgcttccagacaagcgccatccccttcctcgccccacacgccgtcgtgttggccgcgcctctcttcaaccttttcttgagcattggcgagagcccttcacatggtgcggcgctggcatcgttgttggcgacctctgcgcggtcggatctgcaaaggttgcagctagcgcgcctacagtacgtcaacatggtgcggcatctctttttgcagatccccaacttgctacgccgccggccgccgcatcggaactccttgcaccgcttgcctttcttctcccattcaaccggcaagcgttccctggctcaataacgcaactgggggatgtctgtcgctatctccatataggaaacgacaggtgcgacagatttagattttcaggtgatgcgtggtcgggatcgccggatcaatcaaaataagtgtgaaatttgagaggccgtggaacttccagatcgagtagtatccatccagatcgatatcccagaagaccaagcctggccatgaaacgcatgctaccccgatctcttcttcaccttttcttatccgcaggtaccaacaaaaaaagtgacccttttgacgacgtattgcgtgggcaaggcatgacagtgcgacaagagagaaactaacaaagagctctgttcgttctgctgattgcttatgattcgtttataatctttttttttagaaactactggacgcgtgtcgcctggaaaaggattccgcacaatcacaggagtgagagcacgaaacctgtgccatattttttttgtcttcgatttgcagctccaagcagcagagctgcagagaggcgtcagcggagcacaagctggcgtccaagcaaagcccgctgaagtgtccccccctgcctttcttctctccttcactctctcgttcgtggcgacgcttgtgcgaccactcaccgtagcccgctcgacgccagttattcgccgtgcagctcgccggcgacgagcaccctccagcctaaggaggggagccggagatgttctactcgcagttcatcttggccaagaagggccccctcgggaccatatggattgccgcacacttggagcggaagctgcgcaagaaccaggtcgcggacacggacatcggcgtctcagtagattccatcatattccctgacgttccaatcgcacttcggttatcaagtcatcttatgttaggcgtggtcagaatctattctcggaaggtcaactacctattccatgactgcagcgaagctttgctgaagataaaacaagctttcaggtccactgctgttgatctacctcctgaggagtcaactgctccatatcactctataactctgcctgagacattcgatcttgatgattttgaactgccagaagctgtgtttcaaggcgatactgatcatcatgtgagcacaaaagagcagatcactttgcaagacaacccagagaaaacaggatattcaacatcccagtttggcctagatgaaagatttggtgatggcagttcatcacatattggcttggacttggaggaggaattaattctgaacaaggaccactcaattcatctcgagtctgatgatggtattattattcaaggtcggtcatcggtcccttctactgatatggagattgatgataacaaaagtacaaacataacagctgaaggatacagcaacatggacggtgggccttctagtcatgtaaagttaggtccactgaatgcagatgacctaggaggaaacagtatccgtaactggactggttacaatgtacagactcctgatttgaatgatatattattgcataataatgaggatattgcaggcccatcaacttcgtactatcaacctagcccatttacttgtgatgaacctgcatcaccagagttcattagcgctcaggccccagctacacctggtttaatggaagagacagttccttccagagtccatgaaagtcctgttctgagtccacagagaaaggcatcaccatcaactaatgatgaaactgcaaaggctgacactcctgctgcaccagcctcagattttctccattcagctacaggaaatgccagtgatgtggtgggtgctgagatgacagaacttggattggcgaaaccggtgcaagttgagtcttctgttgtgcaggactctgatgcatcggtgcaacagcacacaagtgagggtttaccatcccagggtcaagcttcacacttggaagctgctgctgataagttggtcggctctgatggtatagctgcatcggttgatgaaacggtaactgtcaatgcaaccattgaagatgtacctttggctgtaaatgattcagagccatgtgttgatggttctgctggaccatctgtggtgaacctggtacagatggatggtccattatttgatgcacaaggtacagtactaagtgcagattttcaacatgaagtccaagcaatgcaacaagtagtggcatctaacgatagactgaatgaactatcaacttcagaatttgccgagcctgagaaaatgctgacagctccgaatgctgaattcaatcatgcgattgacttggggcagataactgcggaaaaaggaacaattgaatctgatggaagtaacataataggcagcctaacaagcagaaaaagacacctggaatatagcttaccagctttagagagtgagaccactaaaaagttgcctagccgaccacatgttaaaagaaccaatgattttgttcctcatgatgatgatatactggcatctattttagtcggtaggacccctgggttcacacttgattcaacaccactaccaccaagggaatcatctctgaaacgcccaaggttggggtcgaagatgggtacactcaagagaaaagtgcagatagatgatgccatggtcctgcatgctgatactatacggcaacagttgatcaatactgaggatatacggcgcattcgtaaaaaggctccatgcactcgttccgaaatatggatgattgagaaaggttcactggaagatgatttattccacgagcccatcttttcctgcctatctgaggagctaaacaatttacacaatcggacatatgagactattgtacaccctgctgttcagagaatggaactacatggtcaattagacatgcctgaaacaataccagaatatagaaatattgctgggtttggttctgctactattgatggcccacttcacataccagatgggattcaatcagatgccatgttgtcaggcgcaaatgttgcatatggcgctacagctgcttttggtttgcaaattcctcctgactaccaggttaaccgtgcatctaatgattttgttgtcggcactcagcttcaagaggtggctaaaccttttattggtaatgagcacgaagtggcacctcctgacagagagcatgctcaagtagatacattgtatagtgaccgttttcaaggtgttccatctgatttgcagaggagtaatgatgcaaatgtttctagtcaagatgtggttctagataactctggccaagcttgtgctcatgcagtggacggcatgacaagggagtttaatcattttgttcatagagacgctaatctttttgggagtactgaggtccctgcttctgagattactggggtggaatataatcaagatgcctctggttttcctcgacaaacagaggatgacaacacggtggagtataatcaagatgcctctggttttcctcgaccaacggagggtgggaatgcggtggagtataatcaagatgtctctggttttcctcgaccaacagaggatggaaaaacggtggagtataatcaagatgcctctggttttcctcgaccaacagaggatgaaaacacggtggagtataatcaagatgcctctggttttcctcagccaaccgaggatgaaaacacggtggagtataatcaagatgcctctggttttcctcggccaacggaggatgaaaatgccgcgtctgctacgggagataattctggcttccaagaaaacaacacgggttctcatatggatctggatatgatgaatgactatgaagtgaaggaatgcaacgattttgggagtgcgattcatggcgttgatacagattttctgaactatggtgacgacgacaacgacgacgacttcgtcgacgccgacgagccaaatcccagtgagttccagtctctcgacaacagcggctggtcttctcgcaccaggggtgtcgcgagatatctcaagactctgttcgacgaggagtccggtctggggaggaagagcgtcgccatcgaccatctggtgcgcgggaagacgcggaaggaagcgtcgaggatgttcttcgagaccttggtgctgacgacgaaggactacatcagcgtggaccaaccgaaccccttcgactttgtgagcgtgaagccaggcccgaagctgctcatgtcagagttctagttcaacaaagtcagcgtaccctggcgcgatacattccctcttaccattgtatccatcatcacaccgaccaacaacaacaccgcagatatccccccccccctcctcttccaaaaccatttttgtgtatgttgttgcagttcccctcccctgtagcatctggtgcgctgatccgttgttgttgccagggcgtctgtccgagtaggatggtggttgtgttgtaccgtcggctatccaacagtatatagtagtagtatgattttagcgacactcggtgaagcccgccatgtaatctgctagggttcatgctcccctaagttactgtcgctttagactggctaaagcccgtagaggaattgtatacgagaaggacagggacagcccgagatgatgaatgatgtattgatgtgcctgttgactatgtgaggactgacggttttaactcaataattcaagtgacctttcctgtgaaccatgaatccatgccgg

SEQ ID NO: 74682 - DNA, 3886 bp, Zea Mays
gtagaagaagattttaagagaatttcagcctacatcacatcacatgtcataaattatggagatctctaaattagattccatcatattccctgacgttccaatcgcacttcggttatcaagtcatcttatgttaggcgtggtcagaatctattctcggaaggtcaactacctattccatgactgcagcgaagctttgctgaagataaaacaagctttcaggtccactgctgttgatctacctcctgaggagtcaactgctccatatcactctataactctgcctgagacattcgatcttgatgattttgaactgccagaagctgtgtttcaaggcgatactgatcatcatgtgagcacaaaagagcagatcactttgcaagacaacccagagaaaacaggatattcaacatcccagtttggcctagatgaaagatttggtgatggcagttcatcacatattggcttggacttggaggaggaattaattctgaacaaggaccactcaattcatctcgagtctgatgatggtattattattcaaggtcggtcatcggtcccttctactgatatggagattgatgataacaaaagtacaaacataacagctgaaggatacagcaacatggacggtgggccttctagtcatgtaaagttaggtccactgaatgcagatgacctaggaggaaacagtatccgtaactggactggttacaatgtacagactcctgatttgaatgatatattattgcataataatgaggatattgcaggcccatcaacttcgtactatcaacctagcccatttacttgtgatgaacctgcatcaccagagttcattagcgctcaggccccagctacacctggtttaatggaagagacagttccttccagagtccatgaaagtcctgttctgagtccacagagaaaggcatcaccatcaactaatgatgaaactgcaaaggctgacactcctgctgcaccagcctcagattttctccattcagctacaggaaatgccagtgatgtggtgggtgctgagatgacagaacttggattggcgaaaccggtgcaagttgagtcttctgttgtgcaggactctgatgcatcggtgcaacagcacacaagtgagggtttaccatcccagggtcaagcttcacacttggaagctgctgctgataagttggtcggctctgatggtatagctgcatcggttgatgaaacggtaactgtcaatgcaaccattgaagatgtacctttggctgtaaatgattcagagccatgtgttgatggttctgctggaccatctgtggtgaacctggtacagatggatggtccattatttgatgcacaaggtacagtactaagtgcagattttcaacatgaagtccaagcaatgcaacaagtagtggcatctaacgatagactgaatgaactatcaacttcagaatttgccgagcctgagaaaatgctgacagctccgaatgctgaattcaatcatgcgattgacttggggcagataactgcggaaaaaggaacaattgaatctgatggaagtaacataataggcagcctaacaagcagaaaaagacacctggaatatagcttaccagctttagagagtgagaccactaaaaagttgcctagccgaccacatgttaaaagaaccaatgattttgttcctcatgatgatgatatactggcatctattttagtcggtaggacccctgggttcacacttgattcaacaccactaccaccaagggaatcatctctgaaacgcccaaggttggggtcgaagatgggtacactcaagagaaaagtgcagatagatgatgccatggtcctgcatgctgatactatacggcaacagttgatcaatactgaggatatacggcgcattcgtaaaaaggctccatgcactcgttccgaaatatggatgattgagaaaggttcactggaagatgatttattccacgagcccatcttttcctgcctatctgaggagctaaacaatttacacaatcggacatatgagactattgtacaccctgctgttcagagaatggaactacatggtcaattagacatgcctgaaacaataccagaatatagaaatattgctgggtttggttctgctactattgatggcccacttcacataccagatgggattcaatcagatgccatgttgtcaggcgcaaatgttgcatatggcgctacagctgcttttggtttgcaaattcctcctgactaccaggttaaccgtgcatctaatgattttgttgtcggcactcagcttcaagaggtggctaaaccttttattggtaatgagcacgaagtggcacctcctgacagagagcatgctcaagtagatacattgtatagtgaccgttttcaaggtgttccatctgatttgcagaggagtaatgatgcaaatgtttctagtcaagatgtggttctagataactctggccaagcttgtgctcatgcagtggacggcatgacaagggagtttaatcattttgttcatagagacgctaatctttttgggagtactgaggtccctgcttctgagattactggggtggaatataatcaagatgcctctggttttcctcgacaaacagaggatgacaacacggtggagtataatcaagatgcctctggttttcctcgaccaacggagggtgggaatgcggtggagtataatcaagatgtctctggttttcctcgaccaacagaggatggaaaaacggtggagtataatcaagatgcctctggttttcctcgaccaacagaggatgaaaacacggtggagtataatcaagatgcctctggttttcctcagccaaccgaggatgaaaacacggtggagtataatcaagatgcctctggttttcctcggccaacggaggatgaaaatgccgcgtctgctacgggagataattctggcttccaagaaaacaacacgggttctcatatggatctggatatgatgaatgactatgaagtgaaggaatgcaacgattttgggagtgcgattcatggcgttgatacagattttctgaactatggtgacgacgacaacgacgacgacttcgtcgacgccgacgagccaaatcccagtgagttccagtctctcgacaacagcggctggtcttctcgcaccaggggtgtcgcgagatatctcaagactctgttcgacgaggagtccggtctggggaggaagagcgtcgccatcgaccatctggtgcgcgggaagacgcggaaggaagcgtcgaggatgttcttcgagaccttggtgctgacgacgaaggactacatcagcgtggaccaaccgaaccccttcgactttgtgagcgtgaagccaggcccgaagctgctcatgtcagagttctagttcaacaaagtcagcgtaccctggcgcgatacattccctcttaccattgtatccatcatcacaccgaccaacaacaacaccgcagatatccccccccccctcctcttccaaaaccatttttgtgtatgttgttgcagttcccctcccctgtagcatctggtgcgctgatccgttgttgttgccagggcgtctgtccgagtaggatggtggttgtgttgtaccgtcggctatccaacagtatatagtagtagtatgattttagcgacactcggtgaagcccgccatgtaatctgctagggttcatgctcccctaagttactgtcgctttagactggctaaagcccgtagaggaattgtatacgagaaggacagggacagcccgagatgatgaatgatgtattgatgtgcctgttgactatgtgaggactgacggttttaactcaataattcaagtgacctttcctgtgaaccatgaatccatgccgg

SEQ ID NO: 74683 - DNA, 3917 bp, Zea Mays
tcagcctacatcacatcacatgtcataaattatggagatctctaaattagattccatcatattccctgacgttccaatcgcacttcggttatcaagtcatcttatgttaggcgtggtcagaatctattctcggaaggtcaactacctattccatgactgcagcgaagctttgctgaagataaaacaagctttcaggtccactgctgttgatctacctcctgaggagtcaactgctccatatcactctataactctgcctgagacattcgatcttgatgattttgaactgccagaagctgtgtttcaaggcgatactgatcatcatgtgagcacaaaagagcagatcactttgcaagacaacccagagaaaacaggatattcaacatcccagtttggcctagatgaaagatttggtgatggcagttcatcacatattggcttggacttggaggaggaattaattctgaacaaggaccactcaattcatctcgagtctgatgatggtattattattcaaggtcggtcatcggtcccttctactgatatggagattgatgataacaaaagtacaaacataacagctgaaggatacagcaacatggacggtgggccttctagtcatgtaaagttaggtccactgaatgcagatgacctaggaggaaacagtatccgtaactggactggttacaatgtacagactcctgatttgaatgatatattattgcataataatgaggatattgcaggcccatcaacttcgtactatcaacctagcccatttacttgtgatgaacctgcatcaccagagttcattagcgctcaggccccagctacacctggtttaatggaagagacagttccttccagagtccatgaaagtcctgttctgagtccacagagaaaggcatcaccatcaactaatgatgaaactgcaaaggctgacactcctgctgcaccagcctcagattttctccattcagctacaggaaatgccagtgatgtggtgggtgctgagatgacagaacttggattggcgaaaccggtgcaagttgagtcttctgttgtgcaggactctgatgcatcggtgcaacagcacacaagtgagggtttaccatcccagggtcaagcttcacacttggaagctgctgctgataagttggtcggctctgatggtatagctgcatcggttgatgaaacggtaactgtcaatgcaaccattgaagatgtacctttggctgtaaatgattcagagccatgtgttgatggttctgctggaccatctgtggtgaacctggtacagatggatggtccattatttgatgcacaagtactaagtgcagattttcaacatgaagtccaagcaatgcaacaagtagtggcatctaacgatagactgaatgaactatcaacttcagaatttgccgagcctgagaaaatgctgacagctccgaatgctgaattcaatcatgcgattgacttggggcagataactgcggaaaaaggaacaattgaatctgatggaagtaacataataggcagcctaacaagcagaaaaagacacctggaatatagcttaccagctttagagagtgagaccactaaaaagttgcctagccgaccacatgttaaaagaaccaatgattttgttcctcatgatgatgatatactggcatctattttagtcggtaggacccctgggttcacacttgattcaacaccactaccaccaagggaatcatctctgaaacgcccaaggttggggtcgaagatgggtacactcaagagaaaagtgcagatagatgatgccatggtcctgcatgctgatactatacggcaacagttgatcaatactgaggatatacggcgcattcgtaaaaaggctccatgcactcgttccgaaatatggatgattgagaaaggttcactggaagatgatttattccacgagcccatcttttcctgcctatctgaggagctaaacaatttacacaatcggacatatgagactattgtacaccctgctgttcagagaatggaactacatggtcaattagacatgcctgaaacaataccagaatatagaaatattgctgggtttggttctgctactattgatggcccacttcacataccagatgggattcaatcagatgccatgttgtcaggcgcaaatgttgcatatggcgctacagctgcttttggtttgcaaattcctcctgactaccaggttaaccgtgcatctaatgattttgttgtcggcactcagcttcaagaggtggctaaaccttttattggtaatgagcacgaagtggcacctcctgacagagagcatgctcaagtagatacattgtatagtgaccgttttcaaggtgttccatctgatttgcagaggagtaatgatgcaaatgtttctagtcaagatgtggttctagataactctggccaagcttgtgctcatgcagtggacggcatgacaagggagtttaatcattttgttcatagagacgctaatctttttgggagtactgaggtccctgcttctgagattactggggtggaatataatcaagatgcctctggttttcctcgacaaacagaggatgacaacacggtggagtataatcaagatgcctctggttttcctcgaccaacggagggtgggaatgcggtggagtataatcaagatgtctctggttttcctcgaccaacagaggatggaaaaacggtggagtataatcaagatgcctctggttttcctcgaccaacagaggatgaaaacacggtggagtataatcaagatgcctctggttttcctcagccaaccgaggatgaaaacacggtggagtataatcaagatgcctctggttttcctcggccaacggaggatgaaaatgccgcgtctgctacgggagataattctggcttccaagaaaacaacacgggttctcatatggatctggatatgatgaatgactatgaagtgaaggaatgcaacgattttgggagtgcgattcatggcgttgatacagattttctgaactatggtgacgacgacaacgacgacgacttcgtcgacgccgacgagccaaatcccagtgagttccagtctctcgacaacagcggctggtcttctcgcaccaggggtgtcgcgagatatctcaagactctgttcgacgaggagtccggtctggggaggaagagcgtcgccatcgaccatctggtgcgcgggaagacgcggaaggaagcgtcgaggatgttcttcgagaccttggtgctgacgacgaaggactacatcagcgtggaccaaccgaaccccttcgactttgtgagcgtgaagccaggcccgaagctgctcatgtcagagttctagttcaacaaagtcagcgtaccctggcgcgatacattccctcttaccattgtatccatcatcacaccgaccaacaacaacaccgcagatatccccccccccctcctcttccaaaaccatttttgtgtatgttgttgcagttcccctcccctgtagcatctggtgcgctgatccgttgttgttgccagggcgtctgtccgagtaggatggtggttgtgttgtaccgtcggctatccaacagtatatagtagtagtatgattttagcgacactcggtgaagcccgccatgtaatctgctagggttcatgctcccctaagttactgtcgctttagactggctaaagcccgtagaggaattgtatacgagaaggacagggacagcccgagatgatgaatgatgtattgatgtgcctgttgactatgtgaggactgacggttttaactcaataattcaagtgacctttcctgtgaaccatgaatccatgccggatatgaggccgatgggcgatggtggcccagggaagaagagacgagagcaggagaggaacga

SEQ ID NO: 74684 - DNA, 1675 bp, Zea Mays
ccggctccggctgtagggccaccgccgccacctcctccttctccgccaccaccaccgccgccgccggtgggctactgggagagccgtgtccggaagcccgacacgtccaaagaaacccgttcgccggcactgtcgccgccaccacaagctgccaacttcaggagcgtccctgcacccaccgatgcgttctcaagccgtccgcccgagagctccgaccaaggcgacaagtcggaggacacgacgccacggccgaagctgaagccgctgcactgggacaaggtccgggccagctccgaccgcgtcatggtgtgggatcagctcaagtccagctcattccaggtgaacgaggagatgatcgagacgctgttcatttgcaacccagccaatgcgccggccaaggaggccacgaggaggccggtgctgccgacgcccagggccgagaacaaggtgctagatccgaagaaggcgcagaacattgccatcttgctgcgcgcgctgaatgtgaccaaggaagaggtctgcgacgcgctctgtgaaggtaacacggagaactttggagcagaactactggagaccttgctgaagatggctcctaccaaggaagaggagatcaaactgagagaattcgaagaggagacttctccagtcaagcttaacccagctgagaagttcctcaaggcagtgcttgatgtgccttttgccttcaaaagagttgatgcgatgctatacatcgcgaacttcgattcagaggtcaattacttgaagaagtcgttcgagaccctcgaggctgcttgcgacgagcttagaagcagcagactatttcttaagctacttgaagcagttctcaagaccggcaacaggatgaacgttggcacaaaccgcggggacgcgcacgcgttcaagctcgacactctgctcaaactggttgacgtcaaaggcaccgacggacacacgacccttctgcacttcgtcgtgcaggagatcatccggacggagggctcccgtcagtccgccagcgcccaaacaaccccaagaacccaggcgaaccctctgcgagaagagctcgagtgcaagaagctaggcctccaggcagtggccggcctcgccaacgagctgagcagcgtgaagaaggcagccggcatggactcggacgtgctgagcagctacgtcaccaaactcgccggaggaatagagaaggtcaccgaggtggtgctgcggctgaagaacgaagggacggagtcaagggacggcgcgtggcggttccacgacaggatgcagaggttcctgaagaaggcggacgacgagataatcaggatccagtgccaggagagcgtggcgctgtcgctcgtgaaggagatcaccgagtacttccacggcgactccgccaaggaggaggcccacccgttcaggatcttcatggtcgtcagggacttcctcgcggtcctcgaccaggtctgcagggaagtgggcagggtcaacgagcgtaccatcgccagctccgtgcgccacttccccgtgccggttaacccaacgacgccgcagctgttcccgcggcttcatgctttgagagctgggttctccgacgacgacgacgagagttcagccgcttcagtgtcgtcgccgtgatcgctgtagaagaatgaagaatctttccaattacaatgagcatcctgtg

SEQ ID NO: 74685 - DNA, 486 bp, Zea Mays
atggcgggcaagtcgcacacgcgcaaggcgttcctcctgtgcaactacgtcctcatgggcgccgcttccagctgcatcttcctcacgctgtcgctgcgcctgctgccgtccccgtgcggcctcctcctgctcttcctccacgccctcaccgccgtcttctccgcggccggctgctcgggctccttcacggcgcccgccacgcccgcgcagtggcacaacgcgcacaccgcgggggccgcgctcaccgccatcttccagggggccgtcgcgctgctcgcgttcacccgcacctccgacttcctggccgagcttcagtcctacgtccgcgacgaggacggcgccgtcatcctcaagatggtcgggggcctcggcaccgccatcttcgtcctcgagtgggccgcgctcgcgctcgccttctccctccgcctcgatgacgacgacgacgacgacctccaggccaagaaccggcagccgtaccatgtctga

SEQ ID NO: 74686 - DNA, 610 bp, Zea Mays
ggaaccccctggacgggcactgggcagcgcagcgggactgcgggagtcacctccatggcctcggccgcaaccctccccaagctttagctgaggcgaagatggctagctactcccagagaaagaaggagcaaaaaatggtggtccaaggaagtaagttaatccgaaagatagcaagtgaagcgtttgaccgggcgtttggatggtgcccgagagacatgcgaatttctgggtgatcaagactgcaatatggaggctggagttggagatagcctttcttttggttgatgtcttgaatcagtgtcttttgtttgcgcctgtctgtcctgatctgtctgtcttgatctggttgtaaataagaaagtcttatgctactagtcgcaggtcgaactttatcttctatcctaaaccctctacctatctaggttgatagtgtaaagtgtctagatagagatctaacctagttgttattctgtcggatcgtttgatcgcgatagatgtcgttgttctaaactttcctatttcctaatgaaatagggggcttgtcccttcgtcaaaaaaaatatcacactgcgactgtttcgagctgcgagttgcagctggaacatttctg

SEQ ID NO: 74687 - DNA, 1507 bp, Zea Mays
ggtggtttaaccacccaagcaagtgcacaaactgactcttacctccacagaagttaaggcttccgcagaagaggcaggaagatctattctgtacgatataaccgtatgttttcacgtcaaaagctagccgagagtgcacactcttctacgactttttacctgttgcacagcagcacaagtcttatttggctcatggatttcggttagcatggcagcatttcacttcagaaaaaaaggggggaagaaaattcaggagtaaaggaaagacttttcagtatcatcgtgtcattatcaaccgcgtccgcatcctccactagcactttggcaggagtggaagctattcatttcaatatttcattgcccatgccccacgaacccaatcactcacccatcattggaccccattaataaataaacaaacaaaccgcaaggctgcctcgtttttgttgtatttcttctcccctcttcttgttcttgcagttgttggtgtcctcggagctaaaaaaaagcccccccgccttttggctcattgtcagactttgccacctgctccaagaaagcttcttggagatggtgcgcgccgagaagctcgccggcgatggctgctccggcggcgaaggccaagtggaggtggaggtcggcatggggatggacgggaagggggtcacagagtgccggatatgccaggaggaggggaaggaggccgctatggactcaccctgcgcctgcactggcgctatggactaccatgtcgtcgtccctgctgagactgagatggcgactcttcagttcaccggattctttctgccttgctatgtaatagctcgctcttgctacgctttgcagcaccggaaacgaagacaggtataggggtgagggattaacctgaaccttgaaggcgagcgaagagagaggatgcatcgcgaagtgagcttcccgttgttgcttggagtcgccgcaaaacattaggtgattgagctgcctcaaatgtacatacacaagagaggagaataggggacctttttattattatttttacagctggaaaggaagggaaatgtagacctcacacatttctactgcaaataaaagaacaaccgcccgtcgacctcccaagttcatgtgctcgatttgagatggctagctcgggcggcggcggcggctgctgctgctgtgcaagtgcgtagagaggagggaggtttctgaatcggacaagacgtcgtcgagtcacggttttcagttgctgcgtgtgttgttatactgccaacgccgccggtgtgttgttatgcatgccacgtggacgtgctcgacgaccgaccacggtaggacttcgccgccaccgccgacgttgcatgcgaagaagcagctggagtgggcctgtccctgggagctcgcgaaaatacacgagaggtgagagcaccaccttcacgcctacatgacattactgcaagagcaaggatgattggaagcagacaacatataaaggattatatgaaatgattcggtc

SEQ ID NO: 74688 - DNA, 1734 bp, Zea Mays
ggtggtttaaccacccaagcaagtgcacaaactgactcttacctccacagaagttaaggcttccgcagaagaggcaggaagatctattctgtacgatataaccgtatgttttcacgtcaaaagctagccgagagtgcacactcttctacgactttttacctgttgcacagcagcacaagtcttatttggctcatggatttcggttagcatggcagcatttcacttcagaaaaaaaggggggaagaaaattcaggagtaaaggaaagacttttcagtatcatcgtgtcattatcaaccgcgtccgcatcctccactagcactttggcaggagtggaagctattcatttcaatatttcattgcccatgccccacgaacccaatcactcacccatcattggaccccattaataaataaacaaacaaaccgcaaggctgcctcgtttttgttgtatttcttctcccctcttcttgttcttgcagttgttggtgtcctcggagctaaaaaaaagcccccccgccttttggctcattgtcagactttgccacctgctccaagaaagcttcttggagatggtgcgcgccgagaagctcgccggcgatggctgctccggcggcgaaggccaagtggaggtggaggtcggcatggggatggacgggaagggggtcacagagtgccggatatgccaggaggaggggaaggaggccgctatggactcaccctgcgcctgcactggcgctatggactaccatgtcgtcgtccctgctgagactgagatggcgactcttcagttcaccggattctttctgccttgctatgtaatagctcgctcttgctacgctttgcagcaccggaaacgaagacaggtacacttcctttttcctacaagtcctgttgatacaactcttccgtttgatctattgacgcgaacgtccttctgcctgacttgtaagctgtaagagactgacgtttatttactactggaaccctgtgctgcttcttgcaaggggagtctcaagtacatgcgcagtggtctgtctatcctacagaggggacagtcctaacttgttgtgctgcctatctctacgtacaggtataggggtgagggattaacctgaaccttgaaggcgagcgaagagagaggatgcatcgcgaagtgagcttcccgttgttgcttggagtcgccgcaaaacattaggtgattgagctgcctcaaatgtacatacacaagagaggagaataggggacctttttattattatttttacagctggaaaggaagggaaatgtagacctcacacatttctactgcaaataaaagaacaaccgcccgtcgacctcccaagttcatgtgctcgatttgagatggctagctcgggcggcggcggcggctgctgctgctgtgcaagtgcgtagagaggagggaggtttctgaatcggacaagacgtcgtcgagtcacggttttcagttgctgcgtgtgttgttatactgccaacgccgccggtgtgttgttatgcatgccacgtggacgtgctcgacgaccgaccacggtaggacttcgccgccaccgccgacgttgcatgcgaagaagcagctggagtgggcctgtccctgggagctcgcgaaaatacacgagaggtgagagcaccaccttcacgcctacatgacattactgcaagagcaaggatgattggaagcagacaacatataaaggattatatgaaatgattcggtc

SEQ ID NO: 74689 - DNA, 1564 bp, Zea Mays
ctcccgctcaccggtggcggcaccggccagctcatcgaggctcgttgacttgacactcctcgccggcgctcgggggaagggagcggtgtgcttggatgggaccccgcctggttaccaccttcggagaggattcggttccggagctcacaactggctcgtcttccttgagggaggaggttggtgcaacaccacgcagagctgctccgagcgcaaaatgaccaacttcggttcatctaagtatatgggagcagtaaacttcactgggatactcagcaatgatcacacagaaaatcctgatttctacaactggaatacagttgtcataaggtactgcgacggagcatcatttgctggggatgcagaggggggagatctggatggaaccaaacttttcttcagaggattacgtatctggaaagcagttgtagatgaactcatgggaaaaggaatggacgctgctaaacaggccttgcttacaggctgttctgctggttctctagctgcgctactgcactgtgataatttccatggacggtttcctcatgaagtttcagttaaatgcctttctgatgctggattttttattgacgagaaggatttatctggagaaagatccatgcggtcgctcatcagtggagtagttcaccttcagaatgttaaagaagttttacccaatgactgcctccaaaagaaggatccaacagagtgtttctttcctgctgaactgattaagggcatcaccacccccacgtttattctgaactccgattacgattcttggcagatacgaaacattctcgcaccaaatggatcctatcctggccaggaatggtctagttgcaaagcagatatccggaactgcagttgcgcacaacttgatgtactgcatggattcaagaagaaattagtcagtgaattgaaggttgccgaagataacaaggactggggcctgttcattgattcatgctttacccactgtcaaacaccattcgatatcacatggaattcaccgatctcaccaaggctcggcaacaagtctatctcagaggccgttggggattggtatttcgatagaaggcaaaacgcgaaacagattgactgcgagtacccatgcaaccccacatgcagcagtcttctgcctactgcttgattcgcaaagggctgcactgagatcaccaggcttttctcatttttcaaattagttttgctgaggattcaaaagggagctttgccttattggtaaaacctgcaattgactaaacacgacttgcagtagttgtgcttccatcaaaagcaatatgtcagaaccgttaagcaccaaactttcaggaactgtgcctcgtaacttccacgttcaaagaaattccagcagagcccacccccttagcctcttacaaaatcaccagttcgcatgaaaacccagcaatggaagctcataaggcctactaaatccacacgattaccctgaactcggcaccaagtcaaaccctaattaagcaaagaaagcccatccgcaaatataggactcgagaactcacctccaccctgcgtccaacggcttcac

SEQ ID NO: 74690 - DNA, 1438 bp, Zea Mays
attcggttccggagctcacaactggctcgtcttccttgagcagggaggaggttggtgcaacaccacgcagagctgctccgagcgcaaaatgaccaacttcggttcatctaagtatatgggagcagtaaacttcactgggatactcagcaatgatcacacagaaaatcctgatttctacaactggaatacagttgtcataaggtactgcgacggagcatcatttgctggggatgcagaggggggagatctggatggaaccaaacttttcttcagaggattacgtatctggaaagcagttgtagatgaactcatgggaaaaggaatggacgctgctaaacaggccttgcttacaggctgttctgctggttctctagctgcgctactgcactgtgataatttccatggacggtttcctcatgaagtttcagttaaatgcctttctgatgctggattttttattgacgagaaggatttatctggagaaagatccatgcggtcgctcatcagtggagtagttcaccttcagaatgttaaagaagttttacccaatgactgcctccaaaagaaggatccaacagagtgtttctttcctgctgaactgattaagggcatcaccacccccacgtttattctgaactccgattacgattcttggcagatacgaaacattctcgcaccaaatggatcctatcctggccaggaatggtctagttgcaaagcagatatccggaactgcagttgcgcacaacttgatgtactgcatggattcaagaagaaattagtcagtgaattgaaggttgccgaagataacaaggactggggcctgttcattgattcatgctttacccactgtcaaacaccattcgatatcacatggaattcaccgatctcaccaaggctcggcaacaagtctatctcagaggccgttggggattggtatttcgatagaaggcaaaacgcgaaacagattgactgcgagtacccatgcaaccccacatgcagcagtcttctgcctactgcttgattcgcaaagggctgcactgagatcaccaggcttttctcatttttcaaattagttttgctgaggattcaaaagggagctttgccttattggtaaaacctgcaattgactaaacacgacttgcagtagttgtgcttccatcaaaagcaatatgtcagaaccgttaagcaccaaactttcaggaactgtgcctcgtaacttccacgttcaaagaaattccagcagagcccacccccttagcctcttacaaaatcaccagttcgcatgaaaacccagcaatggaagctcataaggcctactaaatccacacgattaccctgaactcggcaccaagtcaaaccctaattaagcaaagaaagcccatccgcaaatataggactcgagaactcacctccaccctgcgtccaacggcttcac

SEQ ID NO: 74691 - DNA, 1376 bp, Zea Mays
aatcattcaagcccaacaaaagatcatctgatgatgtgaagagctttggtgactgagatatgaacaaaacatatgggggaggaggttggtgcaacaccacgcagagctgctccgagcgcaaaatgaccaacttcggttcatctaagtatatgggagcagtaaacttcactgggatactcagcaatgatcacacagaaaatcctgatttctacaactggaatacagttgtcataaggtactgcgacggagcatcatttgctggggatgcagaggggggagatctggatggaaccaaacttttcttcagaggattacgtatctggaaagcagttgtagatgaactcatgggaaaaggaatggacgctgctaaacaggccttgcttacaggctgttctgctggttctctagctgcgctactgcactgtgataatttccatggacggtttcctcatgaagtttcagttaaatgcctttctgatgctggattttttattgacgagaaggatttatctggagaaagatccatgcggtcgctcatcagtggagtagttcaccttcagtgtttctttcctgctgaactgattaagggcatcaccacccccacgtttattctgaactccgattacgattcttggcaggaatggtctagttgcaaagcagatatccggaactgcagttgcgcacaacttgatgtactgcatggattcaagaagaaattagtcagtgaattgaaggttgccgaagataacaaggactggggcctgttcattgattcatgctttacccactgtcaaacaccattcgatatcacatggaattcaccgatctcaccaaggctcggcaacaagtctatctcagaggccgttggggattggtatttcgatagaaggcaaaacgcgaaacagattgactgcgagtacccatgcaaccccacatgcagcagtcttctgcctactgcttgattcgcaaagggctgcactgagatcaccaggcttttctcatttttcaaattagttttgctgaggattcaaaagggagctttgccttattggtaaaacctgcaattgactaaacacgacttgcagtagttgtgcttccatcaaaagcaatatgtcagaaccgttaagcaccaaactttcaggaactgtgcctcgtaacttccacgttcaaagaaattccagcagagcccacccccttagcctcttacaaaatcaccagttcgcatgaaaacccagcaatggaagctcataaggcctactaaatccacacgattaccctgaactcggcaccaagtcaaaccctaattaagcaaagaaagcccatccgcaaatataggactcgagaactcacctccaccctgcgtccaacggcttcac

SEQ ID NO: 74692 - DNA, 1296 bp, Zea Mays
atgaccaacttcggttcatctaagtatatgggagcagtaaacttcactgggatactcagcaatgatcacacagaaaatcctgatttctacaactggaatacagttgtcataaggtactgcgacggagcatcatttgctggggatgcagaggggggagatctggatggaaccaaacttttcttcagaggattacgtatctggaaagcagttgtagatgaactcatgggaaaaggaatggacgctgctaaacaggccttgcttacaggctgttctgctggttctctagctgcgctactgcactgtgataatttccatggacggtttcctcatgaagtttcagttaaatgcctttctgatgctggattttttattgacgagaaggatttatctggagaaagatccatgcggtcgctcatcagtggagtagttcaccttcagtgtttctttcctgctgaactgattaagggcatcaccacccccacgtttattctgaactccgattacgattcttggcagatacgaaacattctcgcaccaaatggatcctatcctggccaggaatggtctagttgcaaagcagatatccggaactgcagttgcgcacaacttgatgtactgcatggattcaagaagaaattagtcagtgaattgaaggttgccgaagataacaaggactggggcctgttcattgattcatgctttacccactgtcaaacaccattcgatatcacatggaattcaccgatctcaccaaggctcggcaacaagtctatctcagaggccgttggggattggtatttcgatagaaggcaaaacgcgaaacagattgactgcgagtacccatgcaaccccacatgcagcagtcttctgcctactgcttgattcgcaaagggctgcactgagatcaccaggcttttctcatttttcaaattagttttgctgaggattcaaaagggagctttgccttattggtaaaacctgcaattgactaaacacgacttgcagtagttgtgcttccatcaaaagcaatatgtcagaaccgttaagcaccaaactttcaggaactgtgcctcgtaacttccacgttcaaagaaattccagcagagcccacccccttagcctcttacaaaatcaccagttcgcatgaaaacccagcaatggaagctcataaggcctactaaatccacacgattaccctgaactcggcaccaagtcaaaccctaattaagcaaagaaagcccatccgcaaatataggactcgagaactcacctccaccctgcgtccaacggcttcac

SEQ ID NO: 74693 - DNA, 2174 bp, Zea Mays
gagtcctgactgtctgtctgcccatccgtacctgatttgggtcaccgaagcgcagcagactgcagaccaccagggcctgcctgtgcttgtgctgtgcatgccttttcttccttccgtctacccactccttgaccccgcttcgcagcatcatgcttctgctcctcctcatatacctcctcgtcgttcgtccctgtcctaagataggacccaaatactctctccattgcttcccttccaaacaggtgtaggaagcaagatcgatcgatcgatcgagagaacaaaacaaaagggtatctgcagttcctgcagagatatggcgccggcggcggctctggctctgagtctgctcctcgcgttcctggcgatcgggccctgcgccgccgccgacagcatcgacctgtggccgatgccgcagtcggtgtcgcacgggacgcagaagctctacgtcaagaaggacatcaccatgtcgatggtggggagcacgtactccgacgagaaatcgatcctcaaggacgcgttccagcggatgcttgacctgatcacgctgaaccacgtcatcgacggaatcgacccaggctcctcggttctcacctgcgttaatgtggttgtgcgtacacctgaagacgagcttagctttggggcagatgagtcgtataacctgactgttccaacgacaggagacccactgtatgcacagatccaggctcaaacagtgtttggagcgcttcaagccttgcagacgtttggtcagttatgttacttcgatttcacatcgcggctcattgagctcaactcggctccttggataataaccgacagacccaggtttccctaccggggactgcttattgataccgcgagacactacctccctgttaagacaatcaaaggagtgattgatgcaatggcttacagcaaattgaatgttctccattggcatatcgtggacgagcagtcgtttcccattgagataccctcataccccaaactgtggaacggttcatactcttattcagagagatatacgatgtctgatgctattgacattgtacggtatgccgagaagcgaggtgtaaatgtgttggctgagattgatgttcctggccatgcccgctcatggggtatcggctacccagcattatggccatcagaaagctgcagagaaccacttgatgtcagtaaaaacttcacgtttgaagtcatcgatggcattctttcagattttagcaagatttttaagttcaaatttgtccacttaggaggtgatgaagtcaacacaagctgctggaccagaacaccccatattgaaggatggttgaataataaccatatgaacgtatcagacgcatacagagattttgtattgagatctcaaaagatcgcgatatcacatggctacgatgtcataaactgggaagagacatttaacagttttggagacaaattggaccctaaaaccgtggtgcataactggcttggagaagatgtagcgcccaaagtggttgctgcagggcataggtgtatagtaagcaaccaggataagtggtacctggatcacttggatgcctcatgggaaggattttacatgaacgagcccctaaaaggtatcaatgatacaaagcagcagcaattggtcattggtggtgaggtttgcatgtggggtgaggaaattgatgcctcagatattcagcaaacgatttggccacgtgccgcagcagctgcaggctgtggactccgattgagaagctcgcaaatgacacaagatttgtcacgtcaagattggcgcgcttcaggtgtttgctgaaccaaagaggagtagctgctgcgccattagcaggctatggtcgtgcatcaccatcagaacctggcccctgtgtaaggcaataaatgtccataactaaacggaaagtgacgattccttgacacaaaaaaaaaaaataggattcactcttacccctgttatacattcagcagagtgcacgtcagatagtaggtttagggttgcgtagaatgtttcatgttcttttttgctcctctctgatccaatttccttccacaataatttggatgtctatgcaatctacatggtatggtgatgaactgtaaggtcccgtttgtttcctttcattttgaggaattggaatcttactaatggaataagctatttcttttag

SEQ ID NO: 74694 - DNA, 2890 bp, Zea Mays
ctcgctttctccagctcctgttcggtatcccgtttctcgcttggaggctgccctgcagcggccagcagccatggcgactcgcgccggacgactgcccaccactccggcgcccgctcttctgctcctcctcgccttcccgtttctgctgcagggagttcttccgtcgcgagccggggacaccgtcgccgccggccgcccgctgtccggcggacagagcctcgtgtccaagcgtggcaagttcaggctcggattcttccgcccaggtgcaacagacaactcgagccagcgctggtacctgggcatctggtacaaccagctctcggtgcacaccacggtgtgggtggcgaaccgggggacgcccatctccgacccggagtcctcgcagctatctatctccaaggacggcaacatggtcgtcctcgaccacagcaggtcgtctaccgccgtctggtccaccaacgtcaccaccggcgtctcctccacgtccacggtcggcgtcatccgcgacaacggcaacctcgtcctggcggacgcgtccaacacttccgcggtgctgtggcagagcttcgaccactcgggcgacacgtggctccccggcgggaagctgggccggaacaagcgcacgggcgaggtcacgcgcctcgtggcgtggaaggggcgcgacgacccgacgccgagcctgttcgcgctggagctggacccgcgcggctccagccagtacctgctcaactggaacgacagcgagcggtactggaccagcggcaactggacggggacggcgttcgctgccgtgccggagatgacgtccaccggcgcgtcgcccgtgtccgactacaccttcggctacgtcgacggcgccaacgagagctacttcacctacgacgtcgcggacgagtcggtggtgacgcggttccaggtggacgtgacggggcagatccagttcctcacgtgggtggcggccgccgcccagtgggtgctcttctggtcggagcccaagcggcagtgcgacgtgtacgcggtgtgcgggcccttcggcctgtgcaccgagaacgcgctgccgtcctgcacctgcccccgggggttccgggagcgcgacctggccgagtggatgcaggacgaccacaccgcgggatgcgccaggaacaccgcactccagccttgcggcgccggcgccgccgctcgagacgggcagaagcgccgcagggacgacgataggttctacacgatgcccgacgtgaggctgccgagcgacgcgcggagcgcggcggccgcgagcgctcacgactgcgagctcgcgtgcctccgcaactgctcttgcaccgcttactcctacagcggcggctgctcgctgtggtatggggacctcatcaaccttcaggacacgacgagcgctggcagtggcaccggaggcggcagcatctcgatccgcctcgctgcctccgagttctctagcaacgggaacaccaagaaactggtcatcgggctcgtcgtcgcgggctcctccttcgtcgccgcagtcaccgccatcgttctggctaccgtcctcgttctaaggaaccgaaggatcaagtcgttgaggacggtccaaggatccctggtggcgttcacgtaccgcgacctgcagctggtgaccaacaacttctcggagaagctcggcggcggcgccttcgggtccgtgttcaaaggggtgctgcctgacgcaacgctcgtggcggtcaagaagctggaaggcgttcggcagggggagaaacagttccgcgccgaggtgagcacgatcggcacgatccagcacgtgaacctgatcaggctgctcgggttctgctccgaggggtcgaggcggctcctcgtctacgagcacatgccaagcggctctctggacaggcatctgttcgatcgggaccagcagccgggtgtcctgagctgggacgccaggtaccagatcgctctcggggtcgcgagggggctggactacctgcacgagaaatgcagggactgcatcatccactgtgacatcaagcccgagaacatcctcctggacgacgcgttcgtccccagagtcgccgacttcgggctcgccaagctcatgggtcgcgacttcagccgcgtgctcaccaccatgcggggcacggtggggtacctggcgcccgagtggatcgccggcacggccgtcaccaccaaggcggacgtgttcagctacggcatgatgctgttcgagatcatctcgggccggaggaatgtcggccagcgggcggacggcacggtggacttcttcccgtccacggccgtcaaccggctcctcgacggcgacgtgaggagcgcggtggacagccagctcggcggcaacgcggacgtggccgaggtggagcgggcctgcaaggtggcgtgctggtgcgtgcaggacgcggagagcttgcgcccgagtatggggatggtggtgcaggttctggaggggctggtcgacgtcaatgccccgcccgtcccgaggtcgctcatggtgctcgccgatccgtccaagtggcaagtattttcacaaaacctcttcccaagaagcatatggaggcaatcttggagctgataaatcaagatattgtgaagacagcgaagaacaaaaagaaagggagaaaggtgacacctgccctcgaggctgtggatgtgggagagagctgagcccctggtctgggcaggtcggtggtgcttttggtgaacaatgtatcctcagatggatagcctcgctcggcgcagctccgttccattcgttcttggtggtacctctgctagctttagcgattataggcagtgccttttgttccgtggcatgcctttgtatctctgcccttttggtttatggtttgaggctgaactgtgtcgtacctcaacattccactgtttt

SEQ ID NO: 74695 - DNA, 2900 bp, Zea Mays
tctccagctcctgttcggtatcccgtttctcgcttggaggctgccctgcagcggccagcagccatggcgactcgcgccggacgactgcccaccactccggcgcccgctcttctgctcctcctcgccttcccgtttctgctgcagggagttcttccgtcgcgagccggggacaccgtcgccgccggccgcccgctgtccggcggacagagcctcgtgtccaagcgtggcaagttcaggctcggattcttccgcccagacaactcgagccagcgctggtacctgggcatctggtacaaccagctctcggtgcacaccacggtgtgggtggcgaaccgggggacgcccatctccgacccggagtcctcgcagctatctatctccaaggacggcaacatggtcgtcctcgaccacagcaggtcgtctaccgccgtctggtccaccaacgtcaccaccggcgtctcctccacgtccacggtcggcgtcatccgcgacaacggcaacctcgtcctggcggacgcgtccaacacttccgcggtgctgtggcagagcttcgaccactcgggcgacacgtggctccccggcgggaagctgggccggaacaagcgcacgggcgaggtcacgcgcctcgtggcgtggaaggggcgcgacgacccgacgccgagcctgttcgcgctggagctggacccgcgcggctccagccagtacctgctcaactggaacgacagcgagcggtactggaccagcggcaactggacggggacggcgttcgctgccgtgccggagatgacgtccaccggcgcgtcgcccgtgtccgactacaccttcggctacgtcgacggcgccaacgagagctacttcacctacgacgtcgcggacgagtcggtggtgacgcggttccaggtggacgtgacggggcagatccagttcctcacgtgggtggcggccgccgcccagtgggtgctcttctggtcggagcccaagcggcagtgcgacgtgtacgcggtgtgcgggcccttcggcctgtgcaccgagaacgcgctgccgtcctgcacctgcccccgggggttccgggagcgcgacctggccgagtggatgcaggacgaccacaccgcgggatgcgccaggaacaccgcactccagccttgcggcgccggcgccgccgctcgagacgggcagaagcgccgcagggacgacgataggttctacacgatgcccgacgtgaggctgccgagcgacgcgcggagcgcggcggccgcgagcgctcacgactgcgagctcgcgtgcctccgcaactgctcttgcaccgcttactcctacagcggcggctgctcgctgtggtatggggacctcatcaaccttcaggacacgacgagcgctggcagtggcaccggaggcggcagcatctcgatccgcctcgctgcctccgagttctctagcaacgggaacaccaagaaactggtcatcgggctcgtcgtcgcgggctcctccttcgtcgccgcagtcaccgccatcgttctggctaccgtcctcgttctaaggaaccgaaggatcaagtcgttgaggacggtccaaggatccctggtggcgttcacgtaccgcgacctgcagctggtgaccaacaacttctcggagaagctcggcggcggcgccttcgggtccgtgttcaaaggggtgctgcctgacgcaacgctcgtggcggtcaagaagctggaaggcgttcggcagggggagaaacagttccgcgccgaggtgagcacgatcggcacgatccagcacgtgaacctgatcaggctgctcgggttctgctccgaggggtcgaggcggctcctcgtctacgagcacatgccaagcggctctctggacaggcatctgttcgatcgggaccagcagccgggtgtcctgagctgggacgccaggtaccagatcgctctcggggtcgcgagggggctggactacctgcacgagaaatgcagggactgcatcatccactgtgacatcaagcccgagaacatcctcctggacgacgcgttcgtccccagagtcgccgacttcgggctcgccaagctcatgggtcgcgacttcagccgcgtgctcaccaccatgcggggcacggtggggtacctggcgcccgagtggatcgccggcacggccgtcaccaccaaggcggacgtgttcagctacggcatgatgctgttcgagatcatctcgggccggaggaatgtcggccagcgggcggacggcacggtggacttcttcccgtccacggccgtcaaccggctcctcgacggcgacgtgaggagcgcggtggacagccagctcggcggcaacgcggacgtggccgaggtggagcgggcctgcaaggtggcgtgctggtgcgtgcaggacgcggagagcttgcgcccgagtatggggatggtggtgcaggttctggaggggctggtcgacgtcaatgccccgcccgtcccgaggtcgctcatggtgctcgccgatccgtccaagtacgccgttgagttcttctcaggtttgccgtcgacctgagattgggccgctgcctctgcctgttaggggcatcaactttgatcagtagtgcatggtgtatatacgagctaatgagttcgtcaagaacttactcgtgccacgaaccctgtggcggtatagaacttctgcacgtagccaagaagatttcggatctgttagggcttgttcggttacctctcaatccatgtggattgagagtgggattagatggttttaatcccaaacaagtcaaacttcttctcaattttttccaatctcatccaatccatgtgtattaggaataaccgaacaagcccttaaggtgccaaaaaacgtcacatatttcttgccacacgtgcatgaggttatatgctttggagaat

SEQ ID NO: 74696 - DNA, 1453 bp, Zea Mays
cctttatcgacgtttatcttcaagctcagacctgagctctgctatccttgcacagggctccgaacacgcgtttccatggctctcctccgactccaagagcagtgctcgctcctccgaatctccagctcccaccacccaaaccccatcgatatcccaagaaatcctcgcaagaaccaacttttagtgcccaatgcggccaagattgccaacgcctccgaaattccggttcctcgcatccccactagcacttccaaggccgcaatcctggcccggaaggccgcgctttggcgggacgcccttgtccccgttgccgccgccttcgcgtcctgtccgctcccttccctcgcggcggagggcgacgggaaagtgagcctcgagtccatcgtggtggcaatcgacgacttcaacaatcgcaaccctttcttcgtggctggggtcgtgttcgtgtggctagtggtgatcccgctcctgcaggagtacgtcttcaagaagtacaagcccgtgagcgccatcgacgcgttccgcaagcttcgcgacgtgccggaggtgcagctgctggacatcaggcggggcaagagcgtgcggttcatggcgccaccgaagctgaagcttatcgacaagagcaccgtgcaggtcgagttcgacgaggaggacgagaaggggtttgtcaaggaggtgctagcgaggttcccagacccggcgaacaccgtcgtctgcgtccttgacaagtagctttgatggtaattcttcgaaagttgctgagctactagttgagaatggttttaaggaagcctatgcaattaaagggggcttgagaggtccggaagggtggcaggcggttcaagaaaactatcttcccccatctgtccatgttttcccgaagaaaaaaaggggcgcgaaattagctcacacagatgcaagcaatgatggaacatacgttcagcaggagggaagcgaggaatcatcggctcctccaagcagtaccctgacttgaagcctccatcatccccaacaccatcaaaaccgacgaattaagagcaatgcaggacaataacatgtgtggaactcaaaaggtcagaagtagttgtctcctgcacaaacatttttgtatacttccaaccgtggatgtccaggagattgactgggatggcatggaagaggaccagcagtggtgtttggagctcttgctgctgttgaggccatggtgaattcttagttgtgtaatttgcgaagcttgtacccgtatgttgtactattaagtgggggcgaaatgacattttgtacctgacttgatacagtttggggtgccttagcgttctcaatttgacaattgtgcttaactcagttttattatcactggctcagacaccgtatataggtggcatcactataattgtaacagaggttcagttcattcacgctacgtacatgctggaagtggtttacattgggg

SEQ ID NO: 74697 - DNA, 1572 bp, Zea Mays
ctcagacctgagctctgctatccttgcacagggctccgaacacgcgtttccatggctctcctccgactccaagagcagtgctcgctcctccgaatctccagctcccaccacccaaaccccatcgatatcccaagaaatcctcgcaagaaccaacttttagtgcccaatgcggccaagattgccaacgcctccgaaattccggttcctcgcatccccactagcacttccaaggccgcaatcctggcccggaaggccgcgctttggcgggacgcccttgtccccgttgccgccgccttcgcgtcctgtccgctcccttccctcgcggcggagggcgacgggaaagtgagcctcgagtccatcgtggtggcaatcgacgacttcaacaatcgcaaccctttcttcgtggctggggtcgtgttcgtgtggctagtggtgatcccgctcctgcaggagtacgtcttcaagaagtacaagcccgtgagcgccatcgacgcgttccgcaagcttcgcgacgtgccggaggtgcagctgctggacatcaggcggggcaagagcgtgcggttcatggcgccaccgaagctgaagcttatcgacaagagcaccgtgcaggtcgagttcgacgaggaggacgagaaggggtttgtcaaggaggtgctagcgaggttcccagacccggcgaacaccgtcgtctgcgtccttgacaagtagctttgatggtaattcttcgaaagttgctgagctactagttgagaatggttttaaggaagcctatgcaattaaagggggcttgagaggtccggaagggtggcaggcggttcaagaaaactatcttcccccatctgtccatgttttcccgaagaaaaaaaggggcgcgaaattagctcacacagatgcaagcaatgatggaacatacgttcagcaggagggaagcgaggaatcatcggctcctccaagcagtgaactacattgagaaattatgttatctccagctatcacacttatagctatgccagacctactaagcaatggttgactcatatccatctaaaatgataaataatttgggaagaactcagcagtcagcactgcccttgtatttgtaccctgacttgaagcctccatcatccccaacaccatcaaaaccgacgaattaagagcaatgcaggacaataacatgtgtggaactcaaaaggtcagaagtagttgtctcctgcacaaacatttttgtatacttccaaccgtggatgtccaggagattgactgggatggcatggaagaggaccagcagtggtgtttggagctcttgctgctgttgaggccatggtgaattcttagttgtgtaatttgcgaagcttgtacccgtatgttgtactattaagtgggggcgaaatgacattttgtacctgacttgatacagtttggggtgccttagcgttctcaatttgacaattgtgcttaactcagttttattatcactggctcagacaccgtatataggtggcatcactataattgtaacagaggttcagttcattcacgctacgtacatgctggaagtggtttacattgggg

SEQ ID NO: 74698 - DNA, 1221 bp, Zea Mays
gagctctgctatccttgcacagggctccgaacacgcgtttccatggctctcctccgactccaagagcagtgctcgctcctccgaatctccagctcccaccacccaaaccccatcgatatcccaagaaatcctcgcaagaaccaacttttagtgcccaatgcggccaagattgccaacgcctccgaaattccggttcctcgcatccccactagcacttccaaggccgcaatcctggcccggaaggccgcgctttggcgggacgcccttgtccccgttgccgccgccttcgcgtcctgtccgctcccttccctcgcggcggagggcgacgggaaagagtacgtcttcaagaagtacaagcccgtgagcgccatcgacgcgttccgcaagcttcgcgacgtgccggaggtcgagttcgacgaggaggacgagaaggggtttgtcaaggaggtgctagcgaggttcccagacccggcgaacaccgtcgtctgcgtccttgacaactttgatggtaattcttcgaaagttgctgagctactagttgagaatggttttaaggaagcctatgcaattaaagggggcttgagaggtccggaagggtggcaggcggttcaagaaaactatcttcccccatctgtccatgttttcccgaagaaaaaaaggggcgcgaaattagctcacacagatgcaagcaatgatggaacatacgttcagcaggagggaagcgaggaatcatcggctcctccaagcagtaccctgacttgaagcctccatcatccccaacaccatcaaaaccgacgaattaagagcaatgcaggacaataacatgtgtggaactcaaaaggtcagaagtagttgtctcctgcacaaacatttttgtatacttccaaccgtggatgtccaggagattgactgggatggcatggaagaggaccagcagtggtgtttggagctcttgctgctgttgaggccatggtgaattcttagttgtgtaatttgcgaagcttgtacccgtatgttgtactattaagtgggggcgaaatgacattttgtacctgacttgatacagtttggggtgccttagcgttctcaatttgacaattgtgcttaactcagttttattatcactggctcagacaccgtatataggtggcatcactataattgtaacagaggttcagttcattcacgctacgtacatgctggaagtggtttacattgggg

SEQ ID NO: 74699 - DNA, 2105 bp, Zea Mays
atggctgcaagaaccctggtggctagggcggtagcattcgctgtggcccccatggtttcgctggctggttcccagatctcctccgtagcgctgccaaggacacgcaccatctgcatcgacttccacctccttgagcttgctgccaccacaggatttggtgaggaaggcgacgctggatgtgggacagcgtcattggcttctttgtgtcttgctttcgctttggcccgtgcggacgcgctccgccctgggctagataacctcgaggcccggactgggctaccgccgttcacttcacgcagcgtccgcgctgtctctgtcctcatctccgcgaagacaggctaccgccgccgccctacgccaggtgccgaggcctctctgtctcttcgccggcgacgatccaatagcagaaggaggacaccatgaagcttgacgtgaatgcccttcgctacctcgccaaggacgacttccgcgtccttaccgccgtcgagatgggcatgcgcaaccacgagattgttccagcagaacttgtcgacaggatcgccagactgaagcatggaggcacatacaaagtgctgaggaatcttttgaagaacaagctagtgcatcatgatgccactaaatacgatgggtatagactcacctatctaggatatgacttccttgccatcaagactttggttaatcggggagtttttgcttcagttggccgtcagatcggtgttggaaaggagtctgatatatttgaggttgccacagaggatggtacagtactcgccatgaaacttcataggctgggaaggacatcttttagggctgtgaaatctaaacgtgactatctaaggcacagaaggagctttaattggctgtacctctcacgacttgcagccttgaaagaatttgcctttatgaaggctttaggggaccatggtttccctgttccagctgctgtagattgcaatcgccattgtgtgatcatgtcacttgtgcagggatatcctcttgttcaagtgaaagagttacaaaatccagatgacgtttttgacacaattcttggtcttattgttcgtttggcagagcatggactgatacattgtgactttaatgagttcaatatcatgattgatgatgatgaaaaaattacggttattgattttccacagatggtatctgtttctcatcgtaatgcccaaatgttttttgaccgagacattgaatgtatctacaagttctttaacaaaaggttcaatctgacatcagagaaaaatgaagaacaagctgggtctgaaagtgatgatgaagggaatagcagaccttcctttttgtctgtgaaaaagactgctggttccttggacaaggaactagctgcaagtggatataccaggaaagagcaagtggagatggacaagtacattgaggaagatgctgaaagacatgattccagctcagatgatgatgacgacgacgacgacaatgacaaggacgattctgctgagcctgattgtaatcttgcctcaagggattcagatgtgcctggaactttttctgaagagaatgaaacaagctgtagcagtgagaagagattggaaagtccctcgggtgacaatggagaggctatgaaaccgcttgaatctgagggcaagacgctttcccagaaagacgacaacaatgatgatgactcatcagaggatgctgatgaagaagaagaagatgccgagctcacgaaacaattgaacaagcaaaggaaaaaggcaatagcagctgccagtggtcggagaaggccagtgtcgtccaggaacgcctgcaaggacaagggtaagggcaccatgaactccaaaatccagaggcaggcgtgccagtggtgatggtcactcgaatgtctgcagtgcctctttcgacaatcgtaaagtagaccaagagtaggattttccatgagggtagaaccgagggatccctgtactagaatcaactctggttttattcttttatcacatgtcgtatacctttttgtacacggttatggtgagatcatttgagttatgcttgtgtttataccaactgaatagctgagcgtactgccttcttcaagagcccgtactgctgccaat

SEQ ID NO: 74700 - DNA, 1080 bp, Zea Mays
gtaagcatatatctgtgatcaatcaactgtggattcatattagtcgaaaagcatggactgatacattgtgactttaatgagttcaatatcatgattgatgatgatgaaaaaattacggttattgattttccacagatggtatctgtttctcatcgtaatgcccaaatgttttttgaccgagacattgaatgtatctacaagttctttaacaaaaggttcaatctgacatcagagaaaaatgaagaacaagctgggtctgaaagtgatgatgaagggaatagcagaccttcctttttgtctgtgaaaaagactgctggttccttggacaaggaactagctgcaagtggatataccaggaaagagcaagtggagatggacaagtacattgaggaagatgctgaaagacatgattccagctcagatgatgatgacgacgacgacgacaatgacaaggacgattctgctgagcctgattgtaatcttgcctcaagggattcagatgtgcctggaactttttctgaagagaatgaaacaagctgtagcagtgagaagagattggaaagtccctcgggtgacaatggagaggctatgaaaccgcttgaatctgagggcaagacgctttcccagaaagacgacaacaatgatgatgactcatcagaggatgctgatgaagaagaagaagatgccgagctcacgaaacaattgaacaagcaaaggaaaaaggcaatagcagctgccagtggtcggagaaggccagtgtcgtccaggaacgcctgcaaggacaagggtaagggcaccatgaactccaaaatccagaggcaggcgtgccagtggtgatggtcactcgaatgtctgcagtgcctctttcgacaatcgtaaagtagaccaagagtaggattttccatgagggtagaaccgagggatccctgtactagaatcaactctggttttattcttttatcacatgtcgtatacctttttgtacacggttatggtgagatcatttgagttatgcttgtgtttataccaactgaatagctgagcgtactgccttcttcaagagcccgtactgctgccaat

SEQ ID NO: 74701 - DNA, 1388 bp, Zea Mays
catggagcacccacgcatggatcaaaatcctcccccaaaacgcgacgaaattctccgcgagcaaaatataaagtttataaacccactcctccccttcccctgttccctctaccaccaccaccggcaccgcgggacagtctgctctcgtcccgctgcagcccgtccccgacccggaaccctagcgactgccattgcccacgcgccgctcgcccgatgaacggcgggggctctgggctggcgcccaacgccgcgcacaccgcggacgaggtcttccgcgactacaaaggccgccgcgccggcatgatcaaggccctcaccactgatgtggagaggttcttcaaactctgtgaccctggtgagtgcgctcgatctctttggttcctcgccccaggatgtggagtgatagccgaggaggcttccgtggtttttctgcttgggcttcgttgcttcgaaaaggagaacttgtgcctttatggctatcccgatgagacgtgggaggtgaccttgccagctgaggaagttccccctgagatccctgaaccagcattaggaatcaactttgctagggatggcatgaatgagaaagactggctggcgctagttgcagtccacagtgattcctggttactgtctgttgcattctactttggtgcacgctttggatttgacagagaaactaggaggcgactctttagcctgataaacaacatgcccacgatatttgaggtagtgacaggagcagccaagaagcaggcgaaggagaagacacctaatagtagcagcaagagcaacaggcctagttcaaaagtgtcaagagcagagtctcgttcaaaggctaaggtcccccaagacgaagaagagagcggtgatgacgatgaggatgaggaggcagacgagcacaacaataccttgtgtggaacttgcggaactaacgacagcaaggaccagttctggatctgttgtgataactgcgagaagtggtaccatgggaagtgtgtcaagatcacgccagctcgagctgagcatatcaagcagtacaagtgcccagactgcaccaacaagcgggccagggcatgagcggcaaacatcggcatcgggcgacctttgataggaaggaagaaaccacctcctggcttcaagatccctagatatggctgtctaaaacgtgccgtgtgtcttctgtgctgagtgttgacatggggcctcctccctccagcctgtaaacgctgtcactgaaggtacctctcaactgaccatccttcattgttggtgtcgtgcagtgagtagtggccgtactctttgttcccagttcctagcatttgaattgctcaaatgcgtaccttgctgagtaaggccgttggaaaatgacgaatagctgcatttccgtg

SEQ ID NO: 74702 - DNA, 2422 bp, Zea Mays
catggagcacccacgcatggatcaaaatcctcccccaaaacgcgacgaaattctccgcgagcaaaatataaagtttataaacccactcctccccttcccctgttccctctaccaccaccaccggcaccgcgggacagtctgctctcgtcccgctgcagcccgtccccgacccggaaccctagcgactgccattgcccacgcgccgctcgcccgatgaacggcgggggctctgggctggcgcccaacgccgcgcacaccgcggacgaggtcttccgcgactacaaaggccgccgcgccggcatgatcaaggccctcaccactgatgtggagaggttcttcaaactctgtgaccctggtgagtgcgctcgatctctttggttcctcgccccaggatgtggagtgatagccgaggaggcttccgtggtttttctgcttgggcttcgttgcttcggtgggggattggatcattggaagctaaatttggagaaatttcccttttctctgtctcctctaccctcactcgacatgctttggattcgattattggtagccttgcagctttcgttaatgctctgcttgtgcttgattgtagctgttcgaatttggtgagagattgaaccccatgatgacagttttatgttggttggaactgtggaaccagtggctgacatataatttttttttgctgttaggttgttacttgttagcgctatggggttgccatcaatcttgtattgatagcttgcttgcagaaaatcgctagatatttttggctgatcagtgccgtggaatttcgactgtgtactgggtgcttggtttctatatgattgcttttagctagggcaatggtggttgtgcaagcagtccttaggtgcaaacgagttctctcgtccattagattatgatctaactgaggcgtcacactttaactagtatgtctattgtcttgtctgttgttttttaggggcggtctccagcagctctcctagtatcatatcatattacctatctcacatcctatttcaaactccactctgtaaacaatgttatctgcaatacaaaacattgttttatatgacaatatgtacgatccgcgacacaacattatgctactacatagttgttggtacagtcaatttattggagtcagtgacataatgtggataggtatactgattcagcaaatcttttttctttagtgcattgatggcactgttcgactggctgaatgcatggttgttttagctgctcgctctattaatgtaattattattattgtggagtttggttgcttctcattattgtatggcgtggtctgcagtgttttctgcttcagcctcgcactcttgtttgcagcagtgcccagttggtgtaacttgttatggctaattccattggttttgaacagaaaaggagaacttgtgcctttatggctatcccgatgagacgtgggaggtgaccttgccagctgaggaagttccccctgagatccctgaaccagcattaggaatcaactttgctagggatggcatgaatgagaaagactggctggcgctagttgcagtccacagtgattcctggttactgtctgttgcattctactttggtgcacgctttggatttgacagagaaactaggaggcgactctttagcctgataaacaacatgcccacgatatttgaggtagtgacaggagcagccaagaagcaggcgaaggagaagacacctaatagtagcagcaagagcaacaggcctagttcaaaagtgtcaagagcagagtctcgttcaaaggctaaggtcccccaagacgaagaagagagcggtgatgacgatgaggatgaggaggcagacgagcacaacaataccttgtgtggaacttgcggaactaacgacagcaaggaccagttctggatctgttgtgataactgcgagaagtggtaccatgggaagtgtgtcaagatcacgccagctcgagctgagcatatcaagcagtacaagtgcccagactgcaccaacaagcgggccagggcatgagcggcaaacatcggcatcgggcgacctttgataggaaggaagaaaccacctcctggcttcaagatccctagatatggcgtaggtccctagtttacgaagtctgcattttcatgtgttcattaatatatctgctgattagctgttcgacctagcagtgtctaaaacgtgccgtgtgtcttctgtgctgagtgttgacatggggcctcctccctccagcctgtaaacgctgtcactgaaggtacctctcaactgaccatccttcattgttggtgtcgtgcagtgagtagtggccgtactctttgttcccagttcctagcatttgaattgctcaaatgcgtaccttgctgagtaaggccgttggaaaatgacgaatagctgcatttccgtg

SEQ ID NO: 74703 - DNA, 2425 bp, Zea Mays
catggagcacccacgcatggatcaaaatcctcccccaaaacgcgacgaaattctccgcgagcaaaatataaagtttataaacccactcctccccttcccctgttccctctaccaccaccaccggcaccgcgggacagtctgctctcgtcccgctgcagcccgtccccgacccggaaccctagcgactgccattgcccacgcgccgctcgcccgatgaacggcgggggctctgggctggcgcccaacgccgcgcacaccgcggacgaggtcttccgcgactacaaaggccgccgcgccggcatgatcaaggccctcaccactgatgtggagaggttcttcaaactctgtgaccctggtgagtgcgctcgatctctttggttcctcgccccaggatgtggagtgatagccgaggaggcttccgtggtttttctgcttgggcttcgttgcttcggtgggggattggatcattggaagctaaatttggagaaatttcccttttctctgtctcctctaccctcactcgacatgctttggattcgattattggtagccttgcagctttcgttaatgctctgcttgtgcttgattgtagctgttcgaatttggtgagagattgaaccccatgatgacagttttatgttggttggaactgtggaaccagtggctgacatataatttttttttgctgttaggttgttacttgttagcgctatggggttgccatcaatcttgtattgatagcttgcttgcagaaaatcgctagatatttttggctgatcagtgccgtggaatttcgactgtgtactgggtgcttggtttctatatgattgcttttagctagggcaatggtggttgtgcaagcagtccttaggtgcaaacgagttctctcgtccattagattatgatctaactgaggcgtcacactttaactagtatgtctattgtcttgtctgttgttttttaggggcggtctccagcagctctcctagtatcatatcatattacctatctcacatcctatttcaaactccactctgtaaacaatgttatctgcaatacaaaacattgttttatatgacaatatgtacgatccgcgacacaacattatgctactacatagttgttggtacagtcaatttattggagtcagtgacataatgtggataggtatactgattcagcaaatcttttttctttagtgcattgatggcactgttcgactggctgaatgcatggttgttttagctgctcgctctattaatgtaattattattattgtggagtttggttgcttctcattattgtatggcgtggtctgcagtgttttctgcttcagcctcgcactcttgtttgcagcagtgcccagttggtgtaacttgttatggctaattccattggttttgaacagaaaaggagaacttgtgcctttatggctatcccgatgagacgtgggaggtgaccttgccagctgaggaagttccccctgagatccctgaaccagcattaggaatcaactttgctagggatggcatgaatgagaaagactggctggcgctagttgcagtccacagtgattcctggttactgtctgttgcattctactttggtgcacgctttggatttgacagagaaactaggaggcgactctttagcctgataaacaacatgcccacgatatttgaggtagtgacaggagcagccaagaagcaggcgaaggagaagacacctaatagtagcagcaagagcaacaggcctagttcaaaagtgcagtcaagagcagagtctcgttcaaaggctaaggtcccccaagacgaagaagagagcggtgatgacgatgaggatgaggaggcagacgagcacaacaataccttgtgtggaacttgcggaactaacgacagcaaggaccagttctggatctgttgtgataactgcgagaagtggtaccatgggaagtgtgtcaagatcacgccagctcgagctgagcatatcaagcagtacaagtgcccagactgcaccaacaagcgggccagggcatgagcggcaaacatcggcatcgggcgacctttgataggaaggaagaaaccacctcctggcttcaagatccctagatatggcgtaggtccctagtttacgaagtctgcattttcatgtgttcattaatatatctgctgattagctgttcgacctagcagtgtctaaaacgtgccgtgtgtcttctgtgctgagtgttgacatggggcctcctccctccagcctgtaaacgctgtcactgaaggtacctctcaactgaccatccttcattgttggtgtcgtgcagtgagtagtggccgtactctttgttcccagttcctagcatttgaattgctcaaatgcgtaccttgctgagtaaggccgttggaaaatgacgaatagctgcatttccgtg

SEQ ID NO: 74704 - DNA, 1336 bp, Zea Mays
catggagcacccacgcatggatcaaaatcctcccccaaaacgcgacgaaattctccgcgagcaaaatataaagtttataaacccactcctccccttcccctgttccctctaccaccaccaccggcaccgcgggacagtctgctctcgtcccgctgcagcccgtccccgacccggaaccctagcgactgccattgcccacgcgccgctcgcccgatgaacggcgggggctctgggctggcgcccaacgccgcgcacaccgcggacgaggtcttccgcgactacaaaggccgccgcgccggcatgatcaaggccctcaccactgaaaaggagaacttgtgcctttatggctatcccgatgagacgtgggaggtgaccttgccagctgaggaagttccccctgagatccctgaaccagcattaggaatcaactttgctagggatggcatgaatgagaaagactggctggcgctagttgcagtccacagtgattcctggttactgtctgttgcattctactttggtgcacgctttggatttgacagagaaactaggaggcgactctttagcctgataaacaacatgcccacgatatttgaggtagtgacaggagcagccaagaagcaggcgaaggagaagacacctaatagtagcagcaagagcaacaggcctagttcaaaagtgtcaagagcagagtctcgttcaaaggctaaggtcccccaagacgaagaagagagcggtgatgacgatgaggatgaggaggcagacgagcacaacaataccttgtgtggaacttgcggaactaacgacagcaaggaccagttctggatctgttgtgataactgcgagaagtggtaccatgggaagtgtgtcaagatcacgccagctcgagctgagcatatcaagcagtacaagtgcccagactgcaccaacaagcgggccagggcatgagcggcaaacatcggcatcgggcgacctttgataggaaggaagaaaccacctcctggcttcaagatccctagatatggcgtaggtccctagtttacgaagtctgcattttcatgtgttcattaatatatctgctgattagctgttcgacctagcagtgtctaaaacgtgccgtgtgtcttctgtgctgagtgttgacatggggcctcctccctccagcctgtaaacgctgtcactgaaggtacctctcaactgaccatccttcattgttggtgtcgtgcagtgagtagtggccgtactctttgttcccagttcctagcatttgaattgctcaaatgcgtaccttgctgagtaaggccgttggaaaatgacgaatagctgcatttccgtg

SEQ ID NO: 74705 - DNA, 1295 bp, Zea Mays
catggagcacccacgcatggatcaaaatcctcccccaaaacgcgacgaaattctccgcgagcaaaatataaagtttataaacccactcctccccttcccctgttccctctaccaccaccaccggcaccgcgggacagtctgctctcgtcccgctgcagcccgtccccgacccggaaccctagcgactgccattgcccacgcgccgctcgcccgatgaacggcgggggctctgggctggcgcccaacgccgcgcacaccgcggacgaggtcttccgcgactacaaaggccgccgcgccggcatgatcaaggccctcaccactgatgtggagaggttcttcaaactctgtgaccctgaaaaggagaacttgtgcctttatggctatcccgatgagacgtgggaggtgaccttgccagctgaggaagttccccctgagatccctgaaccagcattaggaatcaactttgctagggatggcatgaatgagaaagactggctggcgctagttgcagtccacagtgattcctggttactgtctgttgcattctactttggtgcacgctttggatttgacagagaaactaggaggcgactctttagcctgataaacaacatgcccacgatatttgaggtagtgacaggagcagccaagaagcaggcgaaggagaagacacctaatagtagcagcaagagcaacaggcctagttcaaaagtgcagtcaagagcagagtctcgttcaaaggctaaggtcccccaagacgaagaagagagcggtgatgacgatgaggatgaggaggcagacgagcacaacaataccttgtgtggaacttgcggaactaacgacagcaaggaccagttctggatctgttgtgataactgcgagaagtggtaccatgggaagtgtgtcaagatcacgccagctcgagctgagcatatcaagcagtacaagtgcccagactgcaccaacaagcgggccagggcatgagcggcaaacatcggcatcgggcgacctttgataggaaggaagaaaccacctcctggcttcaagatccctagatatggctgtctaaaacgtgccgtgtgtcttctgtgctgagtgttgacatggggcctcctccctccagcctgtaaacgctgtcactgaaggtacctctcaactgaccatccttcattgttggtgtcgtgcagtgagtagtggccgtactctttgttcccagttcctagcatttgaattgctcaaatgcgtaccttgctgagtaaggccgttggaaaatgacgaatagctgcatttccgtg

SEQ ID NO: 74706 - DNA, 1240 bp, Zea Mays
catggagcacccacgcatggatcaaaatcctcccccaaaacgcgacgaaattctccgcgagcaaaatataaagtttataaacccactcctccccttcccctgttccctctaccaccaccaccggcaccgcgggacagtctgctctcgtcccgctgcagcccgtccccgacccggaaccctagcgactgccattgcccacgcgccgctcgcccgatgaacggcgggggctctgggctggcgcccaacgccgcgcacaccgcggacgaggtcttccgcgactacaaaggccgccgcgccggcatgatcaaggccctcaccactgatgtggagaggttcttcaaactctgtgaccctgaaaaggagaacttgtgcctttatggctatcccgatgagacgtgggaggtgaccttgccagctgaggaagttccccctgagatccctgaaccagcattaggaatcaactttgctagggatggcatgaatgagaaagactggctggcgctagttgcagtccacagtgattcctggttactgtctgttgcattctactttggtgcacgctttggatttgacagagaaactaggaggcgactctttagcctgataaacaacatgcccacgatatttgaggtagtgacaggagcagccaagaagcaggcgaaggagaagacacctaatagtagcagcaagagcaacaggcctagttcaaaagtgtcaagagcagagtctcgttcaaaggctaaggtcccccaagacgaagaagagagcggtgatgacgatgaggatgaggaggcagacgagcacaacaataccttgtgtggaacttgcggaactaacgacagcaaggaccagttctggatctgttgtgataactgcgagaagtggtaccatgggaagtgtgtcaagatcacgccagctcgagctgagcatatcaagcagtacaagtgcccagactgcaccaacaagcgggccagggcatgagcggcaaacatcggcatcgggcgacctttgataggaaggaagaaaccacctcctggcttcaagatccctagatatggcgtaggtccctagtttacgaagtctgcattttcatgtgttcattaatatatctgctgattagctgttcgacctagcagtgtctaaaacgtgccgtgtgtcttctgtgctgagtgttgacatggggcctcctccctccagcctgtaaacgctgtcactgaaggggatagttatctgcaggttc

SEQ ID NO: 74707 - DNA, 2897 bp, Zea Mays
acttactcctcctccctatctccaccatcctccacctccgcatcgtcgtcctcccctccgggctccggctccgcccccacccacccagccatgttccggaccttcacgaggcttcgggatgcagcggcgccgctagccgcctcggcggtacggcggtgctcaggcgtcagcggccggatccgggccgaggccaattgcccgcgctgcgacgcccacatgtcggtccaattctccctccagcagctcccggcgccccctccggcctccgccggggccattgacggcgcccagcaccacaaccacgacggggcgggcgtgtgcccggcctgccggggcgcgttcctgttccgcgcccagcggatcgacccgctgcggggcgccttcctcgagatccctgccggcgtagcggccggcgacgaggacgcggagagcggagggttcgccgatcggatcaagaggatgttgtcggagcgcccgccggacgagttccccccgctgccgcagtcgcccccgatgcagatgccgcactatccgattcgacggaagccgcggaggagaccgagggaggaaggaggaggaggaggcggcggcggcggtggcggtaacggcaacggtaacggcggggactcgtcctcgggaggggacggcactagcgcttcgcctaagagggagtggtggggtggagccagcctcggcgatgacctgccgacccctcgggagttgtgccggaggcttgatgagttcgtcatcggccaggccaaggcaaaaaaggtgctatctgtagctgtatacaaccattacaagagaatatataatgcaaatgtacagaaagaatttgctggtaattctgggtttcctgatgctggacatgatgatcaaaatattgtagaaatagataaaagcaatgtactcttgatgggcccaactggctcaggaaaaacattgcttgcgaaaacattagcacgtattgtaaatgttccattcgttatagctgatgcgacatcattaacgcaggctggctatgtaggggaggatgtagagtcgatacttcagaaattgcttgtggctgctgagtataatgttcaggctgcacaacaagggatagtgtacatagatgaaatagataaaataacaaagaagagagtgcaaatgttagtagagatgtatctggagaaggtgttcaacaagcattgttgaaaatcctagaaggaactgttgtcagtattcctgagaaaggatcacgcaagaattctcgcaatgacagtatacaggttacatgctctatatggtctttaatgaatacatgtgccatatatcatatgggttaaatttggattcaattgaatgaaaaaggatctttaaaacgttcttttttacgtcataaggactctgtactacagtacatagtgaacagaggaagtattacctcaaaagcatttcttgacacccagataacagcaacacacgctggttgtgttaaaaatgtgcaaggcataaatattgtactccctccgtcttaaaatatataagggatctagagttcaaaaattgtaccaaaatacaagtattctggagcctccctcctttgtctttttagcagcaaatattgagattcctttttaacttggcatcactcaaacagacactcagtacttaaggaaaataacaactgaagtactccctccatcctaattagtgaaggacaaggtggtcttttgccaggattcttatttcgtctggaaatcgcttggataccttgtatttaaggatggagggagtatatgtttgccactttgtatttgcttatatattatgggcatcgtaaatccatagtggtacttcactgttttcagtgcgacaatacagaatcttttgaatcatgatactgcagatagacacgacagatattctttttatatgtggtggtgcttttgtggacttggaaaagactatttctgaaaggcgccaagattcatccataggatttggggcacccattcgtacgaacatgagaagttctggagctagctgtccaatggttacctcatctttattagaatctgttgaaagtggtgatcttgtaagatatggtctaattccggagttcattggtcgtttgcccattctagttctgacagaaccaaagaattcactttccaaacaatacaggaaaatgtttaacctgaacaaagttaagctgcactttactgatggtgcacttagattgttagctaagaaggcgatagctaaaagcactggtgctcgtggtttaagagccatcttggaaactgttcttttggaggccatgtatgaggttccagacgaaaaaacaggaaatgagcgagttgacgctgttgtggtggatgaggaggcgattggttccgttgataggccaggttgtggggctaaaattctccgaggggatggtgcattggaccagtacataacaagaaccaatgtgatgaatttacaggaaactaacgatggtttggccggggagctcgaggaagcgtacatgctgtctagaattgttagcttgtaatttgaaaggctggggaggaagcgtatatgctgagttctgaccaacttcgtacatcgtgtaacatgtctaccccaacacaggccggctactttttgctcacaaaatcacctgtactctgtctccattcctgttaagctctaacgagcagatagatccggggcaccttttccatgtaaacaggagttgccttttgattgagcaaccgtcctgcggagtaaattgttgcccatttttccccgctgcccccaactgggcagctcgattgtggttgacagagttgtaaagatcatcaatttactgatatgatatgataagaaggagcactttcacaaagcacaccagatcaaatgtagct

SEQ ID NO: 74708 - DNA, 2940 bp, Zea Mays
acttactcctcctccctatctccaccatcctccacctccgcatcgtcgtcctcccctccgggctccggctccgcccccacccacccagccatgttccggaccttcacgaggcttcgggatgcagcggcgccgctagccgcctcggcggtacggcggtgctcaggcgtcagcggccggatccgggccgaggccaattgcccgcgctgcgacgcccacatgtcggtccaattctccctccagcagctcccggcgccccctccggcctccgccggggccattgacggcgcccagcaccacaaccacgacggggcgggcgtgtgcccggcctgccggggcgcgttcctgttccgcgcccagcggatcgacccgctgcggggcgccttcctcgagatccctgccggcgtagcggccggcgacgaggacgcggagagcggagggttcgccgatcggatcaagaggatgttgtcggagcgcccgccggacgagttccccccgctgccgcagtcgcccccgatgcagatgccgcactatccgattcgacggaagccgcggaggagaccgagggaggaaggaggaggaggaggcggcggcggcggtggcggtaacggcaacggtaacggcggggactcgtcctcgggaggggacggcactagcgcttcgcctaagagggagtggtggggtggagccagcctcggcgatgacctgccgacccctcgggagttgtgccggaggcttgatgagttcgtcatcggccaggccaaggcaaaaaaggtgctatctgtagctgtatacaaccattacaagagaatatataatgcaaatgtacagaaagaatttgctggtaattctgggtttcctgatgctggacatgatgatcaaaatattgtagaaatagataaaagcaatgtactcttgatgggcccaactggctcaggaaaaacattgcttgcgaaaacattagcacgtattgtaaatgttccattcgttatagctgatgcgacatcattaacgcaggctggctatgtaggggaggatgtagagtcgatacttcagaaattgcttgtggctgctgagtataatgttcaggctgcacaacaagggatagtgtacatagatgaaatagataaaataacaaagaaggcagagagtgcaaatgttagtagagatgtatctggagaaggtgttcaacaagcattgttgaaaatcctagaaggaactgttgtcagtattcctgagaaaggatcacgcaagaattctcgcaatgacagtatacaggttacatgctctatatggtctttaatgaatacatgtgccatatatcatatgggttaaatttggattcaattgaatgaaaaaggatctttaaaacgttcttttttacgtcataaggactctgtactacagtacatagtgaacagaggaagtattacctcaaaagcatttcttgacacccagataacagcaacacacgctggttgtgttaaaaatgtgcaaggcataaatattgtactccctccgtcttaaaatatataagggatctagagttcaaaaattgtaccaaaatacaagtattctggagcctccctcctttgtctttttagcagcaaatattgagattcctttttaacttggcatcactcaaacagacactcagtacttaaggaaaataacaactgaagtactccctccatcctaattagtgaaggacaaggtggtcttttgccaggattcttatttcgtctggaaatcgcttggataccttgtatttaaggatggagggagtatatgtttgccactttgtatttgcttatatattatgggcatcgtaaatccatagtggtacttcactgttttcagtgcgacaatacagaatcttttgaatcatgatactgcagatagacacgacagatattctttttatatgtggtggtgcttttgtggacttggaaaagactatttctgaaaggcgccaagattcatccataggatttggggcacccattcgtacgaacatgagaagttctggagctagctgtccaatggttacctcatctttattagaatctgttgaaagtggtgatcttgtaagatatggtctaattccggagttcattggtcgtttgcccattctagtaagtttggcagctctgaatgaaggtcagctcgttcaggttctgacagaaccaaagaattcactttccaaacaatacaggaaaatgtttaacctgaacaaagttaagctgcactttactgatggtgcacttagattgttagctaagaaggcgatagctaaaagcactggtgctcgtggtttaagagccatcttggaaactgttcttttggaggccatgtatgaggttccagacgaaaaaacaggaaatgagcgagttgacgctgttgtggtggatgaggaggcgattggttccgttgataggccaggttgtggggctaaaattctccgaggggatggtgcattggaccagtacataacaagaaccaatgtgatgaatttacaggaaactaacgatggtttggccggggagctcgaggaagcgtacatgctgtctagaattgttagcttgtaatttgaaaggctggggaggaagcgtatatgctgagttctgaccaacttcgtacatcgtgtaacatgtctaccccaacacaggccggctactttttgctcacaaaatcacctgtactctgtctccattcctgttaagctctaacgagcagatagatccggggcaccttttccatgtaaacaggagttgccttttgattgagcaaccgtcctgcggagtaaattgttgcccatttttccccgctgcccccaactgggcagctcgattgtggttgacagagttgtaaagatcatcaatttactgatatgatatgataagaaggagcactttcacaaagcacaccagatcaaatgtagct

SEQ ID NO: 74709 - DNA, 2309 bp, Zea Mays
acttactcctcctccctatctccaccatcctccacctccgcatcgtcgtcctcccctccgggctccggctccgcccccacccacccagccatgttccggaccttcacgaggcttcgggatgcagcggcgccgctagccgcctcggcggtacggcggtgctcaggcgtcagcggccggatccgggccgaggccaattgcccgcgctgcgacgcccacatgtcggtccaattctccctccagcagctcccggcgccccctccggcctccgccggggccattgacggcgcccagcaccacaaccacgacggggcgggcgtgtgcccggcctgccggggcgcgttcctgttccgcgcccagcggatcgacccgctgcggggcgccttcctcgagatccctgccggcgtagcggccggcgacgaggacgcggagagcggagggttcgccgatcggatcaagaggatgttgtcggagcgcccgccggacgagttccccccgctgccgcagtcgcccccgatgcagatgccgcactatccgattcgacggaagccgcggaggagaccgagggaggaaggaggaggaggaggcggcggcggcggtggcggtaacggcaacggtaacggcggggactcgtcctcgggaggggacggcactagcgcttcgcctaagagggagtggtggggtggagccagcctcggcgatgacctgccgacccctcgggagttgtgccggaggcttgatgagttcgtcatcggccaggccaaggcaaaaaaggtgctatctgtagctgtatacaaccattacaagagaatatataatgcaaatatttgctggtaattctgggtttcctgatgctggacatgatgatcaaaatattgtagaaatagataaaagcaatgtactcttgatgggcccaactggctcaggaaaaacattgcttgcgaaaacattagcacgtattgtaaatgttccattcgttatagctgatgcgacatcattaacgcaggctggctatgtaggggaggatgtagagtcgatacttcagaaattgcttgtggctgctgagtataatgttcaggctgcacaacaagggatagtgtacatagatgaaatagataaaataacaaagaaggcagagagtgcaaatgttagtagagatgtatctggagaaggtgttcaacaagcattgttgaaaatcctagaaggaactgttgtcagtattcctgagaaaggatcacgcaagaattctcgcaatgacagtatacagatagacacgacagatattctttttatatgtggtggtgcttttgtggacttggaaaagactatttctgaaaggcgccaagattcatccataggatttggggcacccattcgtacgaacatgagaagttctggagctagctgtccaatggttacctcatctttattagaatctgttgaaagtggtgatcttgtaagatatggtctaattccggagttcattggtcgtttgcccattctagtaagtttggcagctctgaatgaaggtcagctcgttcaggttctgacagaaccaaagaattcactttccaaacaatacaggaaaatgtttaacctgaacaaagttaagctgcactttactgatggtgcacttagattgttagctaagaaggcgatagctaaaagcactggtgctcgtggtttaagagccatcttggaaactgttcttttggaggccatgtatgaggttccagacgaaaaaacaggaaatgagcgagttgacgctgttgtggtggatgaggaggcgattggttccgttgataggccaggttgtggggctaaaattctccgaggggatggtgcattggaccagtacataacaagaaccaatgtgatgaatttacaggaaactaacgatggtttggccggggagctcgaggaagcgtacatgctgtctagaattgttagcttgtaatttgaaaggctggggaggaagcgtatatgctgagttctgaccaacttcgtacatcgtgtaacatgtctaccccaacacaggccggctactttttgctcacaaaatcacctgtactctgtctccattcctgttaagctctaacgagcagatagatccggggcaccttttccatgtaaacaggagttgccttttgattgagcaaccgtcctgcggagtaaattgttgcccatttttccccgctgcccccaactgggcagctcgattgtggttgacagagttgtaaagatcatcaatttactgatatgatatgataagaaggagcactttcacaaagcacaccagatcaaatgtagct

SEQ ID NO: 74710 - DNA, 2316 bp, Zea Mays
acttactcctcctccctatctccaccatcctccacctccgcatcgtcgtcctcccctccgggctccggctccgcccccacccacccagccatgttccggaccttcacgaggcttcgggatgcagcggcgccgctagccgcctcggcggtacggcggtgctcaggcgtcagcggccggatccgggccgaggccaattgcccgcgctgcgacgcccacatgtcggtccaattctccctccagcagctcccggcgccccctccggcctccgccggggccattgacggcgcccagcaccacaaccacgacggggcgggcgtgtgcccggcctgccggggcgcgttcctgttccgcgcccagcggatcgacccgctgcggggcgccttcctcgagatccctgccggcgtagcggccggcgacgaggacgcggagagcggagggttcgccgatcggatcaagaggatgttgtcggagcgcccgccggacgagttccccccgctgccgcagtcgcccccgatgcagatgccgcactatccgattcgacggaagccgcggaggagaccgagggaggaaggaggaggaggaggcggcggcggcggtggcggtaacggcaacggtaacggcggggactcgtcctcgggaggggacggcactagcgcttcgcctaagagggagtggtggggtggagccagcctcggcgatgacctgccgacccctcgggagttgtgccggaggcttgatgagttcgtcatcggccaggccaaggcaaaaaaggtgctatctgtagctgtatacaaccattacaagagaatatataatgcaaatgtacagaaagaatttgctggtaattctgggtttcctgatgctggacatgatgatcaaaatattgtagaaatagataaaagcaatgtactcttgatgggcccaactggctcaggaaaaacattgcttgcgaaaacattagcacgtattgtaaatgttccattcgttatagctgatgcgacatcattaacgcaggctggctatgtaggggaggatgtagagtcgatacttcagaaattgcttgtggctgctgagtataatgttcaggctgcacaacaagggatagtgtacatagatgaaatagataaaataacaaagaagagagtgcaaatgttagtagagatgtatctggagaaggtgttcaacaagcattgttgaaaatcctagaaggaactgttgtcagtattcctgagaaaggatcacgcaagaattctcgcaatgacagtatacagatagacacgacagatattctttttatatgtggtggtgcttttgtggacttggaaaagactatttctgaaaggcgccaagattcatccataggatttggggcacccattcgtacgaacatgagaagttctggagctagctgtccaatggttacctcatctttattagaatctgttgaaagtggtgatcttgtaagatatggtctaattccggagttcattggtcgtttgcccattctagtaagtttggcagctctgaatgaaggtcagctcgttcaggttctgacagaaccaaagaattcactttccaaacaatacaggaaaatgtttaacctgaacaaagttaagctgcactttactgatggtgcacttagattgttagctaagaaggcgatagctaaaagcactggtgctcgtggtttaagagccatcttggaaactgttcttttggaggccatgtatgaggttccagacgaaaaaacaggaaatgagcgagttgacgctgttgtggtggatgaggaggcgattggttccgttgataggccaggttgtggggctaaaattctccgaggggatggtgcattggaccagtacataacaagaaccaatgtgatgaatttacaggaaactaacgatggtttggccggggagctcgaggaagcgtacatgctgtctagaattgttagcttgtaatttgaaaggctggggaggaagcgtatatgctgagttctgaccaacttcgtacatcgtgtaacatgtctaccccaacacaggccggctactttttgctcacaaaatcacctgtactctgtctccattcctgttaagctctaacgagcagatagatccggggcaccttttccatgtaaacaggagttgccttttgattgagcaaccgtcctgcggagtaaattgttgcccatttttccccgctgcccccaactgggcagctcgattgtggttgacagagttgtaaagatcatcaatttactgatatgatatgataagaaggagcactttcacaaagcacaccagatcaaatgtagct

SEQ ID NO: 74711 - DNA, 2306 bp, Zea Mays
acttactcctcctccctatctccaccatcctccacctccgcatcgtcgtcctcccctccgggctccggctccgcccccacccacccagccatgttccggaccttcacgaggcttcgggatgcagcggcgccgctagccgcctcggcggtacggcggtgctcaggcgtcagcggccggatccgggccgaggccaattgcccgcgctgcgacgcccacatgtcggtccaattctccctccagcagctcccggcgccccctccggcctccgccggggccattgacggcgcccagcaccacaaccacgacggggcgggcgtgtgcccggcctgccggggcgcgttcctgttccgcgcccagcggatcgacccgctgcggggcgccttcctcgagatccctgccggcgtagcggccggcgacgaggacgcggagagcggagggttcgccgatcggatcaagaggatgttgtcggagcgcccgccggacgagttccccccgctgccgcagtcgcccccgatgcagatgccgcactatccgattcgacggaagccgcggaggagaccgagggaggaaggaggaggaggaggcggcggcggcggtggcggtaacggcaacggtaacggcggggactcgtcctcgggaggggacggcactagcgcttcgcctaagagggagtggtggggtggagccagcctcggcgatgacctgccgacccctcgggagttgtgccggaggcttgatgagttcgtcatcggccaggccaaggcaaaaaaggtgctatctgtagctgtatacaaccattacaagagaatatataatgcaaatgtacagaaagaatttgctggtaattctgggtttcctgatgctggacatgatgatcaaaatattgtagaaatagataaaagcaatgtactcttgatgggcccaactggctcaggaaaaacattgcttgcgaaaacattagcacgtattgtaaatgttccattcgttatagctgatgcgacatcattaacgcaggctggctatgtaggggaggatgtagagtcgatacttcagaaattgcttgtggctgctgagtataatgttcaggctgcacaacaagggatagtgtacatagatgaaatagataaaataacaaagaaggcagagagtgcaaatgttagtagagatgtatctggagaaggtgttcaacaagcattgttgaaaatcctagaaggaactgttgtcagtattcctgagaaaggatcacgcaagaattctcgcaatgacagtatacagatagacacgacagatattctttttatatgtggtggtgcttttgtggacttggaaaagactatttctgaaaggcgccaagattcatccataggatttggggcacccattcgtacgaacatgagaagttctggagctagctgtccaatggttacctcatctttattagaatctgttgaaagtggtgatcttgtaagatatggtctaattccggagttcattggtcgtttgcccattctagtaagtttggcagctctgaatgaaggttctgacagaaccaaagaattcactttccaaacaatacaggaaaatgtttaacctgaacaaagttaagctgcactttactgatggtgcacttagattgttagctaagaaggcgatagctaaaagcactggtgctcgtggtttaagagccatcttggaaactgttcttttggaggccatgtatgaggttccagacgaaaaaacaggaaatgagcgagttgacgctgttgtggtggatgaggaggcgattggttccgttgataggccaggttgtggggctaaaattctccgaggggatggtgcattggaccagtacataacaagaaccaatgtgatgaatttacaggaaactaacgatggtttggccggggagctcgaggaagcgtacatgctgtctagaattgttagcttgtaatttgaaaggctggggaggaagcgtatatgctgagttctgaccaacttcgtacatcgtgtaacatgtctaccccaacacaggccggctactttttgctcacaaaatcacctgtactctgtctccattcctgttaagctctaacgagcagatagatccggggcaccttttccatgtaaacaggagttgccttttgattgagcaaccgtcctgcggagtaaattgttgcccatttttccccgctgcccccaactgggcagctcgattgtggttgacagagttgtaaagatcatcaatttactgatatgatatgataagaaggagcactttcacaaagcacaccagatcaaatgtagct

SEQ ID NO: 74712 - DNA, 2929 bp, Zea Mays
acttactcctcctccctatctccaccatcctccacctccgcatcgtcgtcctcccctccgggctccggctccgcccccacccacccagccatgttccggaccttcacgaggcttcgggatgcagcggcgccgctagccgcctcggcggtacggcggtgctcaggcgtcagcggccggatccgggccgaggccaattgcccgcgctgcgacgcccacatgtcggtccaattctccctccagcagctcccggcgccccctccggcctccgccggggccattgacggcgcccagcaccacaaccacgacggggcgggcgtgtgcccggcctgccggggcgcgttcctgttccgcgcccagcggatcgacccgctgcggggcgccttcctcgagatccctgccggcgtagcggccggcgacgaggacgcggagagcggagggttcgccgatcggatcaagaggatgttgtcggagcgcccgccggacgagttccccccgctgccgcagtcgcccccgatgcagatgccgcactatccgattcgacggaagccgcggaggagaccgagggaggaaggaggaggaggaggcggcggcggcggtggcggtaacggcaacggtaacggcggggactcgtcctcgggaggggacggcactagcgcttcgcctaagagggagtggtggggtggagccagcctcggcgatgacctgccgacccctcgggagttgtgccggaggcttgatgagttcgtcatcggccaggccaaggcaaaaaaggtgctatctgtagctgtatacaaccattacaagagaatatataatgcaaatatttgctggtaattctgggtttcctgatgctggacatgatgatcaaaatattgtagaaatagataaaagcaatgtactcttgatgggcccaactggctcaggaaaaacattgcttgcgaaaacattagcacgtattgtaaatgttccattcgttatagctgatgcgacatcattaacgcaggctggctatgtaggggaggatgtagagtcgatacttcagaaattgcttgtggctgctgagtataatgttcaggctgcacaacaagggatagtgtacatagatgaaatagataaaataacaaagaaggcagagagtgcaaatgttagtagagatgtatctggagaaggtgttcaacaagcattgttgaaaatcctagaaggaactgttgtcagtattcctgagaaaggatcacgcaagaattctcgcaatgacagtatacaggttacatgctctatatggtctttaatgaatacatgtgccatatatcatatgggttaaatttggattcaattgaatgaaaaaggatctttaaaacgttcttttttacgtcataaggactctgtactacagtacatagtgaacagaggaagtattacctcaaaagcatttcttgacacccagataacagcaacacacgctggttgtgttaaaaatgtgcaaggcataaatattgtactccctccgtcttaaaatatataagggatctagagttcaaaaattgtaccaaaatacaagtattctggagcctccctcctttgtctttttagcagcaaatattgagattcctttttaacttggcatcactcaaacagacactcagtacttaaggaaaataacaactgaagtactccctccatcctaattagtgaaggacaaggtggtcttttgccaggattcttatttcgtctggaaatcgcttggataccttgtatttaaggatggagggagtatatgtttgccactttgtatttgcttatatattatgggcatcgtaaatccatagtggtacttcactgttttcagtgcgacaatacagaatcttttgaatcatgatactgcagatagacacgacagatattctttttatatgtggtggtgcttttgtggacttggaaaagactatttctgaaaggcgccaagattcatccataggatttggggcacccattcgtacgaacatgagaagttctggagctagctgtccaatggttacctcatctttattagaatctgttgaaagtggtgatcttgtaagatatggtctaattccggagttcattggtcgtttgcccattctagtaagtttggcagctctgaatgaaggtcagctcgttcaggttctgacagaaccaaagaattcactttccaaacaatacaggaaaatgtttaacctgaacaaagttaagctgcactttactgatggtgcacttagattgttagctaagaaggcgatagctaaaagcactggtgctcgtggtttaagagccatcttggaaactgttcttttggaggccatgtatgaggttccagacgaaaaaacaggaaatgagcgagttgacgctgttgtggtggatgaggaggcgattggttccgttgataggccaggttgtggggctaaaattctccgaggggatggtgcattggaccagtacataacaagaaccaatgtgatgaatttacaggaaactaacgatggtttggccggggagctcgaggaagcgtacatgctgtctagaattgttagcttgtaatttgaaaggctggggaggaagcgtatatgctgagttctgaccaacttcgtacatcgtgtaacatgtctaccccaacacaggccggctactttttgctcacaaaatcacctgtactctgtctccattcctgttaagctctaacgagcagatagatccggggcaccttttccatgtaaacaggagttgccttttgattgagcaaccgtcctgcggagtaaattgttgcccatttttccccgctgcccccaactgggcagctcgattgtggttgacagagttgtaaagatcatcaatttactgatatgatatgataagaaggagcactttcacaaagcacaccagatcaaatgtagct

SEQ ID NO: 74713 - DNA, 2901 bp, Zea Mays
acttactcctcctccctatctccaccatcctccacctccgcatcgtcgtcctcccctccgggctccggctccgcccccacccacccagccatgttccggaccttcacgaggcttcgggatgcagcggcgccgctagccgcctcggcggtacggcggtgctcaggcgtcagcggccggatccgggccgaggccaattgcccgcgctgcgacgcccacatgtcggtccaattctccctccagcagctcccggcgccccctccggcctccgccggggccattgacggcgcccagcaccacaaccacgacggggcgggcgtgtgcccggcctgccggggcgcgttcctgttccgcgcccagcggatcgacccgctgcggggcgccttcctcgagatccctgccggcgtagcggccggcgacgaggacgcggagagcggagggttcgccgatcggatcaagaggatgttgtcggagcgcccgccggacgagttccccccgctgccgcagtcgcccccgatgcagatgccgcactatccgattcgacggaagccgcggaggagaccgagggaggaaggaggaggaggaggcggcggcggcggtggcggtaacggcaacggtaacggcggggactcgtcctcgggaggggacggcactagcgcttcgcctaagagggagtggtggggtggagccagcctcggcgatgacctgccgacccctcgggagttgtgccggaggcttgatgagttcgtcatcggccaggccaaggcaaaaaaggtgctatctgtagctgtatacaaccattacaagagaatatataatgcaaatgtacagaaagaatttgctggtaattctgggtttcctgatgctggacatgatgatcaaaatattgtagaaatagataaaagcaatgtactcttgatgggcccaactggctcaggaaaaacattgcttgcgaaaacattagcacgtattgtaaatgttccattcgttatagctgatgcgacatcattaacgcaggctggctatgtaggggaggatgtagagtcgatacttcagaaattgcttgtggctgctgagtataatgttcaggctgcacaacaagggatagtgtacatagatgaaatagataaaataacaaagaaggcagagagtgcaaatgttagtagagatgtatctggagaaggtgttcaacaagcattgttgaaaatcctagaaggaactgttgtcagtattcctgagaaaggatcacgcaagaattctcgcaatgacagtatacaggttacatgctctatatggtctttaatgaatacatgtgccatatatcatatgggttaaatttggattcaattgaatgaaaaaggatctttaaaacgttcttttttacgtcataaggactctgtactacagtacatagtgaacagaggaagtattacctcaaaagcatttcttgacacccagataacagcaacacacgctggttgtgttaaaaatgtgcaaggcataaatattgtactccctccgtcttaaaatatataagggatctagagttcaaaaattgtaccaaaatacaagtattctggagcctccctcctttgtctttttagcagcaaatattgagattcctttttaacttggcatcactcaaacagacactcagtacttaaggaaaataacaactgaagtactccctccatcctaattagtgaaggacaaggtggtcttttgccaggattcttatttcgtctggaaatcgcttggataccttgtatttaaggatggagggagtatatgtttgccactttgtatttgcttatatattatgggcatcgtaaatccatagtggtacttcactgttttcagtgcgacaatacagaatcttttgaatcatgatactgcagatagacacgacagatattctttttatatgtggtggtgcttttgtggacttggaaaagactatttctgaaaggcgccaagattcatccataggatttggggcacccattcgtacgaacatgagaagttctggagctagctgtccaatggttacctcatctttattagaatctgttgaaagtggtgatcttgtaagatatggtctaattccggagttcattggtcgtttgcccattctagttctgacagaaccaaagaattcactttccaaacaatacaggaaaatgtttaacctgaacaaagttaagctgcactttactgatggtgcacttagattgttagctaagaaggcgatagctaaaagcactggtgctcgtggtttaagagccatcttggaaactgttcttttggaggccatgtatgaggttccagacgaaaaaacaggaaatgagcgagttgacgctgttgtggtggatgaggaggcgattggttccgttgataggccaggttgtggggctaaaattctccgaggggatggtgcattggaccagtacataacaagaaccaatgtgatgaatttacaggaaactaacgatggtttggccggggagctcgaggaagcgtacatgctgtctagaattgttagcttgtaatttgaaaggctggggaggaagcgtatatgctgagttctgaccaacttcgtacatcgtgtaacatgtctaccccaacacaggccggctactttttgctcacaaaatcacctgtactctgtctccattcctgttaagctctaacgagcagatagatccggggcaccttttccatgtaaacaggagttgccttttgattgagcaaccgtcctgcggagtaaattgttgcccatttttccccgctgcccccaactgggcagctcgattgtggttgacagagttgtaaagatcatcaatttactgatatgatatgataagaaggagcactttcacaaagcacaccagatcaaatgtagct

SEQ ID NO: 74714 - DNA, 1671 bp, Zea Mays
ttccttcgattttttgataaatagcataactggttaaccacccagcttagggcttgttcggttattcctacgtcacatggattggattggattgtaaaattttagtagacattttgacttgctatggatttaaactcactcaatcccctccaatccacatggattgagatgaaaccgaacaagcccttattatgcttccgtctgtttccactccggatccgaagtccggacgccgtcagcacgtcctagtgtcccacacaccggcctccacgcagccacgggcatgtgggccctcaacctgaaggccggtgggtcttgcctcacgccgaggcatccccagccggcagcgcggtcgtcgcttgccgccgggatcggctcgctggctgtggggatgaggtggatgcggcagcctgtgcggtggccgaggttggcggtgagcgcgtcggggaggaagggcaacaacggccgagaggacggcgacgagcccaagaacaaggccgcctcttctggaaaaagtgatgcatctactcccagtggagatgcttccaacgaaacaaaccaaaatcagggtgaaccaaaatcaagtgacacgatgtatatacctagcaacttgtcatattggagagatgtgagagcaagctttgtgattccaaagttggtaagaccaaactttctggtctttgctatatcatccgtactataaagtttggcaaaagattttgacaggagcaaacattagatgcaaatagtccagtgcagacaggtcaggatggagcagcatatcgtcttcctcggaagtgggctcattccatccctatgccagagtctggatgtgtgttggtcgccactgaagagcttgatggcaacggaacctttgagaggaccgtcatccttctcctaagactaggttcaagggatgcctacgatgggccgttcggtatcatcctgaaccgtccgctgtacactaagatgaggcatgtgaacccatccttgggcgatcaggcgaccccttttgttgactgttccctcctgttcggaggccctgtggacatgagtatattcctgatgagcgcgggcgatgggagaccgatcaaggggtttgaggaagtggtacccggcatctgcttcggcttcaggactgacctggagaaggccggtgctctgataaagaagggcgcggttaagcctgaggacctcaagttctacgtcgggtactctgcgtgggaccatgaccagctgctgagcgagatcgacgcaggttactgggtggtgacttcgtgcagcacaggcctgatagccgacgcgctgacgacgacggacccctcctgcttgtggaccgaggttttgcagctgatgggaggccagtactcggagctgagccaaaagccgaagcaggatgggatgtagacttggttagtcctagccatctgcgacggtcactgtggctaatctgtacataatttgagtgatcctcggctgctcttagccgtcgtgattgctctgcccgatgtaattgactaattgcgtatgtggactgctttgacttgtttttttatatataatttggttagcatgttggcatctgatgagacgtttgatatttagtactatatgtgtgtgtgtgtgtgtgtgtatgatccagcctgtgcatggttcagaaacagatgtttc

SEQ ID NO: 74715 - DNA, 2778 bp, Zea Mays
ttccttcgattttttgataaatagcataactggttaaccacccagcttagggcttgttcggttattcctacgtcacatggattggattggattgtaaaattttagtagacattttgacttgctatggatttaaactcactcaatcccctccaatccacatggattgagatgaaaccgaacaagcccttattatgcttccgtctgtttccactccggatccgaagtccggacgccgtcagcacgtcctagtgtcccacacaccggcctccacgcagccacgggcatgtgggccctcaacctgaaggccggtgggtcttgcctcacgccgaggcatccccagccggcagcgcggtcgtcgcttgccgccgggatcggctcgctggctgtggggatgaggtggatgcggcagcctgtgcggtggccgaggttggcggtgagcgcgtcggggaggaagggcaacaacggccgagaggacggcgacgagcccaagaacaaggccgcctcttctggaaaaagtgatgcatctactcccagtggagatgcttccaacgaaacaaaccaaaatcagggtgaaccaaaatcaagtgacacgatgtatatacctagcaacttgtcatattggagagatgtgagagcaagctttgtgattccaaagttggtaagaccaaactttctggtctttgctatatcatccgtactataaagtttggcaaaagattttgacaggtacctttaaatcagctcatttagcgattatgtaggaatgttgttagaatctgaaatgaaatttcatagtaactctggctatcatttttcctcagttgcgttcatttgttagtgtcataaaggaaagaagccaatgggtcaatttctgaagattgacttgcacttataacccctaacattgtacctaaatgttacaacctcagaaattgacacatgggactttggaaacataagaatgaccatgatacaaaatgtattttattccctttcagtttttcaacttaatgaatattatttttgtctgttgttccccgtttttagagaaagttgaaatgtgagacttggctgtcctcattcctcaactcctcagttgattgaaacattttctctctctctctctctctctctctctctctctcacactatcatctatgtgctgatcctggacttctttttatggttcttgctgcaatattcattattctagattatttgtctccatcatgtagtgtaacaagatcttcagtgccctatttcttatagatcacaatgtcttaggctatctccagcagatccactatcctcaggggcgatgccgggttcacgtaccctggtgcactggcaacagggtaaaaacgagaaatgctactagctagatacaaattcactataaatatttgctaaatcatttattttcttaagttgtgcactagggtatgtttggagctggcttcgcccctgcctatcacatcacctatcacattttctatttcaaactacactctgcaaacagtgtcatctacctttgttgtcccaattatttttcttttgattgatttacagaccagattctttttttcttctcctttaggccttgttcgtttgtgccggattggtgggtcggaacgattcctaaccggattgcttctctaatttatatgaactttgattagctgaaacgattacgggtgcaatccgacacaaacaaacaaggccttagcaaagcagtagcctcgtctctgcctgaagctaattggtatttttgttaagaagtccctcattacttttttttttgctaatttgttatttgtcatgcatccaaactaggagcaaacattagatgcaaatagtccagtgcagacaggtcaggatggagcagcatatcgtcttcctcggaagtgggctcattccatccctatgccagagtctggatgtgtgttggtcgccactgaagagcttgatggcaacggaacctttgagaggaccgtcatccttctcctaagactaggttcaagggatgcctacgatgggccgttcggtatcatcctgaaccgtccgctgtacactaagatgaggcatgtgaacccatccttgggcgatcaggcgaccccttttgttgactgttccctcctgttcggaggccctgtggacatgagtatattcctgatgagcgcgggcgatgggagaccgatcaaggggtttgaggaagtggtacccggcatctgcttcggcttcaggactgacctggagaaggccggtgctctgataaagaagggcgcggttaagcctgaggacctcaagttctacgtcgggtactctgcgtgggaccatgaccagctgctgagcgagatcgacgcaggttactgggtggtgacttcgtgcagcacaggcctgatagccgacgcgctgacgacgacggacccctcctgcttgtggaccgaggttttgcagctgatgggaggccagtactcggagctgagccaaaagccgaagcaggatgggatgtagacttggttagtcctagccatctgcgacggtcactgtggctaatctgtacataatttgagtgatcctcggctgctcttagccgtcgtgattgctctgcccgatgtaattgactaattgcgtatgtggactgctttgacttgtttttttatatataatttggttagcatgttggcatctgatgagacgtttgatatttagtactatatgtgtgtgtgtgtgtgtgtgtatgatccagcctgtgcatggttcagaaacagatgtttc

SEQ ID NO: 74716 - DNA, 1288 bp, Zea Mays
ctcaatccacccctaaccgaacagggccttatcgcctccgcgctctgatggcctcacaccgcgccacgcagtaaacgaaaagacgggcccactccctcaatcctccgcacgccccttccatggggcagccgcacctcttgccgcagctctccccctccccggtcctctactccctcttctcgccgccggagacgggggccacgccctggcggcggccgctgaaccggggacgggccttccaaccgccgctctcctcgctgcgggagaccaacaaggccacgctccgcaaggccacgcccaacgcccccttccgcctcggggggggcggggggcggcagccccaaggatcgccgccccgccgccgacgacaaggaggacgaggacgagggtcgcggcggcgccggggcactcacagggacgctgatcgcaggagcattactggttggtttcgtaggggggtttggggcggccggttacgtgtacaaggaccagatcaacaccttcctcacgcagttctcggggttccttgacggctatggtccagccggatatgctctgttcgtacttgtatatgcagggttggaggttctcgcaattcccgcaatacctttaaccatgtcagctggtctattatttggtaatgtgactggtacaattattgtttcagtcggtggaacgctagctgcagcggtggccttccttattgctagatactttgccagagagagaattcttaaattggttgaaggaaataagaagtttctggcaattgataaggcaataggtgaaaatgggtttaagttggttgggaatgcttccaggttcatgggcttacgtcagtgccggtgcattcgggcgagctttaatccaagatgagtcggaaattggtttgggaggaaacgaacagctatggacactgggcgttggattattgtttacagccattgctgccgcttatgtaacgaggctcgcaaaggacgctgtaaaggagatcgacgactagaatggtaggattctctaggagaaagggccatctggatagtgtactagcctagcacattgtacatcactggcacctttggtgcgataaaatcttatagaaagccagagcaattttatgaggtaatgtgatctcttgttgttgtggtgtcgattctcattgaacagaaaattcctgtttctgtcaactcattcgcttagacaagctaagaatctaccaaaatcaaagagagccgactttgccgaatctccccctaccagtaatcaccacaagaacatactgtcttcc

SEQ ID NO: 74717 - DNA, 1247 bp, Zea Mays
ggccttatcgcctccgcgctctgatggcctcacaccgcgccacgcagtaaacgaaaagacgggcccactccctcaatcctccgcacgccccttccatggggcagccgcacctcttgccgcagctctccccctccccggtcctctactccctcttctcgccgccggagacgggggccacgccctggcggcggccgctgaaccggggacgggccttccaaccgccgctctcctcgctgcgggagaccaacaaggccacgctccgcaaggccacgcccaacgcccccttccgcctcggggggggcggggggcggcagccccaaggatcgccgccccgccgccgacgacaaggaggacgaggacgagggtcgcggcggcgccggggcactcacagggacgctgatcgcaggagcattactggttggtttcgtaggggggtttggggcggccggttacgtgtacaaggaccagatcaacaccttcctcacgcagttctcggggttccttgacggctatggtccagccggatatgctctgttcgtacttgtatatgcagggttggaggttctcgcaattcccgcaatacctttaaccatgtcagctggtctattatttggtaatgtgactggtacaattattgtttcagtcggtggaacgctagctgcagcggtggccttccttattgctagatactttgccagagagagaattcttaaattggttgaaggaaataagaagtttctggcaattgataaggcaatagttggttgggaatgcttccaggttcatgggcttacgtcagtgccggtgcattcgggcgagctttaatccaagatgagtcggaaattggtttgggaggaaacgaacagctatggacactgggcgttggattattgtttacagccattgctgccgcttatgtaacgaggctcgcaaaggacgctgtaaaggagatcgacgactagaatggtaggattctctaggagaaagggccatctggatagtgtactagcctagcacattgtacatcactggcacctttggtgcgataaaatcttatagaaagccagagcaattttatgaggtaatgtgatctcttgttgttgtggtgtcgattctcattgaacagaaaattcctgtttctgtcaactcattcgcttagacaagctaagaatctaccaaaatcaaagagagccgactttgccgaatctccccctaccagtaatcaccacaagaacatactgtcttcc

SEQ ID NO: 74718 - DNA, 1618 bp, Zea Mays
ggccttatcgcctccgcgctctgatggcctcacaccgcgccacgcagtaaacgaaaagacgggcccactccctcaatcctccgcacgccccttccatggggcagccgcacctcttgccgcagctctccccctccccggtcctctactccctcttctcgccgccggagacgggggccacgccctggcggcggccgctgaaccggggacgggccttccaaccgccgctctcctcgctgcgggagaccaacaaggccacgctccgcaaggccacgcccaacgcccccttccgcctcggggggggcggggggcggcagccccaaggatcgccgccccgccgccgacgacaaggaggacgaggacgagggtcgcggcggcgccggggcactcacagggacgctgatcgcaggagcattactggttggtttcgtaggggggtttggggcggccggttacgtgtacaaggaccagatcaacaccttcctcacgcagttctcggggttccttgacggctatggtccagccggatatgctctgttcgtacttgtatatgcagggttggaggttctcgcaattcccgcaatacctttaaccatgtcagctggtctattatttggtaatgtgactggtacaattattgtttcagtcggtggaacgctagctgcagcggtggccttccttattgctagatactttgccagagagagaattcttaaattggttgaaggaaataagaagtttctggcaattgataaggcaataggtgaaaatgggtttaaggttgttactttgctacgcttgagtcccctgttacctttctcccttgggaactatctatatggccttacttcagtgaagttcttgccgtatgtcttgggcaggttagtttgtctgttgtaatggcatagtttcttctgtatgtttcatatgatgcagtatgttaatgcttttctggaagggttataatttatgtgactaaaggaataaaaattatgactcatcatgagtatcactttcttgttaactatgcttggattggaactttaattttatgagggataatgccaacactacagttgttttctttaaaagccttgtttgctctgatatccactttgtgttgtccccatgcagttggttgggaatgcttccaggttcatgggcttacgtcagtgccggtgcattcgggcgagctttaatccaagatgagtcggaaattggtttgggaggaaacgaacagctatggacactgggcgttggattattgtttacagccattgctgccgcttatgtaacgaggctcgcaaaggacgctgtaaaggagatcgacgactagaatggtaggattctctaggagaaagggccatctggatagtgtactagcctagcacattgtacatcactggcacctttggtgcgataaaatcttatagaaagccagagcaattttatgaggtaatgtgatctcttgttgttgtggtgtcgattctcattgaacagaaaattcctgtttctgtcaactcattcgcttagacaagctaagaatctaccaaaatcaaagagagccgactttgccgaatctccccctaccagtaatcaccacaagaacatactgtcttcc

SEQ ID NO: 74719 - DNA, 1211 bp, Zea Mays
ggccttatcgcctccgcgctctgatggcctcacaccgcgccacgcagtaaacgaaaagacgggcccactccctcaatcctccgcacgccccttccatggggcagccgcacctcttgccgcagctctccccctccccggtcctctactccctcttctcgccgccggagacgggggccacgccctggcggcggccgctgaaccggggacgggccttccaaccgccgctctcctcgctgcgggagaccaacaaggccacgctccgcaaggccacgcccaacgcccccttccgcctcggggggggcggggggcggcagccccaaggatcgccgccccgccgccgacgacaaggaggacgaggacgagggtcgcggcggcgccggggcactcacagggacgctgatcgcaggagcattactggttggtttcgtaggggggtttggggcggccggttacgtgtacaaggaccagatcaacaccttcctcacgcagttctcggggttccttgacggttctcgcaattcccgcaatacctttaaccatgtcagctggtctattatttggtaatgtgactggtacaattattgtttcagtcggtggaacgctagctgcagcggtggccttccttattgctagatactttgccagagagagaattcttaaattggttgaaggaaataagaagtttctggcaattgataaggcaataggtgaaaatgggtttaagttggttgggaatgcttccaggttcatgggcttacgtcagtgccggtgcattcgggcgagctttaatccaagatgagtcggaaattggtttgggaggaaacgaacagctatggacactgggcgttggattattgtttacagccattgctgccgcttatgtaacgaggctcgcaaaggacgctgtaaaggagatcgacgactagaatggtaggattctctaggagaaagggccatctggatagtgtactagcctagcacattgtacatcactggcacctttggtgcgataaaatcttatagaaagccagagcaattttatgaggtaatgtgatctcttgttgttgtggtgtcgattctcattgaacagaaaattcctgtttctgtcaactcattcgcttagacaagctaagaatctaccaaaatcaaagagagccgactttgccgaatctccccctaccagtaatcaccacaagaacatactgtcttcc

SEQ ID NO: 74720 - DNA, 446 bp, Zea Mays
aggcagtgctattctttggcctatagcaagatgagtcggaaattggtttgggaggaaacgaacagctatggacactgggcgttggattattgtttacagccattgctgccgcttatgtaacgaggctcgcaaaggacgctgtaaaggagatcgacgactagaatggtaggattctctaggagaaagggccatctggatagtgtactagcctagcacattgtacatcactggcacctttggtgcgataaaatcttatagaaagccagagcaattttatgaggtaatgtgatctcttgttgttgtggtgtcgattctcattgaacagaaaattcctgtttctgtcaactcattcgcttagacaagctaagaatctaccaaaatcaaagagagccgactttgccgaatctccccctaccagtaatcaccacaagaacatactgtcttcc

SEQ ID NO: 74721 - DNA, 2664 bp, Zea Mays
ggtgaagagtgccggtagagaaagcggagaccaaggatatgtttgatgacgcaaatggaaaatcagaagggctgtcagatgaaacgaagaatgatgatggggagaagagtgtggagaagaaagacaatgaaatcacaaatgagagtggtgatgaaaaaactgatggtgagagtaaggacggtcaagaagagaagcctgatggcgatgccgctcaggaggagcaacctaaaatagaagagaacgtggaagaaaatggagagaaggatcagagctcaaactccaacgaggtatttcctgatggggcccaatcagagcttctgaaggagtcaaatacccagaacggttcattccccacacaggctgcagagtcaaagaatgaaaaggaagtccaagcgttaccgaagtcttcaggcgatgcaaccagctatacctggaaattatgtaatagtagtgcctcaacagattacataccttgccttgacaacgagaaggctatcaagaagcttcgaactaccaaacattatgaacatcgtgagaggcattgccctgaggagcctcctacctgccttgttccactcccagaaggatataaacggccaattgagtggccaaagagcagggacaaggtgattctgtttattctgaattgtacaacaccgaatcatctttagctgaccaagatgcgtgtttgcttattaccacgctgtgctgttttttgcaggtatggtacagcaatgttcctcacactaggcttgcagagtacaaggggcatcaaaattgggttaaggtctcaggtgactatctcttgttccctgggggtgggactcagttcaagaatggtgccctccactatattgatactattcagcaggcactacctgatattgcatggggcaaacgaagccgtgtcatattggatgttggttgtggagttgccagctttggaggctacatgtttgatagagatgcgcttaccatgtcttttgctccaaaagatgagcatgaagctcaagtacaatttgcattagaaaggggaattccagcaatatcagctgtgatgggcaccaagagacttccgtaccccagcagagtctttgatgtcattcattgcgctcgctgcagggtcccttggcacatcgaaggtggcatgcttttgctggaattgaaccgcttgttacgccctggtggttactttgtctggtctgccactcctgtttaccaaaagctcccagaggatgttgagatttggaatgccatgtctactttgacaaagtccatgtgctggaagatggtcaacaagactaaggataagttaaaccaagttggtatggtcatatatcagaaaccaatggacaatatttgctatgagaaaagatctgaaaacagcccgccattgtgcaaggaatctgatgatgcagatgctgcttggaatgtaccgttggaagcatgcatgcacaaactgcctggtggctcaaaagtccgaggatcaaaatggccagagttatggccgcaaaggcttgagaagacccctttctggattgatggttccaaggttggtgtctatggaaagcctgcaaatgaagattttgaggcagataatgcccactggaaacgggttgtaagtaaatcgtatgtgaatggcatgggaattgactggtccaaagtgagaaatgtcatggacatgagagctgtctatggaggttttgctgcagctctgagggaccaaaaggtctgggtcatgaatatcgtgccgatcgattcaccagacacgctgcccatcatctacgagcgcggtttgtttggcatgtaccatgactggtgcgagtctttcagcacttacccaagaacgtatgaccttctgcacgcggaccatctgttctcaaagctcagaaagagatgcaaactggctgcagttttcgccgaggtcgaccgtgtactgaggccacagggcaagctgatcgtgagggacaccgcggacacgataaatgagctggagagcatggccaagtccgtgcagtgggaggtgcggatgacctacaccaagggcagcgagggcctgctctgcgtcgagaagtcgatgtggcggcccaaagaactcgacgctagcacgtgaactgtgttgaggaggaactgctaccacgtaggggtgaaattagaggaattttgtcttctagatatgcgtatggctcttgttggtgctgaaaggaccagaaaatatttggtgtaactgtagaacaatacatctgttttttctgccgtttgttttcgtttttgttttttcacaacgttgctgtaagttagtgctggaaatcacaggtacattcagttctactgggcacgttgttggcttgtcggatagcagtcgaacgatcttgtgctgcatatgttatatttgaactgttgtgcatctcgaatgttcagttctttcccaaaggtcagggtaagagtacgtggagaggagagcagcgaatggtggagcgacgaggcaaatgaatccgggacgacggtgacgtgtgaagcgagaagatttgttggagcgccggaaacgtccgaagtttgggggcgccccatggacgcacgccacaaaaacgtttggaattcggaaacgtctggaactcagggtgcagcgtttccctcgttgattcattcattcagcgtgaggag

SEQ ID NO: 74722 - DNA, 3367 bp, Zea Mays
cactaacacaaacaggttgcactccactctcccacctccactgcgctgcccgcctgcctttataacgcggcgagcccagtgcggggaggcagagaacccaaggacgcgcctcgcctcgagatccactcggagggccaccgcgaccgctccggtcggttccggcgaggtaccagcctaccgcctccgcattgctgctccgttccctctctccttgcacccgcttgctggcgtggatccagcggagctggtcccgtccttccccgccgatgagctagcgaacgaggaggcgagcgaggtgccgcgcggtcgtaagtcgtaacagcatacacagggcagacaaagctgcgattttgggggggctgttggtccagccgtggttgttggtggagataaaccacgtgaaggctggtgctctggtacatgttcgccaggcactgatggcatttggccgaggtggaaagatggacggccgccggccgtcctcatcgtcgtcgtcgtcgtcgttctgcacaaccaccacggtcgtgctctttgtggcgctctgcctagtcggcgcgtggatgatgacctcgtccactgtcttcccgctggagatttcgtccaataagaagccggtggtgaagcaacagcctgcgcctgtcaatttcggggcgtcgcaggaggcatcacctggcattgctggtgaagggtccgagaaatttgaggacaccgacaacaatgatgccacagtcccagaggaaccgaataaacaggatgcttctgagcaagagaatttcaatgagaagcctgaagagaaagagctggaagtgccggtagagaaagcggagaccaaggatatgtttgatgacgcaaatggaaaatcagaagggctgtcagatgaaacgaagaatgatgatggggagaagagtgtggagaagaaagacaatgaaatcacaaatgagagtggtgatgaaaaaactgatggtgagagtaaggacggtcaagaagagaagcctgatggcgatgccgctcaggaggagcaacctaaaatagaagagaacgtggaagaaaatggagagaaggatcagagctcaaactccaacgaggtatttcctgatggggcccaatcagagcttctgaaggagtcaaatacccagaacggttcattccccacacaggctgcagagtcaaagaatgaaaaggaagtccaagcgttaccgaagtcttcaggcgatgcaaccagctatacctggaaattatgtaatagtagtgcctcaacagattacataccttgccttgacaacgagaaggctatcaagaagcttcgaactaccaaacattatgaacatcgtgagaggcattgccctgaggagcctcctacctgccttgttccactcccagaaggatataaacggccaattgagtggccaaagagcagggacaaggtatggtacagcaatgttcctcacactaggcttgcagagtacaaggggcatcaaaattgggttaaggtctcaggtgactatctcttgttccctgggggtgggactcagttcaagaatggtgccctccactatattgatactattcagcaggcactacctgatattgcatggggcaaacgaagccgtgtcatattggatgttggttgtggagttgccagctttggaggctacatgtttgatagagatgcgcttaccatgtcttttgctccaaaagatgagcatgaagctcaagtacaatttgcattagaaaggggaattccagcaatatcagctgtgatgggcaccaagagacttccgtaccccagcagagtctttgatgtcattcattgcgctcgctgcagggtcccttggcacatcgaaggtggcatgcttttgctggaattgaaccgcttgttacgccctggtggttactttgtctggtctgccactcctgtttaccaaaagctcccagaggatgttgagatttggaatgccatgtctactttgacaaagtccatgtgctggaagatggtcaacaagactaaggataagttaaaccaagttggtatggtcatatatcagaaaccaatggacaatatttgctatgagaaaagatctgaaaacagcccgccattgtgcaaggaatctgatgatgcagatgctgcttggaatgtaccgttggaagcatgcatgcacaaactgcctggtggctcaaaagtccgaggatcaaaatggccagagttatggccgcaaaggcttgagaagacccctttctggattgatggttccaaggttggtgtctatggaaagcctgcaaatgaagattttgaggcagataatgcccactggaaacgggttgtaagtaaatcgtatgtgaatggcatgggaattgactggtccaaagtgagaaatgtcatggacatgagagctgtctatggaggttttgctgcagctctgagggaccaaaaggtctgggtcatgaatatcgtgccgatcgattcaccagacacgctgcccatcatctacgagcgcggtttgtttggcatgtaccatgactggtgcgagtctttcagcacttacccaagaacgtatgaccttctgcacgcggaccatctgttctcaaagctcagaaagagatgcaaactggctgcagttttcgccgaggtcgaccgtgtactgaggccacagggcaagctgatcgtgagggacaccgcggacacgataaatgagctggagagcatggccaagtccgtgcagtgggaggtgcggatgacctacaccaagggcagcgagggcctgctctgcgtcgagaagtcgatgtggcggcccaaagaactcgacgctagcacgtgaactgtgttgaggaggaactgctaccacgtaggggtgaaattagaggaattttgtcttctagatatgcgtatggctcttgttggtgctgaaaggaccagaaaatatttggtgtaactgtagaacaatacatctgttttttctgccgtttgttttcgtttttgttttttcacaacgttgctgtaagttagtgctggaaatcacaggtacattcagttctactgggcacgttgttggcttgtcggatagcagtcgaacgatcttgtgctgcatatgttatatttgaactgttgtgcatctcgaatgttcagttctttcccaaaggtcagggtaagagtacgtggagaggagagcagcgaatggtggagcgacgaggcaaatgaatccgggacgacggtgacgtgtgaagcgagaagatttgttggagcgccggaaacgtccgaagtttgggggcgccccatggacgcacgccacaaaaacgtttggaattcggaaacgtctggaactcagggtgcagcgtttccctcgttgattcattcattcagcgtgaggag

SEQ ID NO: 74723 - DNA, 3227 bp, Zea Mays
cactaacacaaacaggttgcactccactctcccacctccactgcgctgcccgcctgcctttataacgcggcgagcccagtgcggggaggcagagaacccaaggacgcgcctcgcctcgagatccactcggagggccaccgcgaccgctccggtcggttccggcgaggtgccgcgcggtcgtaagtcgtaacagcatacacagggcagacaaagctgcgattttgggggggctgttggtccagccgtggttgttggtggagataaaccacgtgaaggctggtgctctggtacatgttcgccaggcactgatggcatttggccgaggtggaaagatggacggccgccggccgtcctcatcgtcgtcgtcgtcgtcgttctgcacaaccaccacggtcgtgctctttgtggcgctctgcctagtcggcgcgtggatgatgacctcgtccactgtcttcccgctggagatttcgtccaataagaagccggtggtgaagcaacagcctgcgcctgtcaatttcggggcgtcgcaggaggcatcacctggcattgctggtgaagggtccgagaaatttgaggacaccgacaacaatgatgccacagtcccagaggaaccgaataaacaggatgcttctgagcaagagaatttcaatgagaagcctgaagagaaagagctggaagtgccggtagagaaagcggagaccaaggatatgtttgatgacgcaaatggaaaatcagaagggctgtcagatgaaacgaagaatgatgatggggagaagagtgtggagaagaaagacaatgaaatcacaaatgagagtggtgatgaaaaaactgatggtgagagtaaggacggtcaagaagagaagcctgatggcgatgccgctcaggaggagcaacctaaaatagaagagaacgtggaagaaaatggagagaaggatcagagctcaaactccaacgaggtatttcctgatggggcccaatcagagcttctgaaggagtcaaatacccagaacggttcattccccacacaggctgcagagtcaaagaatgaaaaggaagtccaagcgttaccgaagtcttcaggcgatgcaaccagctatacctggaaattatgtaatagtagtgcctcaacagattacataccttgccttgacaacgagaaggctatcaagaagcttcgaactaccaaacattatgaacatcgtgagaggcattgccctgaggagcctcctacctgccttgttccactcccagaaggatataaacggccaattgagtggccaaagagcagggacaaggtatggtacagcaatgttcctcacactaggcttgcagagtacaaggggcatcaaaattgggttaaggtctcaggtgactatctcttgttccctgggggtgggactcagttcaagaatggtgccctccactatattgatactattcagcaggcactacctgatattgcatggggcaaacgaagccgtgtcatattggatgttggttgtggagttgccagctttggaggctacatgtttgatagagatgcgcttaccatgtcttttgctccaaaagatgagcatgaagctcaagtacaatttgcattagaaaggggaattccagcaatatcagctgtgatgggcaccaagagacttccgtaccccagcagagtctttgatgtcattcattgcgctcgctgcagggtcccttggcacatcgaaggtggcatgcttttgctggaattgaaccgcttgttacgccctggtggttactttgtctggtctgccactcctgtttaccaaaagctcccagaggatgttgagatttggaatgccatgtctactttgacaaagtccatgtgctggaagatggtcaacaagactaaggataagttaaaccaagttggtatggtcatatatcagaaaccaatggacaatatttgctatgagaaaagatctgaaaacagcccgccattgtgcaaggaatctgatgatgcagatgctgcttggaatgtaccgttggaagcatgcatgcacaaactgcctggtggctcaaaagtccgaggatcaaaatggccagagttatggccgcaaaggcttgagaagacccctttctggattgatggttccaaggttggtgtctatggaaagcctgcaaatgaagattttgaggcagataatgcccactggaaacgggttgtaagtaaatcgtatgtgaatggcatgggaattgactggtccaaagtgagaaatgtcatggacatgagagctgtctatggaggctctgagggaccaaaaggtctgggtcatgaatatcgtgccgatcgattcaccagacacgctgcccatcatctacgagcgcggtttgtttggcatgtaccatgactggtgcgagtctttcagcacttacccaagaacgtatgaccttctgcacgcggaccatctgttctcaaagctcagaaagagatgcaaactggctgcagttttcgccgaggtcgaccgtgtactgaggccacagggcaagctgatcgtgagggacaccgcggacacgataaatgagctggagagcatggccaagtccgtgcagtgggaggtgcggatgacctacaccaagggcagcgagggcctgctctgcgtcgagaagtcgatgtggcggcccaaagaactcgacgctagcacgtgaactgtgttgaggaggaactgctaccacgtaggggtgaaattagaggaattttgtcttctagatatgcgtatggctcttgttggtgctgaaaggaccagaaaatatttggtgtaactgtagaacaatacatctgttttttctgccgtttgttttcgtttttgttttttcacaacgttgctgtaagttagtgctggaaatcacaggtacattcagttctactgggcacgttgttggcttgtcggatagcagtcgaacgatcttgtgctgcatatgttatatttgaactgttgtgcatctcgaatgttcagttctttcccaaaggtcagggtaagagtacgtggagaggagagcagcgaatggtggagcgacgaggcaaatgaatccgggacgacggtgacgtgtgaagcgagaagatttgttggagcgccggaaacgtccgaagtttgggggcgccccatggacgcacgccacaaaaacgtttggaattcggaaacgtctggaactcagggtgcagcgtttccctcgttgattcattcattcagcgtgaggag

SEQ ID NO: 74724 - DNA, 3741 bp, Zea Mays
cactaacacaaacaggttgcactccactctcccacctccactgcgctgcccgcctgcctttataacgcggcgagcccagtgcggggaggcagagaacccaaggacgcgcctcgcctcgagatccactcggagggccaccgcgaccgctccggtcggttccggcgaggtaccagcctaccgcctccgcattgctgctccgttccctctctccttgcacccgcttgctggcgtggatccagcggagctggtcccgtccttccccgccgatgagctagcgaacgaggaggcgagcgaggtgctggattatttagctgtttcttcttcttcttttttctggatggaatccgccatttattagtgcgggttctgcgcccagctgagagctagtagctcaattggaaggtgccgtagctctccgcggaaggagcaggacgggggggttttaatgcccgcgctttactgaatttctttccatgcttggccttacggggtgatttctccgcgttcttttcttcaaagagacgctgtagtaggaaacaagatgctaatagcaccaatccgggaccgtcctttcggtgtcgcttgagtagatctccgtttccttctctagatccagcagcttgatttaaacccgcagcgatttagtttcttttttgtggtttgcttcaggtgccgcgcggtcgtaagtcgtaacagcatacacagggcagacaaagctgcgattttgggggggctgttggtccagccgtggttgttggtggagataaaccacgtgaaggctggtgctctggtacatgttcgccaggcactgatggcatttggccgaggtggaaagatggacggccgccggccgtcctcatcgtcgtcgtcgtcgtcgttctgcacaaccaccacggtcgtgctctttgtggcgctctgcctagtcggcgcgtggatgatgacctcgtccactgtcttcccgctggagatttcgtccaataagaagccggtggtgaagcaacagcctgcgcctgtcaatttcggggcgtcgcaggaggcatcacctggcattgctggtgaagggtccgagaaatttgaggacaccgacaacaatgatgccacagtcccagaggaaccgaataaacaggatgcttctgagcaagagaatttcaatgagaagcctgaagagaaagagctggaagtgccggtagagaaagcggagaccaaggatatgtttgatgacgcaaatggaaaatcagaagggctgtcagatgaaacgaagaatgatgatggggagaagagtgtggagaagaaagacaatgaaatcacaaatgagagtggtgatgaaaaaactgatggtgagagtaaggacggtcaagaagagaagcctgatggcgatgccgctcaggaggagcaacctaaaatagaagagaacgtggaagaaaatggagagaaggatcagagctcaaactccaacgaggtatttcctgatggggcccaatcagagcttctgaaggagtcaaatacccagaacggttcattccccacacaggctgcagagtcaaagaatgaaaaggaagtccaagcgttaccgaagtcttcaggcgatgcaaccagctatacctggaaattatgtaatagtagtgcctcaacagattacataccttgccttgacaacgagaaggctatcaagaagcttcgaactaccaaacattatgaacatcgtgagaggcattgccctgaggagcctcctacctgccttgttccactcccagaaggatataaacggccaattgagtggccaaagagcagggacaaggtatggtacagcaatgttcctcacactaggcttgcagagtacaaggggcatcaaaattgggttaaggtctcaggtgactatctcttgttccctgggggtgggactcagttcaagaatggtgccctccactatattgatactattcagcaggcactacctgatattgcatggggcaaacgaagccgtgtcatattggatgttggttgtggagttgccagctttggaggctacatgtttgatagagatgcgcttaccatgtcttttgctccaaaagatgagcatgaagctcaagtacaatttgcattagaaaggggaattccagcaatatcagctgtgatgggcaccaagagacttccgtaccccagcagagtctttgatgtcattcattgcgctcgctgcagggtcccttggcacatcgaaggtggcatgcttttgctggaattgaaccgcttgttacgccctggtggttactttgtctggtctgccactcctgtttaccaaaagctcccagaggatgttgagatttggaatgccatgtctactttgacaaagtccatgtgctggaagatggtcaacaagactaaggataagttaaaccaagttggtatggtcatatatcagaaaccaatggacaatatttgctatgagaaaagatctgaaaacagcccgccattgtgcaaggaatctgatgatgcagatgctgcttggaatgtaccgttggaagcatgcatgcacaaactgcctggtggctcaaaagtccgaggatcaaaatggccagagttatggccgcaaaggcttgagaagacccctttctggattgatggttccaaggttggtgtctatggaaagcctgcaaatgaagattttgaggcagataatgcccactggaaacgggttgtaagtaaatcgtatgtgaatggcatgggaattgactggtccaaagtgagaaatgtcatggacatgagagctgtctatggaggttttgctgcagctctgagggaccaaaaggtctgggtcatgaatatcgtgccgatcgattcaccagacacgctgcccatcatctacgagcgcggtttgtttggcatgtaccatgactggtgcgagtctttcagcacttacccaagaacgtatgaccttctgcacgcggaccatctgttctcaaagctcagaaagagatgcaaactggctgcagttttcgccgaggtcgaccgtgtactgaggccacagggcaagctgatcgtgagggacaccgcggacacgataaatgagctggagagcatggccaagtccgtgcagtgggaggtgcggatgacctacaccaagggcagcgagggcctgctctgcgtcgagaagtcgatgtggcggcccaaagaactcgacgctagcacgtgaactgtgttgaggaggaactgctaccacgtaggggtgaaattagaggaattttgtcttctagatatgcgtatggctcttgttggtgctgaaaggaccagaaaatatttggtgtaactgtagaacaatacatctgttttttctgccgtttgttttcgtttttgttttttcacaacgttgctgtaagttagtgctggaaatcacaggtacattcagttctactgggcacgttgttggcttgtcggatagcagtcgaacgatcttgtgctgcatatgttatatttgaactgttgtgcatctcgaatgttcagttctttcccaaaggtcagggtaagagtacgtggagaggagagcagcgaatggtggagcgacgaggcaaatgaatccgggacgacggtgacgtgtgaagcgagaagatttgttggagcgccggaaacgtccgaagtttgggggcgccccatggacgcacgccacaaaaacgtttggaattcggaaacgtctggaactcagggtgcagcgtttccctcgttgattcattcattcagcgtgaggag

SEQ ID NO: 74725 - DNA, 4291 bp, Zea Mays
atgcacgaggaaaaacacaagtcagatatctttctgcaaaataagtacaagagaaaaaccactgctggaaataatattgctacaattaatgatgatgatattgcggaggctcatgctttgggattgggcttggatgttgatgtgacagcggttactccgtctgaccccccctcggacgtggaaggcgctgctgatactccgtctgagaccatctcaagatttcaggggccattattattagagtacaatggaacagcgaggagggctgacgcagactcaactgttccactcaggcatgaggtggtagcctctgatgacagttccaggcagaattttggggattcatgtgactcctcattggatccattatcttctatggaatctagaagaagatcattcatggctaagataacaatggcaccttcacagctccttgctgctcctgtcctccccaagcggtcaaggggtgccacaaaacatggtactgcgctacgacagagccgacgggttgcaggggcaggggtggaatttaacatgcaggatctggagaacagagccacaaaacaagtaatgcggactctgagagtcatcacagagaatgcaagcatcaaccagcaagctgttaaggattatgagaatctttttcagcatcctttaactcaaagtcatgttgaagcgttagcggctctctttggatgggagactccggggaatctcttcccgtaatgtgtttttctttctgggttgtaatttataattgttgtaatggatcctagcaaaattatatgttggaatgtgagaggtttaaattcagctgatcgtcaaaattcagtccggaatctagttctgtcctctaaagctgatgtggtctgtctccaggaaactaaaatgactgtcatttctacaagaaccattcttgcagccttgggttcggatttttgccagttctcctttctaccatcttgtggtgctagtggtgttgtgctggttgcttggaagcgacatctgggagtgactgggttgtctaggattgacagatacagcatttcaatccaattctgcaatgcgcataatcgctgttggtggttaacttgtgtttatggtcctcaaagtaacagtgataagatgttgtttcttcaagaactgagagacgtcagggctgcttgcactggaccctggttgattgctggtgacttcaatctcatctacagggcttcagataaaaataattcaaatattaacagagctatgatggggagatttaggaagttggttgaggacttgagtctcaatgaggttccactttttgggcgcaaatacacgtggtcaaatcagcaagacagtcctgttcttgttaagcttgacagggtcctctgttcagtggagtgggaagacaattttccaaatgtccttcaaagtgctgcctctgaaggctccgaccattgccccttgctgcttggcattagagataataaaatgggtaaaagacgtttctgttttgaagctttttggcccaaattagaaggattccaggatgtcatccaggaggtttgggattctgtggcagctgtaaactgccctttcatgactctgaatttgaaactaaaagccacagctaggaagctgcaatcttggagtgggaagcatgtgggacatgtgaggactcagttggctttggcaaaggaaattctgcatagactagaaatagcgcaggactgcagagctttatccttggctgaaatctggttaagtaatttgctgaaaaagcactccctgtttttatcttcacttcaacggaccattgctagatcgagatcgaggatctcttggcttaaagagggggatgctaataccaaactctttcatatgcactctcgacatcgaaaaaggaggaattttgttgcacaactggtgaatggagaccagattctcactagtcatgatgataaagcagttttggtggacaatttctacgccatacttattggtgaatgtggggatagggagcagactattaatctggaggcgttgcacatgccaactttcaatcttgcacaccttgatgagcctgttacagagcttgaactttggaatacaattaagagtttacctaatgacaaggccccaggtcccgatggtttcactgggcgcttctataaatcttgttggaacattatcaagatggatcttatggctgtagttgctgcggtttggaacaggaagtttgacaatttttgcttgctgaactcggcctacattactttaatcccaaagcatgatggggctgtgcatgtcaaagactttaggccaatcagtttggtgcatagtgctgcaaagttgatcacaaaattattggccaatcggttaagtcaaaagctgaatgatatggtgtctccaatccagagtgccttcattaagggacgtttcattcaggataattttatgttggtccaacaaacggctagacttttccatcaacagaaaaggccacgtcttctcctcaagcttgatattactaaagcttttgattcggtttcttggcctttcctcatcgaagttatgaagtatcttggctttggacaaatttggagggacatcatttgtgggcttctttcctcctctagcactcaggtgcttttgaatgatgatgtggcactcttcttacacccttcggcagcggatattgctataactctagatattttacatctatttggggaagcttcaggtctccgcaacaacgaacaaaagtctaatgtttatcccattcagtgtgggggtgtggagctggaaatggttcaggatcttctcccttgtggcatctcgacctttccgtgtaaatacctggggctgcctctgtccttgaaaaatctcaccaaggttcaggtgcagcctattgtggatagaattgctgatcagctgccaggctggaaagcagatttgatgacaagagcaggccgtaaagtgcaagttcagcatgtgcttaccggaatgcttatttatcttgctatggcagtaaatattccctcttgggctattaatgccattgataaaattagaagaagtttcctttggagagggcgcaaggaggccagaggtggtcactgcctggtggcctggggcagagtctgtagacccctacagctgggcggtcttggcatttctagtcttaaagaacttatctgggccctgcgcatgagatggctttggctccaaaagactgaacctaaccgaccttggtgcagccttcctatccaggttcctgataaagcaagggctttcttctcgatggtgttgacttcaaaggttggtaatggggctaatactttgttctggactgataaatggattcatgggcagaaaattgcagatttggttcctagattatttgatatcattccgaaaaaaatcactaacagaaggacggttcaggaagcattgacagatagaagatggattgctgatatcacaggatcactctcggtgggagtattattggattatcttcatctttggaatttaatttcagattttgagctgctgccagatatagaagataaacatacttttagtattgctgcaaatgggacttattctgctaaggctgcatatgatgcgttgttcatcggggctgtgcatttcggtcactatgaaagagtttggaaaacttgggccccctctaaatgccacttcttcctctggttatcggtgctaaataaatgctggacagcagataggttggcaaagagaggacttgatcatccggagaagtgtccgctttgtgaccaagagtctgaatctttggatcatattttggtttcttgtgtttttgcaagagaattctggttccggctgatgtgcattttcagactacaaaatctggctcctacacctagtacggtgtcttttacgggttggtgggagatgatagacaatggctctggagatatgattatgaagggtgtcaactcccttattgccttgggagcctggattatttggaatcatcggaaccaaattgtctttgatggaatctcccctagtgtttctgcagctctttgtcaggcaagggaggaacaacagttgtgggaaatggcaggagctaagggtctctcctttcttgccgcaaccatcaggggcacctagctgcctggtttatcgctgatgggctggttttgttttcaggatctgtttgctcttgtttttgttttttctcttcttttttctttggtttttttatcccctccggggaggtcttttgtactatggtctattttggaccctcttttcc

SEQ ID NO: 74726 - DNA, 183 bp, Zea Mays
gttcacaatcacaacctccacgaccaacgaggcaacgaccaaacgtccaaacccttccccctccctagctccgtgctccagcgggagtccgcggcggcggtgaagatgattatcccagtgcgctgcttcacctgcggcaagcactgaagtacccaacgcgtcgtgattcgggtacaccgcttg

SEQ ID NO: 74727 - DNA, 1076 bp, Zea Mays
cgttccttagggttttcatttttcgttaggttattgggaacaagtgggatctatacctcgacctcctccaggccgactactcagaaggggatgctctggatgctttggaattgttccgctactgctgcaggcgaatgctcatgacacatgttgacctcattgagaagttgctcaactacaacaccctagagaagaccgagacaagttaagcgagcacatcatgctccaaaaacactactgtttggcagtatcatagagcttaggtagtatgttgtctcttctctatcagtagaaatgggttgtgagtgtgaacatgcttttcaaggacttttcatgcgacagtgcttgttgccacctatgcaacgatgttggatattttaagtgatataattgctaaaagaaagctaatgtatttgtgtgaattgggtcgataatatttcgttgacagatgtgcgtttttggttggactacatttagtgatgcatgctggtacatattttattattgtattctataactctaatcgacatttctgatacataggagatattgctgtctctatatccgaagtattaatattattcaatcacatgcggccgttctggtagacgttctaatgatgtccatcaggcgatggcgttacttgccagtaccagacaaccaaacatcaatcaacgaaagagacttgaaagggcaagggcaatatcgagagtttaccttgagactgtctttgttgcctcgccaactcatcttgagcattgccgtctggtaaggtatcagtccgtggccagaaaaaataggcaacggtggaatacattatgctgctttggttcagccacaaaagaggcaacgttaatgggaatatctaccctaggtatctgttacatgcaatgatcagcgggttttgtttggttgcaaccgaggtgaacagcttggcattgaatcacgactagtggggagcggtaatgatttttcacaagtctgtaacagatgtcacggtgattgattgcagcctattacaaccaaacatagggttatgcaatattataaccaaacataaagttacgtaaaagata

SEQ ID NO: 74728 - DNA, 680 bp, Zea Mays
caactcgcaatcgcaacgcaccgcgcggcgctgccgcatcgagagtttttttttttgccgttctgcttttagggttagcggcccgccccggtgatcgcgggagaagggagcatctgtcgccggagtttggggttgctattttgaggctggaggtgtgcttaaactgggaacatccattaatgctgctttcaaaatggcattggaaacttgggcttcatgggtgaaagagagaattgatttaaggcgaacacatgtattcttccgtacatatgaaccgtctcattggagtggcttaaatcaaaaggtgtgtgaagtaacacaacaacctaccgctgaggccaatggaaatgacaggagagaatttggggatatacttgctggtgttgtggcaaatatgagtgtccctgtgacagtactaaatgtgactttgatgggggcctttagaagtgatgctcatattggactttggagtcatcctaataccatactagattgcagccactggtgccttccaggagttcctgatgcttggaatgagcttgtattttcgcaccttttgactaatgggcccagaacacccgaagacttcgtttggtaccgacagcgaagactccggtcgcctccgctctacgagaagagggggctcgccgttgccagtcgacggcaggcgaagactcttc

SEQ ID NO: 74729 - DNA, 1234 bp, Zea Mays
cgcaatcgcaacgcaccgcgcggcgctgccgcatcgagagtttttttttttgccgttctgcttttagggttagcggcccgccccggtgatcgcgggagaagggagcatctgtcgccggagtttggggttgctattttgaggctggaggtgtgcttaaactgggaacatccattaatgctgctttcaaaatggcattggaaacttgggcttcatgggtgaaagagagaattgatttaaggcgaacacatgtattcttccgtacatatgaaccgtctcattggagtggcttaaatcaaaaggtgtgtgaagtaacacaacaacctaccgctgaggccaatggaaatgacaggagagaatttggggatatacttgctggtgttgtggcaaatatgagtgtccctgtgacagtactaaatgtgactttgatgggggcctttagaagtgatgctcatattggactttggagtcatcctaataccatactagattgcagccactggtgccttccaggagttcctgatgcttggaatgagcttgtattttcgcaccttttgactaatggttggcgagtgccggctagctgactattgacatggactgcacatctccttggacataaagttttgtactccctccgtcccaaattaaaattcgttttactattttagtagattcatacaataataaatgtatgtgttctatatatatgtatagattcattatcatctatatgaatatagacataaaaatctagagatagagctaaaaatgactatggttttggatcggaggagaatctttttctcttttgtctgtttcggcatagaaacacatcacaactgggaacctgtatgtaacaagagttcatttgcaaaaactttggaaattcacaggacgcatttctgcattcaggtgtgcacggttgtgcaatttcgcagtgtcctgcggtgccgtcgaggttggcttgagctgtggccgccgcctgttgaggctcctccgtttccggttacagctgctccgtgttttagttatataaatatacttttaaaagtaaattataagtcgattagctcattgtttttagctttatcgactttagctcctccgtgtatgatagcaggggccaaaaccacttaaaattataccaaattaaacttaagttaagaagtaataagccatgttcctctgagtttatggattgttttaccttattgggtaggctgaaaaaaggaac

SEQ ID NO: 74730 - DNA, 573 bp, Zea Mays
tttttttttgccgttctgcttttagggttagcggcccgccccggtgatcgcgggagaagggagcatctgtcgccggagtttggggttgctattttgaggctggaggtgtgcttaaactgggaacatccattaatgctgctttcaaaatggcattggaaacttgggcttcatgggtgaaagagagaattgatttaaggcgaacacatgtattcttccgtacatatgaaccgtctcattggagtggcttaaatcaaaaggtgtgtgaagtaacacaacaacctaccgctgaggccaatggaaatgacaggagagaatttggggatatacttgctggtgttgtggcaaatatgagtgtccctgtgacagtactaaatgtgactttgatgggggcctttagaagtgatgctcatattggactttggagtcatcctaataccatactagattgcagccactggtgccttccaggagttcctgatgcttggaatgagcttgtattttcgcaccttttgactaatgccaggtctgctgagaagttgatcggtgtggaagtctaagacggatgaattacac

SEQ ID NO: 74731 - DNA, 875 bp, Zea Mays
tttttttttgccgttctgcttttagggttagcggcccgccccggtgatcgcgggagaagggagcatctgtcgccggagtttggggttgctattttgaggctggaggtgtgcttaaactgggaacatccattaatgctgctttcaaaatggcattggaaacttgggcttcatgggtgaaagagagaattgatttaaggcgaacacatgtattcttccgtacatatgaaccgtctcattggagtggcttaaatcaaaaggtgtgtgaagtaacacaacaacctaccgctgaggccaatggaaatgacaggagagaatttggggatatacttgctggtgttgtggcaaatatgagtgtccctgtgacagtactaaatgtgactttgatgggggcctttagaagtgatgctcatattggactttggagtcatcctaataccatactagattgcagccactggtgccttccaggagttcctgatgcttggaatgagcttgtattttcgcaccttttgactaatggttggcgagtgccggctagctgactattgacatggtgtgcacggttgtgcaatttcgcagtgtcctgcggtgccgtcgaggttggcttgagctgtggccgccgcctgttgaggctcctccgtttccggttacagctgctccgtgttttagttatataaatatacttttaaaagtaaattataagtcgattagctcattgtttttagctttatcgactttagctcctccgtgtatgatagcaggggccaaaaccacttaaaattataccaaattaaacttaagttaagaagtaataagccatgttcctctgagtttatggattgttttaccttattgggtaggctgaaaaaaggaac

SEQ ID NO: 74732 - DNA, 2356 bp, Zea Mays
tttttttttgccgttctgcttttagggttagcggcccgccccggtgatcgcgggagaagggagcatctgtcgccggagtttggtgagtgcctggtctgccctggtgccctggcaccctgcatcggctgtcgttgtatttgtcttcccacgaccgactcagagctccctgatctcaagatctcgagagctgcgcgcggactttgggttggagccgtgcgtatcgatccaactccatccgccgggcaaatttgagtcaggaggaaggatattcatcggcgcttctgaattgggaggacgcagcgcatacgagattcgatgagattttgttgggacacagtttcgccgtgaattggttaggagccgatttggcaacagggaagctctcgaatgggagatccagcggcggcagtggcggcggaggggagatggtgagcggaagctttagccggagcacatccgcgcggctcacgtcgaggggtggagtcgggagcccgcgtgtctcgactcctggagccgtgcaccggaactggtggccgccggcgccgtcggggccgtcgttcgatcgcgtcgtcttggcctttttcctggcctccgtcgcgctcgtgctctcctgcgctctctacctctacgtattccggtacttgggccggagccgtgtggtcgcggagttcgccggcgagaatctcgagtcctgcgacgtgttcgacggcgtctgggtgccggatcagaggcaccccttgtacaacagttcgcagtgcccatttgcagagagggggttcaattgcctggccaatgggcggaaggacaccgagtacctcaagtggcggtggaagcctcggggatgcgatttgccgcggttcagtgcccgggctctgttgcagtggctgagagggaagagggtcgtgtttgtgggggactccatgagtcgaacgcagtgggagtccttcatttgcatgctcatgacaggggtggatgatccagagacggtttatgaggttaatggcaaccagatctcaaagacaatccagtttttaggagtgagatttgagtccttcaacctcagtgtggagttcttccggtccgttttccttgtgcagcagatccctgcgcttcgccatgggcgcagaagggtccgtgccatcctgaagcttgataagttggatggtttaagtcaggaatgggtgaactcagatgttcttattttcaactcagggcattggtggactgccagcaaattatttgacatgggttgctattttgaggctggaggtgtgcttaaactgggaacatccattaatgctgctttcaaaatggcattggaaacttgggcttcatgggtgaaagagagaattgatttaaggcgaacacatgtattcttccgtacatatgaaccgtctcattggagtggcttaaatcaaaaggtgtgtgaagtaacacaacaacctaccgctgaggccaatggaaatgacaggagagaatttggggatatacttgctggtgttgtggcaaatatgagtgtccctgtgacagtactaaatgtgactttgatgggggcctttagaagtgatgctcatattggactttggagtcatcctaataccatactagattgcagccactggtgccttccaggagttcctgatgcttggaatgagcttgtattttcgcaccttttgactaatggttggcgagtgccggctagctgactattgacatggactgcacatctccttggacataaagttttgtactccctccgtcccaaattaaaattcgttttactattttagtagattcatacaataataaatgtatgtgttctatatatatgtatagattcattatcatctatatgaatatagacataaaaatctagagatagagctaaaaatgactatggttttggatcggaggagaatctttttctcttttgtctgtttcggcatagaaacacatcacaactgggaacctgtatgtaacaagagttcatttgcaaaaactttggaaattcacaggacgcatttctgcattcaggtgtgcacggttgtgcaatttcgcagtgtcctgcggtgccgtcgaggttggcttgagctgtggccgccgcctgttgaggctcctccgtttccggttacagctgctccgtgttttagttatataaatatacttttaaaagtaaattataagtcgattagctcattgtttttagctttatcgactttagctcctccgtgtatgatagcaggggccaaaaccacttaaaattataccaaattaaacttaagttaagaagtaataagccatgttcctctgagtttatggattgttttaccttattgggtaggctgaaaaaaggaac

SEQ ID NO: 74733 - DNA, 1872 bp, Zea Mays
ctcgacgcttgtcgcgaaacagaaaacaggcaaaccacacacccaggacggtggacggacacccgcgccgccgccgccatggccgacgccgccgcagcagcagcacggcgcctccgcgccttcaagcggtggatgcgcgcgcacggcgtcgtctgcagcgacgcgctcagcctcgacgtctccgatcccctcggcgtccacgtgcgcgcggccacgccgctacgcgacggagaccttgtcgccaccatcccgcgcggagcgtgcctcaccccgcgcaccaccggtgccgcggcagccatcgaggcagccgagctcggcggatgcctcgcgctcacggtcgccgtcatgtacgagcgcgcacaaggcgccgactcgccgtgggacgcctacctccaactgcttcccgactgcgagtccgtgccgctcgtgtggcccgctggcgaggcagagtgcctactcgccggcactgagctagacaagattgtgaagcaagacaaggaattcctttgtgaggattggaaagaatgcatcgagcccctcatgttatctggagagctggatgttgacccagatgattttagcttggagaaatatttatctgcaaaaactcttgtttcttcaaggtccttccagatagatagctatcatggatctggaatggttccattggctgacctatgcctcagactcagatggtgaagaagaagaagatgatcgaagtgatgcttctgctgatgacaaaccgactacaaaaaatcccacaagtagtcctccaggttcgagagctaacgacgaagatttggaaataatcattgttagagatgtcaatgaaggggaggaggtatttctctgttgccatcattccgttggctagaggctgtggtgcaaaggtgtataatacatatggaacgatggggaatgctgctttgcttcacagatatggtttcacagaacttgacaatcaatacgacattgtcaacattgatttagcattggttactaagtggtgcacatccatattctccggtcgacatacaagagcaagggtatcactatggcgtaatctgggttattctgggtgcactagccaagataccgagtactttgagattgcatatgatggagagccccagcttgaactctcaatcctcctttacatcatcaacatgaaacctgatgtttatgacaagctgatctgcgtggcccatggtttcgttagtgacgaagagcatgagactatctgtaacgtgttcaagtttgtcaaagcaacaagctccaaccaaaattctgaagtcaatggcctcgagaaactgcctgatgtgaagaagttattgcatagtgagagcgtttgttcggcgcttctatcactcgctgacatgagggaaagcctctatggttcgaacactttggaagatgacgaggaagagcttcacgcatgctgcgttgtcaacgaaaggaagctctaccattctctggttttgcgggtgagtgagagaaggatacttcgtagattgagggagtttgcctctagtgggtcaaagggccggaagaggaagcacccctagtgtttaagcaatattctgcgggtcaggcttggtattcctgaacaccatgctcaataaaggtatggtgacgttctgcaattctgctgctcttgtaatggaatactaacatttttaggaacaataactacatacaggcatgctttgttttctttaagtagattagatacttgagatttacgacgtgggggacattatgtgttggtttgcgtggtaacaaacatttggacaagaaaaatccacaagaggttctctctcagtctctatagaaaataaatgtgcggacgtaccaatgtgctaaaaagtacac

SEQ ID NO: 74734 - DNA, 1500 bp, Zea Mays
ctcgacgcttgtcgcgaaacagaaaacaggcaaaccacacacccaggacggtggacggacacccgcgccgccgccgccatggccgacgccgccgcagcagcagcacgattgtgaagcaagacaaggaattcctttgtgaggattggaaagaatgcatcgagcccctcatgttatctggagagctggatgttgacccagatgattttagcttggagaaatatttatctgcaaaaactcttgtttcttcaaggtccttccagatagatagctatcatggatctggaatggttccattggctgaccttttcaatcacaagactgattgtgaacacgtgcatttcacgtctgcatcagatgcctcagactcagatggtgaagaagaagaagatgatcgaagtgatgcttctgctgatgacaaaccgactacaaaaaatcccacaagtagtcctccaggttcgagagctaacgacgaagatttggaaataatcattgttagagatgtcaatgaaggggaggaggtgtataatacatatggaacgatggggaatgctgctttgcttcacagatatggtttcacagaacttgacaatcaatacgacattgtcaacattgatttagcattggttactaagtggtgcacatccatattctccggtcgacatacaagagcaagggtatcactatggcgtaatctgggttattctgggtgcactagccaagataccgagtactttgagattgcatatgatggagagccccagcttgaactctcaatcctcctttacatcatcaacatgaaacctgatgtttatgacaagctgatctgcgtggcccatggtttcgttagtgacgaagagcatgagactatctgtaacgtgttcaagtttgtcaaagcaacaagctccaaccaaaattctgaagtcaatggcctcgagaaactgcctgatgtgaagaagttattgcatagtgagagcgtttgttcggcgcttctatcactcgctgacatgagggaaagcctctatggttcgaacactttggaagatgacgaggaagagcttcacgcatgctgcgttgtcaacgaaaggaagctctaccattctctggttttgcgggtgagtgagagaaggatacttcgtagattgagggagtttgcctctagtgggtcaaagggccggaagaggaagcacccctagtgtttaagcaatattctgcgggtcaggcttggtattcctgaacaccatgctcaataaaggtatggtgacgttctgcaattctgctgctcttgtaatggaatactaacatttttaggaacaataactacatacaggcatgctttgttttctttaagtagattagatacttgagatttacgacgtgggggacattatgtgttggtttgcgtggtaacaaacatttggacaagaaaaatccacaagaggttctctctcagtctctatagaaaataaatgtgcggacgtaccaatgtgctaaaaagtacac

SEQ ID NO: 74735 - DNA, 1827 bp, Zea Mays
ctcgacgcttgtcgcgaaacagaaaacaggcaaaccacacacccaggacggtggacggacacccgcgccgccgccgccatggccgacgccgccgcagcagcagcacggcgcctccgcgccttcaagcggtggatgcgcgcgcacggcgtcgtctgcagcgacgcgctcagcctcgacgtctccgatcccctcggcgtccacgtgcgcgcggccacgccgctacgcgacggagaccttgtcgccaccatcccgcgcggagcgtgcctcaccccgcgcaccaccggtgccgcggcagccatcgaggcagccgagctcggcggatgcctcgcgctcacggtcgccgtcatgtacgagcgcgcacaaggcgccgactcgccgtgggacgcctacctccaactgcttcccgactgcgagtccgtgccgctcgtgtggcccgctggcgaggcagagtgcctactcgccggcactgagctagacaagacagattgtgaagcaagacaaggaattcctttgtgaggattggaaagaatgcatcgagcccctcatgttatctggagagctggatgttgacccagatgattttagcttggagaaatatttatctgcaaaaactcttgtttcttcaaggtccttccagatagatagctatcatggatctggaatggttccattggctgacctatgcctcagactcagatggtgaagaagaagaagatgatcgaagtgatgcttctgctgatgacaaaccgactacaaaaaatcccacaagtagtcctccaggttcgagagctaacgacgaagatttggaaataatcattgttagagatgtcaatgaaggggaggaggtgtataatacatatggaacgatggggaatgctgctttgcttcacagatatggtttcacagaacttgacaatcaatacgacattgtcaacattgatttagcattggttactaagtggtgcacatccatattctccggtcgacatacaagagcaagggtatcactatggcgtaatctgggttattctgggtgcactagccaagataccgagtactttgagattgcatatgatggagagccccagcttgaactctcaatcctcctttacatcatcaacatgaaacctgatgtttatgacaagctgatctgcgtggcccatggtttcgttagtgacgaagagcatgagactatctgtaacgtgttcaagtttgtcaaagcaacaagctccaaccaaaattctgaagtcaatggcctcgagaaactgcctgatgtgaagaagttattgcatagtgagagcgtttgttcggcgcttctatcactcgctgacatgagggaaagcctctatggttcgaacactttggaagatgacgaggaagagcttcacgcatgctgcgttgtcaacgaaaggaagctctaccattctctggttttgcgggtgagtgagagaaggatacttcgtagattgagggagtttgcctctagtgggtcaaagggccggaagaggaagcacccctagtgtttaagcaatattctgcgggtcaggcttggtattcctgaacaccatgctcaataaaggtatggtgacgttctgcaattctgctgctcttgtaatggaatactaacatttttaggaacaataactacatacaggcatgctttgttttctttaagtagattagatacttgagatttacgacgtgggggacattatgtgttggtttgcgtggtaacaaacatttggacaagaaaaatccacaagaggttctctctcagtctctatagaaaataaatgtgcggacgtaccaatgtgctaaaaagtacac

SEQ ID NO: 74736 - DNA, 1469 bp, Zea Mays
cgcctgtcctacgtgtctatatttttgaatcccactctgctgaaacactgtttcgcacatctatttaggcctaccgattgtgaagcaagacaaggaattcctttgtgaggattggaaagaatgcatcgagcccctcatgttatctggagagctggatgttgacccagatgattttagcttggagaaatatttatctgcaaaaactcttgtttcttcaaggtccttccagatagatagctatcatggatctggaatggttccattggctgaccttttcaatcacaagactgattgtgaacacgtgcatttcacgtctgcatcagatgcctcagactcagatggtgaagaagaagaagatgatcgaagtgatgcttctgctgatgacaaaccgactacaaaaaatcccacaagtagtcctccaggttcgagagctaacgacgaagatttggaaataatcattgttagagatgtcaatgaaggggaggaggtgtataatacatatggaacgatggggaatgctgctttgcttcacagatatggtttcacagaacttgacaatcaatacgacattgtcaacattgatttagcattggttactaagtggtgcacatccatattctccggtcgacatacaagagcaagggtatcactatggcgtaatctgggttattctgggtgcactagccaagataccgagtactttgagattgcatatgatggagagccccagcttgaactctcaatcctcctttacatcatcaacatgaaacctgatgtttatgacaagctgatctgcgtggcccatggtttcgttagtgacgaagagcatgagactatctgtaacgtgttcaagtttgtcaaagcaacaagctccaaccaaaattctgaagtcaatggcctcgagaaactgcctgatgtgaagaagttattgcatagtgagagcgtttgttcggcgcttctatcactcgctgacatgagggaaagcctctatggttcgaacactttggaagatgacgaggaagagcttcacgcatgctgcgttgtcaacgaaaggaagctctaccattctctggttttgcgggtgagtgagagaaggatacttcgtagattgagggagtttgcctctagtgggtcaaagggccggaagaggaagcacccctagtgtttaagcaatattctgcgggtcaggcttggtattcctgaacaccatgctcaataaaggtatggtgacgttctgcaattctgctgctcttgtaatggaatactaacatttttaggaacaataactacatacaggcatgctttgttttctttaagtagattagatacttgagatttacgacgtgggggacattatgtgttggtttgcgtggtaacaaacatttggacaagaaaaatccacaagaggttctctctcagtctctatagaaaataaatgtgcggacgtaccaatgtgctaaaaagtacac

SEQ ID NO: 74737 - DNA, 1768 bp, Zea Mays
ccgctattctttttatttatgctcgtctaaactaaacacagtgtgtaaatttacaaacagaaatgtttaccgctggtgcagaaaaggtctgatgcagagcactggttgtggctgatgatgtttgtagtagctggttcagtcttctggacatgatgcttggattgctctgactgtagtctgtctgaggtttccctcccggatgatcctgaataagctctgatcatgcagctcaagtaccccgctccgggcgccccggacctggccctgcggaccaaagggctcctggagcaagccgggttcggccccgtgaaggaggaccacagccgcgggctggaccacggcgcctgggtgccgctgatgctcatgtacccggacgccgacatccccgtgtgccagctgtcggtgcagagcgaccgggacggcgcgtaccactacagcctcggcagggcgctggcgccgctgcgggaggagggcgtcctcgtcctcggctccggcagcgccacgcacaacctgcgcaagatggggccgttcgacgcgcccgtgccgcagtgggccgccgagttcgacgcctggctcaaggactcgctcctcgacggaaggtacgaggacgtgaaccggttcgaggagaaagcgccgcatgggagggtggcgcacccgtggccggaccacttctacccgctgcacgtggcgctcggcgccgccggggacggcgcaaaggcggagcagatccaccagtgctggaccaacgccacgctctcctacgcgtcctacaggttcaccaccaagagctgacgcgcccgtgcagctgtcgggtggaggaccgccacccccctcccccccggggccagctgctgaattcgtgggaagcacatccgtcgacgtgcgcgacagcattcatatacacgcaccgcatgtagaaatgtgtttttctcaataaactcccgagtgccgatcgcggtagatatgtcttgcattgttcaacgcagcagcttgtttcgagaagcattctgttgttaaatctcattccatcatcattgtcttcaagtggtgcatattacggagtacgtgtctttttgcccttctcaccgttctgctgcttgctttgtgaacttctcatcctcgatgtcattttttttcttccaaaagtcagcaagagaattgccgagtaaattcatcagagagcaagcaaagaaaaccatggtaggtaagagaaagggcacaatttctcccattttctgaaccatttttttctagtcgccaggttgaacagattgatgtcgtccttgatgacaagggctaattgaagatgttgcaaagatatatgctctggactactctccttccagacattctgcctaaaatagagtaatagaccaagattttgcaatcgaattcctttcactcttcttttcggatcgtgcgtctctctttcgtccaaaatctgtagatcgatcttgatatgtctagattttgcaattgtcttaagtcaaaccatggtaggatcatttaccagacttctctggtgtaagagcagtttgtgcatagatgcttgggtgtttcctattggaccaagcatagtttgcacaaagggtcatttatccatcatcttttgtttatttttctgatgcagcaaggtccacacaaagaatctacacctcggttctgcttttgcctttcagattgggcatagatccgttcttgtgtaacttcatttgaataaagtacacaattttagcaggagtagcagtgccttaaatcagtgttcttt

SEQ ID NO: 74738 - DNA, 816 bp, Zea Mays
gtgaaaggcaggtcaggtgcaccgctcgccacctctatatatagctgcaacgcaccagcccatccatcccaactatcccgatcccgtcgaccctgccacatacagcctcgtttgagctctagactcgagagaggcggatagggagaggcagcaccgcagggagcagtgacagagaggccgagcgagagagagagatggacgtggagaggaaggtggtggaggcggacgacgacggccgcgtcagaacagtccgccgtgtccttgtcccgacgaggcgtagatttctccatgcctcagaatgttcctatggtgtggtggggggtagcaaggccgtcagctcgttgagtaattcgccgcagttgctctacacgtccatggcgacatgaagatggagttgctctactctggatagggtcgacgtgagctggtgctggtgctgatcgtctttctccgtttccacagctggggagacgtgggggatttcagttgccagcatataggaagcatgcgcttctcgtctttttagacatcaggcccttcccgtttctctcttgcatttccgccatctttacaccgcaccttctagcttttggtgctaactactagcaaggtgaagatgacggttgatggagccacaaacacttacatgcatagttcaaaatttaatgaatcgagttcccatttaataatagctcgtgcgctaagcctgacacacgcacatccatcatataatttttgaaaataaatacataaataaattttaacatactctcttgatgttttctgcaatgctgcaaggcttgcaagtaagaaatg

SEQ ID NO: 74739 - DNA, 1772 bp, Zea Mays
aacagggtgtgttaagctgtctccaggacggtgtggacggcgacgacgcacgccatcaccgccgtgataggctccggcgtgctggcgctgccctggagcgtggcgcagatgggctgggtcctcggccccgtcgccctcgtcggctgcgcctacatcacctacttcaccgccgtcctcctgtccgactgctaccgcacgccggaccccgtccacggcaaacggaaccgcacctacatggacgtcgtccgctcatgcctcgggcctagagatgtggtggtgtgtggactcgcacagtacgcgatcctctgggggacaatggtgggctacaccatcaccactgccacgagcatcatggccgtcgcgcgcacggactgccgccaccacaggggccacgacgcggcctgcgcctcgtccgggacggtgtacatggtggcgttcggcgtcgtcgaggtggtcctgtcccagttcccgagcctggagaagctcacgatcatctccgtggtcgctgccgtcatgtcgtgcacctactccttcgtcgggctgttcctgagcgccgccaagctcgcgtcgaaccacggggcgcgcggcagcctcctcggcgtcaagatcgccgcgggcgtctccgcgtcgaccaagacgtggcactcactgcaggcactcggcaacgttgccttcgcgtacacctactccatgcttctcatagaaatccaggacactgtgaaggcaccgccatcagagaacgtgacgatgaagagggccagcttctacggcatcagcgtgacgaccatcttctacgtctcgctcgggtgcatcggctacgcggccttcggcaacgccgcgccggggaacgtgcttaccggcttcgacgagccgttctggctcgtcgacgtcgccaacatcgccgtggtcgtccacttggttggggcatatcaggtgtacgcgcagccgatcttcgcgtgctacgagaagtggctggggtcccggtggccggactcggccttcttccaccacgagtacgcggtgcgcctgcccggctgcgcggtgcggttcacgatgtgcaagctggtgctgcgcacggcgttcgtggccgccacgacggtggtgtcgctgatgctgcccttcttcaacgccgtgctcgggctgctgggcgccatcgccttctggccgctgacggtgtacttcccggtgaccatgtacatcgcgcaggccaaggtggcgcccggcagccgcaagtgggtggcgctgcaggcgctcaatgtgggcgcgctcctggtttcgctgctcgccgccgtgggctccgtggccgacatggtgcagcgcctgggccatgtcaccatctttcagacgcagctctgaaacaagtattcagatcttatgcatgggaacgcgcttgcagaggcatacatcatacacatgcttgtgccgtatattcacctgtgatcttagtacattggttttggaagaacaactaaaaatggagcatgtaagtcattccacctagatttcgtgcattgcaagagtgctttttggggtgaaatagcagacagtgcacactccatgacacatttgaagcccagctaagcgttgggctgaattaatgattatgtttcttcaagggaaaaatagcacttcacatttttactctttcgttggcccttgagaaatgacataaattttaatcattcgttggcccttgacaaacgacatttgaattttaacctttcgttgggccttgataaatggcaatataatggcttccgtggtcaaccgag

SEQ ID NO: 74740 - DNA, 3972 bp, Zea Mays
gggggacggcgtgttgaccggacccgggccaccccgtggatgcgcaacttggtgctgtggtgcagcacaaactaataacagaaagtccaaggtggaggtgggtcccacgtgcagcgacgcagccgccgcgcggggcgagaaccctagacacgggacaacgaggtcgagccgagcgcatcgtttattactgcaacaacaacaactggttccccccctccctccctccgttattgctgattcttcccgcaccggcctcagcctgccctctctctctctctctctctctctcccccttccttcctcgagcagctccacgcgcgacgccatcccaatgctctccacgcctcattggaccccaggaagcaatcgcgctgatcggggccgccgcctagcggtgccgtgcgggttagggcgcgaggctggcgctagctcgagctcgcggctgccgcaaggtcggtggctgggtccaggcgcctcccgtccggtggccgcagccctaatcgctgcctaggtgctggaaaggtgaggagtatgtcctcgatacgatttggatttgttagaagccagctcctctgttctgaacagaagatggacatcagacacaatgggaaatgggtgcaactgcaaggagaacagattaacatcacatcagtggtcagcaacaagatccattaacaccacgcaaggtccacaaaagcctttaggtgcagcttactactctccatctcactatttacgtttcactacattatgtacagtcatccaactgttgccatgcgcccatacttgcctgctccaccaactgatgctccaatctcatccttgcacctcccagacgcagtaacctccattgttccaccaccgttgctacccccacccccacgtccgtctcccttgcgtggactagcacactttctgcagatgaaattttcagggacttcctcaaaatcacttatcccagagcacctggtatgctgccagactccacatatgtcacaagctagcatccgttccccatcatcatccttggccccacatgagcagtccaccgtccagttctccaaacccctctccatcctgaactgtacaattctcctgtaatccccagtgcaacgtccccttactcgaagcaactggcctgatccaagcacatgcttcacgggggttgtatcactgaagtttggaaagtcagggagctgttcagtctggaagctttggaacatcaggtacgtttcttggaaagcctttgaagcctgtactttcagatcacctagggtagcacttgctggtagaagtacaagttcttctggaggtgtcgtgtaatcttttgggtgatcaagcagttcaatggagcacctcacacagagcaggaatggatttgaaggagtccgcagagcatgctcatcataatgtttgatgaactgcttgcaatcaattatctttgctgctgcgctgtgtgctgatgcaccaaccacctctggttgtgaagacaacatggactccgggttcagcaaagcatcgtagaggaaccttagatcatgcaacagttggtcaacagaaggtccaaatgtagctgcatttgctggagaccgaacggaggaagattccagcctgtactcgattgcactagtaccggcattgcaacggacagcaacacaaaggccattatccagttgtttcccacccagtcctcggagagaataatcaagcagctcttgcgaatcaacagccttcgacgcagcacccctcagtgcccgccaagatacccactgtccagtttggacgacctggagaaccttgagcattgcaccttctgctctatgtagatcttctttagtccatgcacacagctcattagatgtaagctccttgtgcttgtctgctgagggttttgacatcttttgaccttgatggaggaggtgcataatgaagcggaaaagatcccggagggttactagttggcgattagagagcgcccaataaagagcgattgtgttctgcaatggagtcctaatttggctgcggtgcgagaagtacagcgccaggtttatgctggaaagcatgtctactgcatttcggtaggtgtctgaggtgagagcaaagctgccggcaccaaacttgtatccccattggccgtaccaagggtgcccacttatgactgcatgaagaagtctgtagtccattccatgtttcttggatatatccatgacagttaccttcctgcagtaatggaaatgatagttattaggttggagaaaggcatcatggaaagagaccaatcccaatcaaacaactgttatgttctttgggccagcggaaattccatttacctcacatgtaacaccttgcacaggcgatcccacaggctcattatgtcacggccagtgaggaatcttgagccaccttcacgcccatttaccctgagaagatgcccataaccatttgcatgcaccacagcgtgcagcaagtgggtggggtcatccagatgcagcggccatgggtgttccgcagcggaggcagcaggtgcgccggcggccagaaaggtggctactgtcgttctcgatgatgaaatggtaccgcttcacgcagaccgggtgtccactccagcctacaaccaaacaaacaaatcagacgcatgattccattgcagatgccgtgttgttgtatgtaacagtgtgcaagtatatgacaattcaatcaatcattctaacgggcggttgcacactgaaagcaacagcctaacgattgggattggctgatacgacgaaaactagcagatatttcagtgggaaaaaaactgcccgcaaaaatcaataaaatttctaagaaataagacagtcgttggatttcaaaaacttaaatcgacgacaagaaaacagtaacagaggagcagatcgtaagaagaaaaaaacgaacgggttcgtccattgaatccaaaacaaaaaaaaatcggaggaaaaaaggacgaaaaagtgaggaaagcaactcacccacgactctgcactggtcacaatacacagatcgggatcggagcacatcctcctcaacgacgttgagctctaccccgccgccgctctcttcctccccggcctccccgacccttagggacaccctccagatcagcaggtgcggcggggcggccgcggccgccggagagaagatggacggcaacgggagcagcctcgcatgctttgcgaggaaccctctcaccgcctccctgaacgtcccggccgccccgcagtctccggccgccgggaacctcgcgaagtccctggcctcgacccgcgccctcgccctcttcagcggccggccgttgaccaccatctccccctccgccgccgtcgtcagatcccctcagatctgcaacgcaccgtcgtcttcctcgtcgtcgattaaccggatcggaactcaggttagggtttgcggcggcggcggtagctgcgagataacgaggaggatggtgatggggtcgattccttcgaggtgaagcacgatcaggtgcgcctggtctttgtgcaccagaggggacggagcaaatgtcgggcccacgtaatcgtgcgtggcgtacagtggagtgggtctatgcatgctatggtggaatgggctcgtcaggtcgtggcagagcgctaaccagggttaatcgtgggtggggtgggtggttgggttcgagagctttccgaaaaggaggcgcgagaaatgggagggaataaaggatcggggcagtgtcgtcattttgtatccatggctcgatgagaggtccagtacggcacatcaaagtgatcctgtgtagggacaaattacacaactgccctcatagtccgtggaccctagaatgcttttatttcgattcgttgtgtacagaccacagaatccctccactcgaaacgtgtccactgtaatctttataggcgactttctcaagtcacagagacaagtgatacggtattttttaagtatacccttctgcaaaca

SEQ ID NO: 74741 - DNA, 4115 bp, Zea Mays
gggggacggcgtgttgaccggacccgggccaccccgtggatgcgcaacttggtgctgtggtgcagcacaaactaataacagaaagtccaaggtggaggtgggtcccacgtgcagcgacgcagccgccgcgcggggcgagaaccctagacacgggacaacgaggtcgagccgagcgcatcgtttattactgcaacaacaacaactggttccccccctccctccctccgttattgctgattcttcccgcaccggcctcagcctgccctctctctctctctctctctctctcccccttccttcctcgagcagctccacgcgcgacgccatcccaatgctctccacgcctcattggaccccaggaagcaatcgcgctgatcggggccgccgcctagcggtgccgtgcgggttagggcgcgaggctggcgctagctcgagctcgcggctgccgcaaggtcggtggctgggtccaggcgcctcccgtccggtggccgcagccctaatcgctgcctaggtgctggaaaggtgaggagtatgtcctcgatacgatttggatttgttagaagccagctcctctgttctggcaccatttgctaggattttgttatggtgtttattaggcagccatgaaaagtctgatatgcttcgaagatggacatcagacacaatgggaaatgggtgcaactgcaaggagaacagattaacatcacatcagtggtcagcaacaagatccattaacaccacgcaaggtccacaaaagcctttaggtgcagcttactactctccatctcactatttacgtttcactacattatgtacagtcatccaactgttgccatgcgcccatacttgcctgctccaccaactgatgctccaatctcatccttgcacctcccagacgcagtaacctccattgttccaccaccgttgctacccccacccccacgtccgtctcccttgcgtggactagcacactttctgcagatgaaattttcagggacttcctcaaaatcacttatcccagagcacctggtatgctgccagactccacatatgtcacaagctagcatccgttccccatcatcatccttggccccacatgagcagtccaccgtccagttctccaaacccctctccatcctgaactgtacaattctcctgtaatccccagtgcaacgtccccttactcgaagcaactggcctgatccaagcacatgcttcacgggggttgtatcactgaagtttggaaagtcagggagctgttcagtctggaagctttggaacatcaggtacgtttcttggaaagcctttgaagcctgtactttcagatcacctagggtagcacttgctggtagaagtacaagttcttctggaggtgtcgtgtaatcttttgggtgatcaagcagttcaatggagcacctcacacagagcaggaatggatttgaaggagtccgcagagcatgctcatcataatgtttgatgaactgcttgcaatcaattatctttgctgctgcgctgtgtgctgatgcaccaaccacctctggttgtgaagacaacatggactccgggttcagcaaagcatcgtagaggaaccttagatcatgcaacagttggtcaacagaaggtccaaatgtagctgcatttgctggagaccgaacggaggaagattccagcctgattgtcatgaaacaatttagccaggaaagtttccggatcaagttcatcaattttatgaagggaaagcaatcagtgctcacctgtactcgattgcactagtaccggcattgcaacggacagcaacacaaaggccattatccagttgtttcccacccagtcctcggagagaataatcaagcagctcttgcgaatcaacagccttcgacgcagcacccctcagtgcccgccaagatacccactgtccagtttggacgacctggagaaccttgagcattgcaccttctgctctatgtagatcttctttagtccatgcacacagctcattagatgtaagctccttgtgcttgtctgctgagggttttgacatcttttgaccttgatggaggaggtgcataatgaagcggaaaagatcccggagggttactagttggcgattagagagcgcccaataaagagcgattgtgttctgcaatggagtcctaatttggctgcggtgcgagaagtacagcgccaggtttatgctggaaagcatgtctactgcatttcggtaggtgtctgaggtgagagcaaagctgccggcaccaaacttgtatccccattggccgtaccaagggtgcccacttatgactgcatgaagaagtctgtagtccattccatgtttcttggatatatccatgacagttaccttcctgcagtaatggaaatgatagttattaggttggagaaaggcatcatggaaagagaccaatcccaatcaaacaactgttatgttctttgggccagcggaaattccatttacctcacatgtaacaccttgcacaggcgatcccacaggctcattatgtcacggccagtgaggaatcttgagccaccttcacgcccatttaccctgagaagatgcccataaccatttgcatgcaccacagcgtgcagcaagtgggtggggtcatccagatgcagcggccatgggtgttccgcagcggaggcagcaggtgcgccggcggccagaaaggtggctactgtcgttctcgatgatgaaatggtaccgcttcacgcagaccgggtgtccactccagcctacaaccaaacaaacaaatcagacgcatgattccattgcagatgccgtgttgttgtatgtaacagtgtgcaagtatatgacaattcaatcaatcattctaacgggcggttgcacactgaaagcaacagcctaacgattgggattggctgatacgacgaaaactagcagatatttcagtgggaaaaaaactgcccgcaaaaatcaataaaatttctaagaaataagacagtcgttggatttcaaaaacttaaatcgacgacaagaaaacagtaacagaggagcagatcgtaagaagaaaaaaacgaacgggttcgtccattgaatccaaaacaaaaaaaaatcggaggaaaaaaggacgaaaaagtgaggaaagcaactcacccacgactctgcactggtcacaatacacagatcgggatcggagcacatcctcctcaacgacgttgagctctaccccgccgccgctctcttcctccccggcctccccgacccttagggacaccctccagatcagcaggtgcggcggggcggccgcggccgccggagagaagatggacggcaacgggagcagcctcgcatgctttgcgaggaaccctctcaccgcctccctgaacgtcccggccgccccgcagtctccggccgccgggaacctcgcgaagtccctggcctcgacccgcgccctcgccctcttcagcggccggccgttgaccaccatctccccctccgccgccgtcgtcagatcccctcagatctgcaacgcaccgtcgtcttcctcgtcgtcgattaaccggatcggaactcaggttagggtttgcggcggcggcggtagctgcgagataacgaggaggatggtgatggggtcgattccttcgaggtgaagcacgatcaggtgcgcctggtctttgtgcaccagaggggacggagcaaatgtcgggcccacgtaatcgtgcgtggcgtacagtggagtgggtctatgcatgctatggtggaatgggctcgtcaggtcgtggcagagcgctaaccagggttaatcgtgggtggggtgggtggttgggttcgagagctttccgaaaaggaggcgcgagaaatgggagggaataaaggatcggggcagtgtcgtcattttgtatccatggctcgatgagaggtccagtacggcacatcaaagtgatcctgtgtagggacaaattacacaactgccctcatagtccgtggaccctagaatgcttttatttcgattcgttgtgtacagaccacagaatccctccactcgaaacgtgtccactgtaatctttataggcgactttctcaagtcacagagacaagtgatacggtattttttaagtatacccttctgcaaaca

SEQ ID NO: 74742 - DNA, 3661 bp, Zea Mays
gggggacggcgtgttgaccggacccgggccaccccgtggatgcgcaacttggtgctgtggtgcagcacaaactaataacagaaagtccaaggtggaggtgggtcccacgtgcagcgacgcagccgccgcgcggggcgagaaccctagacacgggacaacgaggtgctggaaaggtgaggagtatgtcctcgatacgatttggatttgttagaagccagctcctctgttctggcaccatttgctaggattttgttatggtgtttattaggcagccatgaaaagtctgatatgcttcgaacagaagatggacatcagacacaatgggaaatgggtgcaactgcaaggagaacagattaacatcacatcagtggtcagcaacaagatccattaacaccacgcaaggtccacaaaagcctttaggtgcagcttactactctccatctcactatttacgtttcactacattatgtacagtcatccaactgttgccatgcgcccatacttgcctgctccaccaactgatgctccaatctcatccttgcacctcccagacgcagtaacctccattgttccaccaccgttgctacccccacccccacgtccgtctcccttgcgtggactagcacactttctgcagatgaaattttcagggacttcctcaaaatcacttatcccagagcacctggtatgctgccagactccacatatgtcacaagctagcatccgttccccatcatcatccttggccccacatgagcagtccaccgtccagttctccaaacccctctccatcctgaactgtacaattctcctgtaatccccagtgcaacgtccccttactcgaagcaactggcctgatccaagcacatgcttcacgggggttgtatcactgaagtttggaaagtcagggagctgttcagtctggaagctttggaacatcaggtacgtttcttggaaagcctttgaagcctgtactttcagatcacctagggtagcacttgctggtagaagtacaagttcttctggaggtgtcgtgtaatcttttgggtgatcaagcagttcaatggagcacctcacacagagcaggaatggatttgaaggagtccgcagagcatgctcatcataatgtttgatgaactgcttgcaatcaattatctttgctgctgcgctgtgtgctgatgcaccaaccacctctggttgtgaagacaacatggactccgggttcagcaaagcatcgtagaggaaccttagatcatgcaacagttggtcaacagaaggtccaaatgtagctgcatttgctggagaccgaacggaggaagattccagcctgattgtcatgaaacaatttagccaggaaagtttccggatcaagttcatcaattttatgaagggaaagcaatcagtgctcacctgtactcgattgcactagtaccggcattgcaacggacagcaacacaaaggccattatccagttgtttcccacccagtcctcggagagaataatcaagcagctcttgcgaatcaacagccttcgacgcagcacccctcagtgcccgccaagatacccactgtccagtttggacgacctggagaaccttgagcattgcaccttctgctctatgtagatcttctttagtccatgcacacagctcattagatgtaagctccttgtgcttgtctgctgagggttttgacatcttttgaccttgatggaggaggtgcataatgaagcggaaaagatcccggagggttactagttggcgattagagagcgcccaataaagagcgattgtgttctgcaatggagtcctaatttggctgcggtgcgagaagtacagcgccaggtttatgctggaaagcatgtctactgcatttcggtaggtgtctgaggtgagagcaaagctgccggcaccaaacttgtatccccattggccgtaccaagggtgcccacttatgactgcatgaagaagtctgtagtccattccatgtttcttggatatatccatgacagttaccttcctcacatgtaacaccttgcacaggcgatcccacaggctcattatgtcacggccagtgaggaatcttgagccaccttcacgcccatttaccctgagaagatgcccataaccatttgcatgcaccacagcgtgcagcaagtgggtggggtcatccagatgcagcggccatgggtgttccgcagcggaggcagcaggtgcgccggcggccagaaaggtggctactgtcgttctcgatgatgaaatggtaccgcttcacgcagaccgggtgtccactccagcctacaaccaaacaaacaaatcagacgcatgattccattgcagatgccgtgttgttgtatgtaacagtgtgcaagtatatgacaattcaatcaatcattctaacgggcggttgcacactgaaagcaacagcctaacgattgggattggctgatacgacgaaaactagcagatatttcagtgggaaaaaaactgcccgcaaaaatcaataaaatttctaagaaataagacagtcgttggatttcaaaaacttaaatcgacgacaagaaaacagtaacagaggagcagatcgtaagaagaaaaaaacgaacgggttcgtccattgaatccaaaacaaaaaaaaatcggaggaaaaaaggacgaaaaagtgaggaaagcaactcacccacgactctgcactggtcacaatacacagatcgggatcggagcacatcctcctcaacgacgttgagctctaccccgccgccgctctcttcctccccggcctccccgacccttagggacaccctccagatcagcaggtgcggcggggcggccgcggccgccggagagaagatggacggcaacgggagcagcctcgcatgctttgcgaggaaccctctcaccgcctccctgaacgtcccggccgccccgcagtctccggccgccgggaacctcgcgaagtccctggcctcgacccgcgccctcgccctcttcagcggccggccgttgaccaccatctccccctccgccgccgtcgtcagatcccctcagatctgcaacgcaccgtcgtcttcctcgtcgtcgattaaccggatcggaactcaggttagggtttgcggcggcggcggtagctgcgagataacgaggaggatggtgatggggtcgattccttcgaggtgaagcacgatcaggtgcgcctggtctttgtgcaccagaggggacggagcaaatgtcgggcccacgtaatcgtgcgtggcgtacagtggagtgggtctatgcatgctatggtggaatgggctcgtcaggtcgtggcagagcgctaaccagggttaatcgtgggtggggtgggtggttgggttcgagagctttccgaaaaggaggcgcgagaaatgggagggaataaaggatcggggcagtgtcgtcattttgtatccatggctcgatgagaggtccagtacggcacatcaaagtgatcctgtgtagggacaaattacacaactgccctcatagtccgtggaccctagaatgcttttatttcgattcgttgtgtacagaccacagaatccctccactcgaaacgtgtccactgtaatctttataggcgactttctcaagtcacagagacaagtgatacggtattttttaagtatacccttctgcaaaca

SEQ ID NO: 74743 - DNA, 1853 bp, Zea Mays
atggtggggtggtcctgcacttgcgatgggatgcaggccgatggtggtcctgtgcgctggatggcgacaaggggattgtgttgcgattccttccatggcggcgaggcgtggattgtgtttggggcgcggaagatatgggtggggcatccgtggtgcatgggaataatgattaggcggggtggtcctgcgcgtcgtcggctatgggattcctcggggcattcccgcaaggacctgtcaggtagggacggcgccccgtcgaagcccaccaagccccgggtgttcttcctcgacgtcaatcctctatgcttccgcggctcccaacgcaacctcggggccttcgcgcgctggctggcgctcttcttcgcgcacgtcagcctccgtgaccctgtcgttgttttggacggcgatggagggaacgagtactggaggcgggtgctgccttcgtacaaatcgcatagggctcgcggcgttggcactggcgctgacacgcgcgtcgtcaacgttctctgcgaatgcaatgtcccggttgtaagagtcgatggatatgaggctgatgatgtggtggctaccttgacagaacaggttctacagaaaggttacagagttttcaaagcctcaccagataaagacttcaagcagctaatgtctgatgacgtacagttagcagtcatgcccattcctgagattggccgatggtcttttagagggcccgttatggccaaatatgtctttgatattgccataccttatttttgggtcgtgctccgccactgtttctatacattaaggcagtatgttgctcaatacaagtgtgatccaactgcagacttaagccttaggtgcttcatgggtgatgaagcagatggtgttccaggaatccagcacttggttctgggatttggcagaaagactgcacttaaactactgcaaaaacatggttcattagaaaacttgctaaacacagctgcaattagaactgtcggcaaaggttatgcccaagatgctctcactaagcacgcagattacttacggtgaaattatgaagttcttagcctgaagagggatgtaaatgttcagtttgatgatagttggctatccacgaggaacacaagcaatgacacctatgttctagcggacttcattcttaaacttaatggcgaaggcagaagctaaacagctggtacactgaaatatttgaacaagctggactgttcctcaccagacacatgatttaacaagaagacagatgcataaaggttggagggggcagttgctggaaaaaatgtgcatacaacatactatatatccttgctccaaagtagtagccatcactcatcacacatgagtacatgacaaattcttgcttgtgttgtggaactggacactgaagtagcctacctgtgttgaagctgggtggaaaatagaggtttggagggtctgtctttggtggatacatgcgtacatggtgtccggaacaaagttatgaacagccaaaaacaagctgtcatggtactactactagctgtagcctgtaaactgcacagacaccttgccaggagattacagatggatgcttcatgcttcagtagcaactcgttgatgtatattgcatgcaatttagaaacaatatatgtcccaatgtatttgtcaggaagcatctttaaatcattagcgactccagggtttcatgaatccaggctagatcattataatgtatatttactggcatcggatattgttttactattccctcatttttttatctgtcacattttagttcaaaaataaagtatcgagcaacaaatattcgagaacggatttagtacaattttatttactctatgtaatacatg

SEQ ID NO: 74744 - DNA, 1823 bp, Zea Mays
atggtggggtggtcctgcacttgcgatgggatgcaggccgatggtggtcctgtgcgctggatggcgacaaggggattgtgttgcgattccttccatggcggcgaggcgtggattgtgtttggggcgcggaagatatgggtggggcatccgtggtgcatgggaataatgattaggcggggtggtcctgcgcgtcgtcggctatgggattcctcggggcattcccgcaaggacctgtcaggtagggacggcgccccgtcgaagcccaccaagccccgggtgttcttcctcgacgtcaatcctctatgcttccgcggctcccaacgcaacctcggggccttcgcgcgctggctggcgctcttcttcgcgcacgtcagcctccgtgaccctgtcgttgttttggacggcgatggagggaacgagtactggaggcgggtgctgccttcgtacaaatcgcatagggctcgcggcgttggcactggcgctgacacgcgcgtcgtcaacgttctctgcgaatgcaatgtcccggttgtaagagtcgatggatatgaggctgatgatgtggtggctaccttgacagaacaggttctacagaaaggttacagagttttcaaagcctcaccagataaagacttcaagcagctaatgtctgatgacgtacagttagcagtcatgcccattcctgagattggccgatggtcttttagagggcccgttatggccaaatatgtctttgatattgccataccttatttttgggtcgtgctccgccactgtttctatacattaaggcagtatgttgctcaatacaagtgtgatccaactgcagacttaagccttaggtgcttcatgggtgatgaagcagatggtgttccaggaatccagcacttggttctgggatttggcagaaagactgcacttaaactactgcaaaaacatggttcattagaaaacttgctaaacacagctgcaattagaactgtcggcaaaggttatgcccaagatgctctcactaagcacgcagattacttacgggatgtaaatgttcagtttgatgatagttggctatccacgaggaacacaagcaatgacacctatgttctagcggacttcattcttaaacttaatggcgaaggcagaagctaaacagctggtacactgaaatatttgaacaagctggactgttcctcaccagacacatgatttaacaagaagacagatgcataaaggttggagggggcagttgctggaaaaaatgtgcatacaacatactatatatccttgctccaaagtagtagccatcactcatcacacatgagtacatgacaaattcttgcttgtgttgtggaactggacactgaagtagcctacctgtgttgaagctgggtggaaaatagaggtttggagggtctgtctttggtggatacatgcgtacatggtgtccggaacaaagttatgaacagccaaaaacaagctgtcatggtactactactagctgtagcctgtaaactgcacagacaccttgccaggagattacagatggatgcttcatgcttcagtagcaactcgttgatgtatattgcatgcaatttagaaacaatatatgtcccaatgtatttgtcaggaagcatctttaaatcattagcgactccagggtttcatgaatccaggctagatcattataatgtatatttactggcatcggatattgttttactattccctcatttttttatctgtcacattttagttcaaaaataaagtatcgagcaacaaatattcgagaacggatttagtacaattttatttactctatgtaatacatg

SEQ ID NO: 74745 - DNA, 2555 bp, Zea Mays
atcagcctcatcacttacccggtgggcactggaggattagggtttggttgaagagggagcaacgaaatggggggcttttgctccaaggagtcggccgtcgacaagtcaccaagcgacactacgctcggcccaggcagggtggtcgaccaccatgaccgtctagtggtgaaggaggagaagaaagctgtggtgggggaggctgctgccaagaggattcaagaagagcaacatcaacagcagcggcagccagcgccgccaccgctgcacgtatcggtgtcgcggactgcagtgcctggagcttccgcagataccactgcagcaccatgggatggggtaccaccactggcacggttgccatcgctgaagtcggggatgggtgtggcgaataaggtttcggaagtaagctcaattctgggtagagctagtactgctggccttggaaaagcagtggaagtgcttgatacacttggcagtagcatgacagatttgaatataagtagttttggatcaggcactgcaacaaagggcaacaaaatatctattttagcatttgaggttgccaataccatagtcaaaggttgcaatctaatgcatgccctttcaaaagatagcataaagtacttaaaagaaacggttctgcactctgaaggtgttcagaatcttatatccaaagatatggatgaattactcaagattgttgctgctgacaaaagggaagagttgaaagtgttttctacagaagttgttcgctttggaaattgttgcaaggatcctcagtggcacaatttgaaccgctactttgataagctggcatcagaactgactcctcaacatcaattgaaagaagaggcagaatcagtaatgcaggagttcgtgacttctgttcagtttacagctgaactataccatgaaatgcatgccctggatagatttcaacaagattatcagcgtaaacagcatgaagaagatggttcaagtgttgtgcaaagaggtgataacatgcacatactaaagcaggaagtgaaaagccaacacaagcatgttaaaagtttgaggaaaaagtctctgtggtctaagaatttggaagaggtcatgggaaagcttgtggacattgtgcacttcttacatttggagatccataatgcatttgggctttcagacagtgaagaatcacaggaacctaccaagcgacgcaatagattgggttcagcaggccttgcactgcattacgccaatatcatcagtcagatcgatactcttgtttctcgtgcaagctccgttccttcaaatacaagggatacattataccaaagtttgccaccaaccataaagtcatctctccgttctaagctacactcctttggagtcaaggaagagcttactgtttctcaaatcaaggctgaaatggagaagaccctgcgatggcttgcccctattgcaagtaacaccaccaaggctcatcatggtttcggttgggttggagagtgggcaagtaccggatgtgaactgcaagccaactgggcagctggacctgacccgaattgagacactgtaccatgctgacaaggacaagactgaagcatatatcctcgagcttgttattaggcttcatcatcttatcagtcaaactaaaactgctaatggtgagaggtctccaatcaagtctcctgtccagtctcctacacaaagaggggcctcaatcacattgtctccgaacataaaaaacagcaattcatcacctcttctgacgcaagatgaccaagacatgctaagtgatgtcaagtacaggacatttatccctggtataagcaaaagccaagagtttgacactaaggaaagacataataatcaaagcaggttaagcaaaagtaacagccattcaccaagcagtggcaaccggaaagaggcgctatcgatctcgatcaggaggctgcttcctgtgatcgactttgagatcgaccggacaaaagccctcgatgtgattgatagagttgacgatctgagagtacaatgatgaacctagattaatcaatgccaaagtctgaaaaatgcaccctcagtctatgatccagaaaatcaagattgcttgaggccctgttcggttgttccggattagagccccggattaattcctagccggattacttctctaatttatatagattttgatgagctggaatgaatcctggcttattccggtacaaccgaacaggccctgaaggataccagtaatcgctgagctaaattggcatgctgtcagagtgtcagtattgcagcaaggtagtgagataaccggcatcatggtgccagtttgatggcaccattagggttagagatggtggccatgggcgcatgtcctggccaactttgtatgatatatggcagggtgaataggaaagtaaaattgtattgtaaaaagggatttcttctgtttgttagcgcatgtacaaggaatgcaagttttgagcgagggggcatcaaagatctggctgtgtttccagctgtttttgttagccccatcgaatccttgacataatgatcccgcttaaataagc

SEQ ID NO: 74746 - DNA, 2678 bp, Zea Mays
atggggggcttttgctccaaggagtcggccgtcgacaagtcaccaagcgacactacgctcggcccaggcagggtggtcgaccaccatgaccgtctagtggtgaaggaggagaagaaagctgtggtgggggaggctgctgccaagaggattcaagaagagcaacatcaacagcagcggcagccagcgccgccaccgctgcacgtatcggtgtcgcggactgcagtgcctggagcttccgcagataccactgcagcaccatgggatggggtaccaccactggcacggttgccatcgctgaagtcggggatgggtgtggcgaataaggtttcggaagtaagctcaattctgggtagagctagtactgctggccttggaaaagcagtggaagtgcttgatacacttggcagtagcatgacagatttgaatataagtagttttggatcaggcactgcaacaaagggcaacaaaatatctattttagcatttgaggttgccaataccatagtcaaaggttgcaatctaatgcatgccctttcaaaagatagcataaagtacttaaaagaaacggttctgcactctgaaggtgttcagaatcttatatccaaagatatggatgaattactcaagattgttgctgctgacaaaagggaagagttgaaagtgttttctacagaagttgttcgctttggaaattgttgcaaggatcctcagtggcacaatttgaaccgctactttgataagctggcatcagaactgactcctcaacatcaattgaaagaagaggcagaatcagtaatgcaggagttcgtgacttctgttcagtttacagctgaactataccatgaaatgcatgccctggatagatttcaacaagattatcagcgtaaacagcatgaagaagatggttcaagtgttgtgcaaagaggtgataacatgcacatactaaagcaggaagtgaaaagccaacacaagcatgttaaaagtttgaggaaaaagtctctgtggtctaagaatttggaagaggtcatgggaaagcttgtggacattgtgcacttcttacatttggagatccataatgcatttgggctttcagacagtgaagaatcacaggaacctaccaagcgacgcaatagattgggttcagcaggccttgcactgcattacgccaatatcatcagtcagatcgatactcttgtaagttcacaggctccacttttctgttttctctgtgtcctggatataaaattcagtgtctttcgcttttattggaaaacagttctggtgtgttgctgatgcagttttgtcaatgtcaaacatccattaccccccaatatctaattgaagaaatgcaacttttccacagggatggaggattaaggtttctcgtgcaagctccgttccttcaaatacaagggatacattataccaaagtttgccaccaaccataaagtcatctctccgttctaagctacactcctttggagtcaaggaagagcttactgtttctcaaatcaaggctgaaatggagaagaccctgcgatggcttgcccctattgcaagtaacaccaccaaggctcatcatggtttcggttgggttggagagtgggcaagtaccgggttagatgtgaactgcaagccaactgggcagctggacctgacccgaattgagacactgtaccatgctgacaaggacaagactgaagcatatatcctcgagcttgttattaggcttcatcatcttatcagtcaaactaaaactgctaatggtgagaggtctccaatcaagtctcctgtccagtctcctacacaaagaggggcctcaatcacattgtctccgaacataaaaaacagcaattcatcacctcttctgacgcaagatgaccaagacatgctaagtgatgtcaagtacaggacatttatccctggtataagcaaaagccaagagtttgacactaaggaaagacataataatcaaagcaggttaagcaaaagtaacagccattcaccaagcagtggcaaccggaaagaggcgctatcgatctcgatcaggaggctgcttcctgtgatcgactttgagatcgaccggacaaaagccctcgatgtgattgatagagttgacgatctgagagtacaatgatgaacctagattaatcaatgccaaagtctgaaaaatgcaccctcagtctatgatccagaaaatcaagattgcttgaggccctgttcggttgttccggattagagccccggattaattcctagccggattacttctctaatttatatagattttgatgagctggaatgaatcctggcttattccggtacaaccgaacaggccctgaaggataccagtaatcgctgagctaaattggcatgctgtcagagtgtcagtattgcagcaaggtagtgagataaccggcatcatggtgccagtttgatggcaccattagggttagagatggtggccatgggcgcatgtcctggccaactttgtatgatatatggcagggtgaataggaaagtaaaattgtattgtaaaaagggatttcttctgtttgttagcgcatgtacaaggaatgcaagttttgagcgagggggcatcaaagatctggctgtgtttccagctgtttttgttagccccatcgaatccttgacataatgatcccgcttaaataagc

SEQ ID NO: 74747 - DNA, 1487 bp, Zea Mays
ccgagttccccagccacggcgtccttgcgccatgatatccaccccttccatctcctcacccctattccctatgcaacattcccggatttggggtgatgtttgtaccggacccactctcttgtctctctcttaatacaatgatacacaactatcctgcgtattcgagagaaaaaaagatcttcggttcatggggtttctcgtgcaagctccgttccttcaaatacaagggatacattataccaaagtttgccaccaaccataaagtcatctctccgttctaagctacactcctttggagtcaaggaagagcttactgtttctcaaatcaaggctgaaatggagaagaccctgcgatggcttgcccctattgcaagtaacaccaccaaggctcatcatggtttcggttgggttggagagtgggcaagtaccggatgtgaactgcaagccaactgggcagctggacctgacccgaattgagacactgtaccatgctgacaaggacaagactgaagcatatatcctcgagcttgttattaggcttcatcatcttatcagtcaaactaaaactgctaatggtgagaggtctccaatcaagtctcctgtccagtctcctacacaaagaggggcctcaatcacattgtctccgaacataaaaaacagcaattcatcacctcttctgacgcaagatgaccaagacatgctaagtgatgtcaagtacaggacatttatccctggtataagcaaaagccaagagtttgacactaaggaaagacataataatcaaagcaggttaagcaaaagtaacagccattcaccaagcagtggcaaccggaaagaggcgctatcgatctcgatcaggaggctgcttcctgtgatcgactttgagatcgaccggacaaaagccctcgatgtgattgatagagttgacgatctgagagtacaatgatgaacctagattaatcaatgccaaagtctgaaaaatgcaccctcagtctatgatccagaaaatcaagattgcttgaggccctgttcggttgttccggattagagccccggattaattcctagccggattacttctctaatttatatagattttgatgagctggaatgaatcctggcttattccggtacaaccgaacaggccctgaaggataccagtaatcgctgagctaaattggcatgctgtcagagtgtcagtattgcagcaaggtagtgagataaccggcatcatggtgccagtttgatggcaccattagggttagagatggtggccatgggcgcatgtcctggccaactttgtatgatatatggcagggtgaataggaaagtaaaattgtattgtaaaaagggatttcttctgtttgttagcgcatgtacaaggaatgcaagttttgagcgagggggcatcaaagatctggctgtgtttccagctgtttttgttagccccatcgaatccttgacataatgatcccgcttaaataagc

SEQ ID NO: 74748 - DNA, 2862 bp, Zea Mays
gaccaacagtagagttgaggaacgcagcagagcagaaaagacaccctacgataatcgtattattacgaactgaatacaaataaaaacatctcgtcgttcggtgtgagaagtgcctgcatgccagtgcatcatttgactctcgcgcgcgcaaaaaaaaaaaaaaaggaccggcgttcttggcgatgtcttttggactagcttgactgctttgagcacgtgtcagccaagctcgtagtcgtctcacacctgcccgacgatgcagccgcctgatgcacacgcggcctccactctccgcgcggccttctctcgagtctcgacacaaccttctcactttctcagtagccgctgcgcaccgcactcgcacgccaccctgccgccctgccttgcccaaccctgccgcagtgccgcatccaaatccaactcccacggggtatggatcctgatcaggtcgccgacgccggggtccagcacgacgacctcggcggcagcgccacatccgcaaacgggtgctttgacggtggcagtgacgacggctgggggcgcgcgttgctccggctgggatgggacctgtccaggaaggccgtcatcgctggcgtggcggccacggccgcgcccgtcgtggccccgccactgcttgtcctgtccctcgccggcctcgcgctgtccttgcccttcgccgcctacctggccagcctcgccgccaccgaccgtcttatgggcgcgctcctgccggcgcctcgtactacccagccgtactgcggctgcgacctcgaagacgatgaattcttggatccatctgaagcgccgggcgccgaggccactgcactcgaccactggcgcgacacggaggacgacgccatcatggaggaaaacgagagctttgtgccgttgccgctgtcacgacaacctcgattctccgaagagccgataacatcatcgtcgacagacgtggaggataagatggctgaaggtgagtctctttcccgaggattgggccacgagtcactagtgttggacaataaggaaggcacaatcatggaggacaccgagtacattaccatggaggcaccgccgagaggctccgatgttttcggatcagcagtgcctgtgttgcgtggtgaagacgatatggttcagagagcggtagaagctcctcttacagccaaggaatcagtccaagaattatctgtatcagacagtgaggatagaacacaggacgacaagtgcaaagatgcggagtcttccaaggagattctgtcactgagcgtcgacatcactgaatcaagtgacttcccggtgccgggcaatgaaggtattgtggttcagaggggaaatggtgaaacaatttctgtccgaaaatcaggccaagattctcattcaacagagattggggatgaaatggagggccacaaaaccgaagaagagataccactgcacgacgctaatgtttcagaatcgtcggtgctggatgatacagtgctggaggagaggaagatagaaggtgatgtaacagtggggatggccgtgaaagaagtgaccatttacacggatccttgtacaggggaggtggctggtgatcaagtagattccattgccattgccctacctgctgaaagcgagttgatgcaagccagcaatgttgacgatgttatcaacgctgctttaacagaaggcattgtgctggatattggtgatactagtacagagggcacggagcactacggtgagggaggtgtttctactgccgtctcggtggtgaccgtggacgatgttgcagagacagtttccagtaggagtccagcagtctcagtcatcggcgatgacatgactagtgtcaagagtaggccagatgctgacagctccgatcaaacaactggctacgacgcgctaaggagcaaggaatttcgggagaaagagtgtgtgaaaacagaggagagcaaaaccgtgcctacagagagcacgtcaccaccacggatcattcaagtttctagatcgccagcgccagacggtcagagcagggtagaagacgaagcagccgtggggtcggtgctggaaggagcggcgaataacaccgacgatcttgccacaccacgcgcggtggtggttgctttgcaatcgagcatttctgctggtgaaagcgagccgccgtcggcgagtgaccgtgttgagtacaagccggcgaacgaaggatttaggaggaatgcgatagctgaggacacggacaactacacggaggaacagatgagggagcagcttgatgccctaagaacaataaccgggtaccgtcccacgccgtctttgactctggaagccgagctcgtgggtctctatgtattcgtgggcgtggaaccccctgtcggctccggctccagggaagactccgacctgagtgatctcagcgcaaaactcaggctcctgaaatcgatcataggcgtggagtaaagatctgaagcgggaactgatttaccaggagttctgtgcttgtgtataatgcataaggttcagcggtccagggttcatcccgcacgtgagctttgttacgctctgctggttttaatctcaaaatccatccatgtggactagagtggattgaggatgtttaaattcctagcaactcaaaaatctctcctgctccctctcaatcccctttgaccttcatggtgggacgacaggtagctgtgaactacgtatcctactctatatttttgtgtggaaaagacgttaacgaacgtgctgtatatggcctacttcgcactagtgatgcgaacaagggatggccatttgtgatccgtcactaaatttctcggcttttctttgtgcttcaaaagtcctactaaacgagcgcccacagggatggtttct

SEQ ID NO: 74749 - DNA, 2607 bp, Zea Mays
atgcacacgcggcctccactctccgcgcggccttctctcgagtctcgacacaaccttctcactttctcagtagccgctgcgcaccgcactcgcacgccaccctgccgccctgccttgcccaaccctgccgcagtgccgcatccaaatccaactcccacggggtatggatcctgatcaggtcgccgacgccggggtccagcacgacgacctcggcggcagcgccacatccgcaaacgggtgctttgacggtggcagtgacgacggctgggggcgcgcgttgctccggctgggatgggacctgtccaggaaggccgtcatcgctggcgtggcggccacggccgcgcccgtcgtggccccgccactgcttgtcctgtccctcgccggcctcgcgctgtccttgcccttcgccgcctacctggccagcctcgccgccaccgaccgtcttatgggcgcgctcctgccggcgcctcgtactacccagccgtactgcggctgcgacctcgaagacgatgaattcttggatccatctgaagcgccgggcgccgaggccactgcactcgaccactggcgcgacacggaggacgacgccatcatggaggaaaacgagagctttgtgccgttgccgctgtcacgacaacctcgattctccgaagagccgataacatcatcgtcgacagacgtggaggataagatggctgaaggtgagtctctttcccgaggattgggccacgagtcactagtgttggacaataaggaaggcacaatcatggaggacaccgagtacattaccatggaggcaccgccgagaggctccgatgttttcggatcagcagtgcctgtgttgcgtggtgaagacgatatggttcagagagcggtagaagctcctcttacagccaaggaatcagtccaagaattatctgtatcagacagtgaggatagaacacaggacgacaagtgcaaagatgcggagtcttccaaggagattctgtcactgagcgtcgacatcactgaatcaagtgacttcccggtgccgggcaatgaaggtattgtggttcagaggggaaatggtgaaacaatttctgtccgaaaatcaggccaagattctcattcaacagagattggggatgaaatggagggccacaaaaccgaagaagagataccactgcacgacgctaatgtttcagaatcgtcggtgctggatgatacagtgctggaggagaggaagatagaaggtgatgtaacagtggggatggccgtgaaagaagtgaccatttacacggatccttgtacaggggaggtggctggtgatcaagtagattccattgccattgccctacctgctgaaagcgagttgatgcaagccagcaatgttgacgatgttatcaacgctgctttaacagaaggcattgtgctggatattggtgatactagtacagagggcacggagcactacggtgagggaggtgtttctactgccgtctcggtggtgaccgtggacgatgttgcagagacagtttccagtaggagtccagcagtctcagtcatcggcgatgacatgactagtgtcaagagtaggccagatgctgacagctccgatcaaacaactggctacgacgcgctaaggagcaaggaatttcgggagaaagaggtaatagaggacaaggtgtgaaaacagaggagagcaaaaccgtgcctacagagagcacgtcaccaccacggatcattcaagtttctagatcgccagcgccagacggtcagagcagggtagaagacgaagcagccgtggggtcggtgctggaaggagcggcgaataacaccgacgatcttgccacaccacgcgcggtggtggttgctttgcaatcgagcatttctgctggtgaaagcgagccgccgtcggcgagtgaccgtgttgagtacaagccggcgaacgaaggatttaggaggaatgcgatagctgaggacacggacaactacacggaggaacagatgagggagcagcttgatgccctaagaacaataaccgggtaccgtcccacgccgtctttgactctggaagccgagctcgtgggtctctatgtattcgtgggcgtggaaccccctgtcggctccggctccagggaagactccgacctgagtgatctcagcgcaaaactcaggctcctgaaatcgatcataggcgtggagtaaagatctgaagcgggaactgatttaccaggagttctgtgcttgtgtataatgcataaggttcagcggtccagggttcatcccgcacgtgagctttgttacgctctgctggttttaatctcaaaatccatccatgtggactagagtggattgaggatgtttaaattcctagcaactcaaaaatctctcctgctccctctcaatcccctttgaccttcatggtgggacgacaggtagctgtgaactacgtatcctactctatatttttgtgtggaaaagacgttaacgaacgtgctgtatatggcctacttcgcactagtgatgcgaacaagggatggccatttgtgatccgtcactaaatttctcggcttttctttgtgcttcaaaagtcctactaaacgagcgcccacagggatggtttct

SEQ ID NO: 74750 - DNA, 4557 bp, Zea Mays
gtgctcccgtgcgtaagtggctgtcttaagtactagcgtagccgaaagagacggtatgcattttgtaaggaaaacttagtatcctggaatagaactcctctggttctcctattcttctcctcctccttccaggttgctaacagagtggtatcaaagacacctttccttggccgtccgccatggcttctccacccatcgattcagccctcacgctcgccctcgaacaccaaacccgctccctgttgtccgagttggacaaacggttgtccgccatggatgtcaagtgggaatcccgtgtcggagagcttgaatctcaggtctctgcatccagccgccgcctggattccgtcaccaccgacctccgtgcggatgtggagatccagttctcctcagccgccgatcacctccaccagatcgaagctgacgtcaaaactcgcgtcgccgccctccaatcgactatgcacgtcttcgagctgtggcgccctcgcgtggaggcatcggtcgagtccctccactcctccgtcgattcgatccgcgccgaggtctccaagatggggatccgctggtccaccgacgcccgtgtggatggatctggacaacccggtctcctcggtgcgcacgggtctggatccggaagggtccctgctcctgaagaacctccagatcgcccacgttttgggtcctgcttcgagaattactaccgggatagtgggcacgtgcaccccggtgccgacgctcactacccggtcacgggaagctggggactcgtctcggcgtccggatcctgttcatggcgattcatcttatgctggccgttcgtcgtggaagtcggctgttccacagtctgctcgctgggatccatcgcgcggtttggctccagaatcctccaaaactccaactcagccagcgccaacaattgattccaaagtggcttctcttcgttcatatcggcgtgccagtggattatgccagtattgtgctgaaaagtggaacaagggccataaatgttctccaactgttcaactacatgcagtccaagagatgtgggaactctttgatcatgaccagtcagatactgatcctgatttccaagattcatcagaccagttcgcagtaatgttgtcccaggcagccatttcaaccccagccaaggcccaagcattcagacttcaaggctgtttgcaaggcgtggaattgttgatgcttcttgactctggcagttcacattgttttctgaacaccaacagcgttgcggcaatcactggccttactcttgtgtcgactccgctaatggtcaccgtagccaatggtgaggtccttacatgcacttcagagctggtggaagcagactggactttacagggtgtcccgtttcgcacaacattcaagttactgtccttacctcactatgacgcaatccttggtatggattggctacagcagttcagcccaatgttgatagattggaagaacaaatggctgtctataccatttcaagatcagcttattgtcctgcgtgattgtcagtcattggttcctgctggttcgttgttggaaatccgttccgtgtcctcgacatcgacaccacaacatttattttcagccacgacttctgctgttcctgagccggttcgttccttgctgcaacagtttgatgccttgtttcaacctcctacaacgttgccaccgagccgtgcatgtgatcactccattccattagtggatggtgctcgcccagttaatatacgaccttatcggttgtcccctgcactgaaggacgaagtggaatcccaagtggctgaaatgcttcaaaatggcataattcaaaacagttccagtgccttttcctcgcctgtcctcatggtcaagaaaaaggacaattcatggaggttctgtgtcgattataggcacttgaatgccctcacagttaaatctaagtacccagttcccatcatcgatgaattattggatgaactagctggcgcctgttggttctctatattggatttgcgagctggattccatcaaatattgctcaagcctggggaagagtacaaaacagcatttcaaacccacacaggacactatgaattccgggtcatggcattcggtctcactggggcgcctggcacatttcaaaaagccatgaatcatactttggctcctcttcttcgtaaatgcactattgtgttctttgatgatattttagtctacagccgctcccttcaagaccacttcactcacctacaacaagtattcgagctgctgtcgtctgatcactggaagattaaaatgtctaagtgcagtttcgctcagccccaagtaacttacttaggccacattatcagctcagccggtgtcgctaccgacccagcaaagatccaagctattgtggcatggcctgttcccaagtgtgtgaaggaattgcggagcttcctaggactctctggatattacagaaaattcatacggcattacggcgtgatctgccaacccctgacagcactgttaaaaaagggcgctctgtacgtttggacagctgatcatgatactgcattctgcactctcaaacaagcgatgtcatcggctccggtgttggctctaccagattttaatgtcatatttcagattgaaactgatgccagcgccaatggtgtaggggctgttctttcacagcaaggtcaccctctggcattcctgagtaaggcccttggagttaaatctcgtggtctctcgacttatgaaaaagagtatctagctgtccaacaatggcgtgcttaccttcaacaccagaaattcgtgattataactgaccacaaaagtctatcacaattaaatgagcaacgtctccatactccttggcagcacaaagtgttcaccaaattattgggccttcaatatagagtgcagtatcgtccagggacagaaaaccgggcagctgacgccctctcgcgctatggtcctgctgaaatcaatgcggtttctgttgttatccctcaatggctgactgatatccaacagacttacgattcggacagcaagactaaagagttagtggctaaactagctatcgatccagcagctgttgcccacttctcactgaaggatggtctgatccgttacaagaaccgtctttggataggcgaggatccccacctccaggctaagattgtttcagcactgcattcctctccgatcggtggtcactctggtgtgccggttacctacagccgtgtcaaaagcatatttgcgtggaagaatatgaagtcgttcgtccgttcatttgtgcagcaatgtcagatttgcctgcaagccaaacctgacagggcagcttatcctgctgttcctatctcacatatacaggctccatggttttccagcggccattgtatctgacagagaccccatcttcaccagcgccttttggcgtcagctgttccaactggctggtacggaattacgcctcagttcctcctatcacccccagtcagatggtcagacagagcgtctgaaccaatgcttggaaacgttcctgcgatgctttgtcagcgcgtgtcctaaaaagtggtcctcttggctgccagcagctgaatattggtataacacaagtctgcattcagctttgggttgttctccgtttgaagtgctttatggccgcaagccacgttccttgggtctttcttttgatgctgctgccccagttgccctgtcagcctggttacaagaaagatctgtgatgcaaaatctcatccaccagcaccttattcgcgcccaaactcggatgaaaaaacaggcagataaacaccgctctgaacgctccttctcagttggcgattgggtttacatgaagctccaaccctacgtccagtcttcagtgcttccacgtgcccaccaaaaactcagttacaagttctttggcccttatcgagtggccaacagggtcggttcagtggcctaccgattggaactcccaaattccagcaggattcatcccgtcgttcatgtctcccaactgaagctggcaaaaggttctggtgcagtggtccaaccttcctactgagttagccacatgggaagaccaagacaacctgaggcaatgttatccttttgctcctgcttgggggcaagcaggattccaagggggggaaaatgtcaacaatgagagtatggattcccctacagtcagccgaggcgtaccaaacggcgaaccggaagcagctccagttgtccgcacacgccgtgtctgtcgcgccaacgtccgtcagcaaggaccagagtgggtgcagtgagtcggcatattggtgttgggtctgagcctgcgtgctcccgtgcgtaagtggctgtcttaagtactagcgtagccgaaagagacggtatgcattttgtaaggaaaacttagtatcctggaatagaactcctctggttctcctattcttctcctcctccttccaggttgctaacaaatagcgtgtggaccgcaacgtataacggaatttcacatgaagatgtagctgaaatcttttcgaaggatgttgaaggtaagagccaatctcggcc

SEQ ID NO: 74751 - DNA, 5129 bp, Zea Mays
gtgctcccgtgcgtaagtggctgtcttaagtactagcgtagccgaaagagacggtatgcattttgtaaggaaaacttagtatcctggaatagaactcctctggttctcctattcttctcctcctccttccaggttgctaacagagtggtatcaaagacacctttccttggccgtccgccatggcttctccacccatcgattcagccctcacgctcgccctcgaacaccaaacccgctccctgttgtccgagttggacaaacggttgtccgccatggatgtcaagtgggaatcccgtgtcggagagcttgaatctcaggtctctgcatccagccgccgcctggattccgtcaccaccgacctccgtgcggatgtggagatccagttctcctcagccgccgatcacctccaccagatcgaagctgacgtcaaaactcgcgtcgccgccctccaatcgactatgcacgtcttcgagctgtggcgccctcgcgtggaggcatcggtcgagtccctccactcctccgtcgattcgatccgcgccgaggtctccaagatggggatccgctggtccaccgacgcccgtgtggatggatctggacaacccggtctcctcggtgcgcacgggtctggatccggaagggtccctgctcctgaagaacctccagatcgcccacgttttgggtcctgcttcgagaattactaccgggatagtgggcacgtgcaccccggtgccgacgctcactacccggtcacgggtatgtggagctcccctcactcgccctcattttcattcaacgctcattgtggccatagtcagggtgattggggtcagcgtggcccacttagccgtcactgtggggggttacctaaattaaatttccctacgtttgatggtacctaccctaagctctggcaaaagcgttgcgaagattactttgagatgtatgctactgagacttttgtctgggttaaggtctccaccatgcactttgtgggtgctgcggctcgatggttacagtccattgaaccgcgtcttccgtccatgtcatggcgccaattttgtcaagctatccatgataggttcggcagggagcaacacgaacttgttattcgcaaactcttccacattaagcagacctccacagtccaagactatgttgatcgtttttcagagttagttgatttgttagtcacatatgaacacacaacagacccgttatactataccatgaaattcattgatgggttgagggatgacatcaaatctgtgattcttgtacaacgtcctggcgatctcgatactgcctgctccttggctctattgcaggaagctggggactcgtctcggcgtccggatcctgttcatggcgattcatcttatgctggccgttcgtcgtggaagtcggctgttccacagtctgctcgctgggatccatcgcgcggtttggctccagaatcctccaaaactccaactcagccagcgccaacaattgattccaaagtggcttctcttcgttcatatcggcgtgccagtggattatgccagtattgtgctgaaaagtggaacaagggccataaatgttctccaactgttcaactacatgcagtccaagagatgtgggaactctttgatcatgaccagtcagatactgatcctgatttccaagattcatcagaccagttcgcagtaatgttgtcccaggcagccatttcaaccccagccaaggcccaagcattcagacttcaaggctgtttgcaaggcgtggaattgttgatgcttcttgactctggcagttcacattgttttctgaacaccaacagcgttgcggcaatcactggccttactcttgtgtcgactccgctaatggtcaccgtagccaatggtgaggtccttacatgcacttcagagctggtggaagcagactggactttacagggtgtcccgtttcgcacaacattcaagttactgtccttacctcactatgacgcaatccttggtatggattggctacagcagttcagcccaatgttgatagattggaagaacaaatggctgtctataccatttcaagatcagcttattgtcctgcgtgattgtcagtcattggttcctgctggttcgttgttggaaatccgttccgtgtcctcgacatcgacaccacaacatttattttcagccacgacttctgctgttcctgagccggttcgttccttgctgcaacagtttgatgccttgtttcaacctcctacaacgttgccaccgagccgtgcatgtgatcactccattccattagtggatggtgctcgcccagttaatatacgaccttatcggttgtcccctgcactgaaggacgaagtggaatcccaagtggctgaaatgcttcaaaatggcataattcaaaacagttccagtgccttttcctcgcctgtcctcatggtcaagaaaaaggacaattcatggaggttctgtgtcgattataggcacttgaatgccctcacagttaaatctaagtacccagttcccatcatcgatgaattattggatgaactagctggcgcctgttggttctctatattggatttgcgagctggattccatcaaatattgctcaagcctggggaagagtacaaaacagcatttcaaacccacacaggacactatgaattccgggtcatggcattcggtctcactggggcgcctggcacatttcaaaaagccatgaatcatactttggctcctcttcttcgtaaatgcactattgtgttctttgatgatattttagtctacagccgctcccttcaagaccacttcactcacctacaacaagtattcgagctgctgtcgtctgatcactggaagattaaaatgtctaagtgcagtttcgctcagccccaagtaacttacttaggccacattatcagctcagccggtgtcgctaccgacccagcaaagatccaagctattgtggcatggcctgttcccaagtgtgtgaaggaattgcggagcttcctaggactctctggatattacagaaaattcatacggcattacggcgtgatctgccaacccctgacagcactgttaaaaaagggcgctctgtacgtttggacagctgatcatgatactgcattctgcactctcaaacaagcgatgtcatcggctccggtgttggctctaccagattttaatgtcatatttcagattgaaactgatgccagcgccaatggtgtaggggctgttctttcacagcaaggtcaccctctggcattcctgagtaaggcccttggagttaaatctcgtggtctctcgacttatgaaaaagagtatctagctgtccaacaatggcgtgcttaccttcaacaccagaaattcgtgattataactgaccacaaaagtctatcacaattaaatgagcaacgtctccatactccttggcagcacaaagtgttcaccaaattattgggccttcaatatagagtgcagtatcgtccagggacagaaaaccgggcagctgacgccctctcgcgctatggtcctgctgaaatcaatgcggtttctgttgttatccctcaatggctgactgatatccaacagacttacgattcggacagcaagactaaagagttagtggctaaactagctatcgatccagcagctgttgcccacttctcactgaaggatggtctgatccgttacaagaaccgtctttggataggcgaggatccccacctccaggctaagattgtttcagcactgcattcctctccgatcggtggtcactctggtgtgccggttacctacagccgtgtcaaaagcatatttgcgtggaagaatatgaagtcgttcgtccgttcatttgtgcagcaatgtcagatttgcctgcaagccaaacctgacagggcagcttatcctgctgttcctatctcacatatacaggctccatggttttccagcggccattgtatctgacagagaccccatcttcaccagcgccttttggcgtcagctgttccaactggctggtacggaattacgcctcagttcctcctatcacccccagtcagatggtcagacagagcgtctgaaccaatgcttggaaacgttcctgcgatgctttgtcagcgcgtgtcctaaaaagtggtcctcttggctgccagcagctgaatattggtataacacaagtctgcattcagctttgggttgttctccgtttgaagtgctttatggccgcaagccacgttccttgggtctttcttttgatgctgctgccccagttgccctgtcagcctggttacaagaaagatctgtgatgcaaaatctcatccaccagcaccttattcgcgcccaaactcggatgaaaaaacaggcagataaacaccgctctgaacgctccttctcagttggcgattgggtttacatgaagctccaaccctacgtccagtcttcagtgcttccacgtgcccaccaaaaactcagttacaagttctttggcccttatcgagtggccaacagggtcggttcagtggcctaccgattggaactcccaaattccagcaggattcatcccgtcgttcatgtctcccaactgaagctggcaaaaggttctggtgcagtggtccaaccttcctactgagttagccacatgggaagaccaagacaacctgaggcaatgttatccttttgctcctgcttgggggcaagcaggattccaagggggggaaaatgtcaacaatgagagtatggattcccctacagtcagccgaggcgtaccaaacggcgaaccggaagcagctccagttgtccgcacacgccgtgtctgtcgcgccaacgtccgtcagcaaggaccagagtgggtgcagtgagtcggcatattggtgttgggtctgagcctgcgtgctcccgtgcgtaagtggctgtcttaagtactagcgtagccgaaagagacggtatgcattttgtaaggaaaacttagtatcctggaatagaactcctctggttctcctattcttctcctcctccttccaggttgctaacaaatagcgtgtggaccgcaacgtataacggaatttcacatgaagatgtagctgaaatcttttcgaaggatgttgaaggtaagagccaatctcggcc

SEQ ID NO: 74752 - DNA, 1622 bp, Zea Mays
aaacgtcagagctaggtctcggggggcagtttggtcactccgtccccgccagggtttgacgtcgtcgtctctctctcggcggcccgtccggccgtccccgtcccgtctcttgcgtactccgccaccaaccgcttttgcttgccgctactcgccgcctgccaaaagcagccgtcctccctagctcgcccgcccgaagcgacgcctgacttcgcatctgtttcgttccacccgccccgcgagaagcttctagaagggggagacccgccggagccatgccggaggaggagtcgacgtcgatcccgctcagccaggcggcggaggccgtcgaccccgaggacccagccaagtcgccgccgcgacccagctcgcccaccacctccacacgcaaggcatgctgtgctgttcttcaaagttgggtctcaagaaaatttatgactggatgtccttttccctgttgcagtcacgttcttcatcacatggtggtttattcaatttgttgatgggtttttcagtcccctatatgcaaaacttggaatcaacatatttggtcttggttttttgacttctctggtattcatatttctggttggaatatttgtttcttcatgggttggttcaaccatcttctgggtgggagagtggtttataaagaaaatgccatttgtaaggcatatatattcagcgtcaaagcaagtcagcactgcaatttcaccagatcaaaatacgacagctttcaaagaagttgcaataattcgtcatccacgaattggtgaatatgcatttggattcataacatcaacggtggtccttcagactgacaaaggcgacgaagaactgtgtagtgtgtatgtgccaacaaatcatttgtacatcggtgatatatttctggtgaactctgaggaggtcataagacctaatttatctattcgagaaggaatcgaaataattgtttcaggagggatgaccatgcctcaggtgattgcatcactggagcccatgccacggaaaagccagaacattcgtctaaatagaatgacgtgatgtaaaacaagccacatgcatcaagatagcatgacctgtgtgcttagccatgtgatttggatagaggagcagctttgtgctgagctattgtggcattctgtagtgcaggggaagcatcgtgttgatgcccagggatattattcccacacaagttgtgctactcattgtgcggggtgtttggtttctaggtactaatttttagtctcttcattttattttataaattatcaaatacgaaaactaaaatagagttttagtttccgtatttgtcaatttagagactgaaataaaataaaatagatggattaaaaattaatcctcagaaaccaaacacccctaacactggtccaaaatgctaacgtctatgcttgaggtgcattattgattaaattcgtttataactgtgatgtataacatcttacgttacaaagagagcacacaacgctctgaccaattttcttctttcagacttacaatttcttcattttattttatcgtgtaatgtgtttaactggctatgatccagctttaggcataagcccatggttatcaatctacttgacaccataagtatcaatcta

SEQ ID NO: 74753 - DNA, 4745 bp, Zea Mays
gtcactccgtccccgccagggtttgacgtcgtcgtctctctctcggcggcccgtccggccgtccccgtcccgtctcttgcgtactccgccaccaaccgcttttgcttgccgctactcgccgcctgccaaaagcagccgtcctccctagctcgcccgcccgaagcgacgcctgacttcgcatctgtttcgttccacccgccccgcgagaagcttctagaagggggagacccgccggagccatgccggaggaggagtcgacgtcgatcccgctcagccaggcggcggaggccgtcgaccccgaggacccagccaagtcgccgccgcgacccagctcgcccaccacctccacacgcaaggcatgctgtgctgttcttcaaagttgggtctcaagaaaatttatgactggatgtccttttccctgttgcagtcacgttcttcatcacatggtggtttattcaatttgttgatgggtttttcagtcccctatatgcaaaacttggaatcaacatatttggtcttggttttttgacttctctggtattcatatttctggttggaatatttgtttcttcatgggttggttcaaccatcttctgggtcagaattatagccccagctgccaggacagcaaatgcaacagcaaatacttcagactacattgacaaacaaagcaggatcattaatttgcacactaggcgctataaaattcaaatattcgattaatgattgatttgatagaacgcagcagaaacacacattgtatgtgtttgaattaaagtaaaaagtactgatgtgtcgactgagagattggaacccgagcttacaggtaaatggttcttccgcttgcaactatgatggctcaatgcaatacagacataattcttgttaaggtataaaagccaagggtagtagtgtaatctcctagtctagggttttgtcatgtacttatatgtagtcacattgaatctcaatacaatcatccaattcagtctcccttatttgtaacaactctctccctgcatgttttctctatatgatgtgccacacggatctgaagtctgaacaaccagatcatcggtgtcatgtcttatattggaacatagtacaagaagcagcaaaagaaaatgacgcttttcaaatattcctgttcattcaggatatcttgttctataagaacaagggagacatgcctaccaagtatctaactgcaatactaccaacatacacagctatttcttttgaagtaaatagtagaaaaacaatataatgcaagagaatgcaaataaatttggtttctccatgcgaccataaaattttatacataatatacagaggggacactgctaacaccaaaaaatcaattgtatacctaagaactagaaaactttcatgtaacgaccaagattgtagtttctgcatgaattagttctttagaaaatttgttgacattgcacattactaactacagtctacagcagaagcataaaacaagatccaacctctctttttttggtacgaaggcatagtttggctagaaactgggataaggaaataaacaacaacatcaccaacaaagcctttagtcatgagcaagttgggtaggctaaagtgaacaaaaaccacaagacaaggttcaggcacatggataattgttttctatgcactcctattcaaagctaaatctttggttatattccattagggatgaaaacagatacttatttggatatcgtttttttgtcttttttccttgatcatgaataaataggatatagaatctgctattcaaatctgtattcttgttttcagcattgagcttgtaaagattcatatcatgtaaaccgaaaatttatcatatatcttctcaaatgatagatataaaattcagatacggattcagattttttttcaccttttttgtagggagcaaataatgcataaaacaatttatgcaaatttttattcttatttgtaagaatgtatttgataatataagaaaagataaatttcatacatatctattttaaaatattaaatttatcctaacaattcagatatccactttcatccctatattgcatcctttaaagatttcttttacagccgctacccacgtcaacttcagtcttcctctacgcaccgatgccactgatgcctctagaggtcttcgttgaacatgtccaaaatccaaatcatctctcaaccggtattagaccagcttttcttcaattggtgctacccttagcctatcatgtatatcatcattacagactagatcccttcttgtatggctacagatccaacacaacatacacatttttgcaacacttatctattgtacatgtcgtctttttgtagaccaacattttgcacaatacaacataatatgtcttaatcgctatcctatagaacttgtttcttaacgtatgtaccctcttatcacatagaatgtgagatgtttgataccacttcatccaccctagtttgattctatggccaacaccttcgtcaatatccccacctctctgtagcattgatcttaaatatcaaaaggtatccttcttaaccactacttgacctttcaaactaacatctacttcatcatgtgtagtagtgccaaagtcacattcatatattcaattttagttctacagggtctaaaatatttggactctagagtatcccgccacaactccaattttctatttactcgtgtcaggctttcatcaactagcactacatagcccgcaaaaaaacattcaccaaaagatatgcccttgtacatcccttgtgacctcatccatcaccaaggcaaaaaagtaaaagctcagaggtaatccttgatgtagtcatattctaatcagaaagtaatctatatatgcatcacttgtttgaacattggttaaaatattgttgtatgagtcattaatgagtccaacgtacttcgttggaactttatgcttgtccaaatcccagcacataacattccttgccattttgtcataagccttctccaagtcaatgaaaaccatatatatgtccttattctactctctagattggtccattacttgtcttattaagaaaatagcttccatggttgaccttctaggtacaaaaccaaattgattaatagagatcctcgttattcctctcagaggatactcgataactctcttccatagctttataatcaacttaattcctcgttaattagtagaactttgaatatctcccttgttcttgtcaatcggcaccaatatactttttctctactcatcaggcatcttattcgactaaaagatatgattgaacaacttggttagccatactatagctatatcccgggggcatctccatgcctcaattgggataccatggagcccattaccttacctctttcatctttttcaatgcctctttaacctcaggttcttggatcctacacacaaaacgcctattagtgtcatcaaaagagtcatccaactgaaaggttatgtccccattcatcccattgaacaatttgtcaaaatattcttgtcatctatgcccgatctcatcctccttcaccaagaggtgcttcatttcatccttaatgcatttaacttggttgaaatccgctatcttcctctcatgggccctagccatcctatatatgtctttctcacgttccttcatacgttccttcataatcaaacgttggtaaaggttcttgtacgctctagccttagccacacttatagctcgctttgtggtcttcttctctaccttgtacttctctatgttgtccacagtccacactcctatcatggtacaaacattgttctttctccttaatggtcatttagactttctcgttccaccaccaaatatcttaagtttcgcctccactccctttggttgctccatacaggcacacacctctcgccaccttctgaatgcaagttgacatcttcccccacgtgttgtttgtgtcaccttcttccctccaattaccccctttgatcataggacaacgtaaacaaaaccaactatttatttcagttttgacaactttacagagagagggtcatatgaagcttgaacactacagacaattaaacttcactattgtgacgagatgatacccagttccatatccattttggaactaacagaatgacacaatctgagaactcaacacaagcagaataagtgacatcagatacacacttcaacttgcatgggcacaaatagggaaccaattgttagtataataaactaattgagagggtagagccatagaggtaggagaagtgattcacatgcaacattcagcatgcatcaacttacaaaaaccacatgatagctctcaacctatccccacgggtattaaatgttcttagaacatcattgatatatcaccacaatggaaatgttgaccttgtaaatggtaattgcgcacccctaagaaaacttcacatgctgacatataactagtttaataactaatatacaatacaacccgttatccggtatatttgaggaaaacgagaactgcagtgttaactagtggtatatcatgaaacacttcaggacagacactaccaacgtaataaccagatccatataaaagagagcactaaatctagttgcgagaggaaatgggtaccttcttaacggaagctgaccaggagagcgtgaggccaaggaagacgatgaagaagaagggaccccacaggtcccagtccctgagcgccttgccg

SEQ ID NO: 74754 - DNA, 1120 bp, Zea Mays
tgatccctcttctacataaataatttggtcttggttttttgacttctctggtattcatatttctggttggaatatttgtttcttcatgggttggttcaaccatcttctgggtgggagagtggtttataaagaaaatgccatttgtaaggcatatatattcagcgtcaaagcaagtcagcactgcaatttcaccagatcaaaatacgacagctttcaaagaagttgcaataattcgtcatccacgaattggtgaatatgcatttggattcataacatcaacggtggtccttcagactgacaaaggcgacgaagaactgtgtagtgtgtatgtgccaacaaatcatttgtacatcggtgatatatttctggtgaactctgaggaggtcataagacctaatttatctattcgagaaggaatcgaaataattgtttcaggagggatgaccatgcctcaggtgattgcatcactggagcccatgccacggaaaagccagaacattcgtctaaatagaatgacgtgatgtaaaacaagccacatgcatcaaggtcaaagtttccaacttatataacccagctggtttgttttccatgtgatttggatagaggagcagctttgtgctgagctattgtggcattctgtagtgcaggggaagcatcgtgttgatgcccagggatattattcccacacaagttgtgctactcattgtgcggggtgtttggtttctaggtactaatttttagtctcttcattttattttataaattatcaaatacgaaaactaaaatagagttttagtttccgtatttgtcaatttagagactgaaataaaataaaatagatggattaaaaattaatcctcagaaaccaaacacccctaacactggtccaaaatgctaacgtctatgcttgaggtgcattattgattaaattcgtttataactgtgatgtataacatcttacgttacaaagagagcacacaacgctctgaccaattttcttctttcagacttacaatttcttcattttattttatcgtgtaatgtgtttaactggctatgatccagctttaggcataagcccatggttatcaatctacttgacaccataagtatcaatcta

SEQ ID NO: 74755 - DNA, 995 bp, Zea Mays
tgctccgatcagtcagcacacgacaacagcgcttcgagccctggcccctagctcgcattgcgagttccagcgagccaaccaaaccattagaccaaccaccgctccgtcagtccctctccttccttcctagttcattccctcacctcatctaaccaagctcccgagagcagagagctgagagagggagagaaaaagtaatccgacggaaacgacaagggcgcggcgagggcggggacgggaaggccctgggcgcggaggcgccgagcacatggcatcgtcgagggtgataccgtcgtcctcgccgtcgcacacggcctcggatctcgcgcgcctagcgcaggccgccagcaggcccggcggcgggggcagcgggccgggctccatgaacgtcgaggagctcctccgcggcatctacagcgacatgcccaccccggcgccgcccgcgtcggaacccggacgcccgatgcccccggccccggcgccggtgagcgccacgcggaagacggcggaggaggtgtggaaggagatcactggcggaggtggcagtggggaagccgtggctcccgtggcggctcaggctgtcgctcccgatggtggcgctggcacaggcggcccggaggtgacgctggaggacttcctggccagggagagcgcggtgaaggaggatgaggttaagatttctgtcccccccgcgccggtcatggggttaccgggcggagcggagggcgtgagtgtgcctggcggcggaggcgggagggaacggaagcggcagcttgtgagtacagtggatcgcgctcgctctgctatccagcgagagaaacgaatgataaaaaaccgcgagtctgctgccaggtcacgggagaggaagcaggcctatatcgccgagctagaatacatggtaacgcggctcgcggaggagaaagctgagttgttgagacaacagagaccagtgcatcatgaatgttctcatctataggcaaacatattaccttttg

SEQ ID NO: 74756 - DNA, 1174 bp, Zea Mays
agcgcttcgagccctggcccctagctcgcattgcgagttccagcgagccaaccaaaccattagaccaaccaccgctccgtcagtccctctccttccttcctagttcattccctcacctcatctaaccaagctcccgagagcagagagctgagagagggagagaaaaagtaatccgacggaaacgacaagggcgcggcgagggcggggacgggaaggccctgggcgcggaggcgccgagcacatggcatcgtcgagggtgataccgtcgtcctcgccgtcgcacacggcctcggatctcgcgcgcctagcgcaggccgccagcaggcccggcggcgggggcagcgggccgggctccatgaacgtcgaggagctcctccgcggcatctacagcgacatgcccaccccggcgccgcccgcgtcggaacccggacgcccgatgcccccggccccggcgccggtgagcgccacgcggaagacggcggaggaggtgtggaaggagatcactggcggaggtggcagtggggaagccgtggctcccgtggcggctcaggctgtcgctcccgatggtggcgctggcacaggcggcccggaggtgacgctggaggacttcctggccagggagagcgcggtgaaggaggatgaggttaagatttctgtcccccccgcgccggtcatggggttaccgggcggagcggagggcgtgagtgtgcctggcggcggaggcgggagggaacggaagcggcagcttgtgagtacagtggatcgcgctcgctctgctatccagcgagagaaacgaatgataaaaaaccgcgagtctgctgccaggtcacgggagaggaagcaggcctatatcgccgagctagaatacatggtaacgcggctcgcggaggagaaagctgagttgttgagacaacaggaagagcagttccagacgcggcttgaagagttcttacagaaatggaaggaaaacatataaatgcccttgcgacttctgaggcttcaggacataaggtgaaggggatattgatcgtatagctgcgtagcatcagcaatgaagatacttccagagtcgcaccaccctgctatcacatccgatttgaaaacaagaaggttgtcaacaaacatatatgtatttttcatgcacacgttcgctggcaagcctatattctgcatt

SEQ ID NO: 74757 - DNA, 2442 bp, Zea Mays
ctcaagtcacaacaaacaccaccatccctttgctcagagcatcacactccctctctctcgcgcgcgctcacaagcacgtcgtcaaccatggttgtcgagatgaaggagaacggcggagcggcgttggcggcgggcgagaaggcgccgcagctgggcgtgaagcgcggcgagccgacgctggtgccgccggcggaggcgacgccgacgggcgggcagtactacctgtccaacctggaccagaacatcgcggtgatcgtgcagacggtgtactgctacaagccttcctcgcccggcggcggcgaaggcaaggaggacgtggacgtggcaggcgcgctccgcgacgcgctggcgcgcgtgctggtgcactaccacccgctggcggggcggctgggcgtcagcccggagatgaagctcaccgtggagctgaccggcgagggcgccgtgttcgtggaggccgacgccgcctgcgacctcgacgccgtcggcgacctcaccaagcccgaccccgccgcgctcggccagctcgtctactccgtccccggcgctaagcacatcctcgagatgccccccatgaccgcgcaggtgcatacacacgacacgctgaccgcttcgcttgcacattaaccgcgtggagttattggttggaagttgagggataggccaggggaagttggattgacgaattctcagctgggagctcaaaaataggagggtcttggaggggataattttttttaggcttttaaactagtccttagtgacataaatgccgctttggtttaaatctagcataggaaattgaataacggaaatggagaatttactgctccgccttgggaactcgactcgtttggaacacgtgcacgggcacgctcttcgatcagtttcgtggaattattactgcgctccaaactggtcatgggaaacggctagaaaagcatgcatgtttttagtaccgctttgtgtgtttgctttaaatgaaaactctgttaggttttgattcattttttttaaaaaaaatagattaagtttggtccatatgcggtttcagttatttaaatttgtttggtccatatatgggttccgttatttaaatttgtcggcgtattagtcaaccggcactcgcggtggtcaaacacacagacaccaaacatgcttagccgcctgctgccggccccataggcccagagtattccagaggctgtcgtactgatccagcaactgcaactgtgcaacctttctctctgccatgattgtagtcgacacatataccctgtctactacttcctgttaactgagacaacgcaagcactctggctgcctgcaatgatttgcaattgtttttctagtacaatgtgacgaggttcaagtgtgggggcttcgcgctcggcctggccatgaaccactgcatgttcgacggcatcggcgccatggagttcgtcaactcgtgggcggagacggcgcgcggcgtcgccgagctcaccgtgccgccgttcctggaccgaagcgtcctgaaggcgcgcgacccgcccgtgcccaccttcccccaccacgagttcgccgagatccccgacgtctccgacacggcggcgctctacggcgcgcaggagctgctgtaccgctccttctgcttcgacccggaccggctggagcgcgtgcgcgggcttgcgctcgccgacggcgccctgggccgctgcaccaccttcgaggcgctgtcggggctggtgtggcgcgcgcgcaccagggcgctggggctggcgcccgagcagcgcaccaagctgctgttcgccgtggacgggcggcgccggttcgcgccgccgctcccgcggggctacttcggcaacggcatcgtgctcaccaacgcccttgccacggccggcgagctgctgtccgcgcccgtgtcgcgcgcggcggggctggtgcaggacgccgtgcggatggtcaccgacgactacatgcgctcggcggtggactacttcgaggcgacgcgggcccggccgtcgctcgcgtccacgctgctcatcaccacctggtcgcgcctcgagttccacggcgccgacttcgggtggggcgagcccgtcatgtcgggcccggtcacgctgccggagaaggaagtcatcctgttcctggcgcacgggaaggagaggaagagcatcaacgtgctgctcggcctgccagccaccgcgatggacgccttccaagagctcatggacgagatatgattcattcgtcggtgatgacggacatggatgggttgctgctatacatacatttacgatgcagggtgcttatacattcttcaattgctcggtgttatagtacgaccgtgttaatactcgatctatgttgatgttgttaagtttagtggccatatgagaatttgctgtcgattgcaattgttctaatattaatggaaaatagtaaactttatttcctttcatt

SEQ ID NO: 74758 - DNA, 6066 bp, Zea Mays
gagctcccttctcgtagtgcccctcgcattctgttctcagcccgctctcctctctgctcggtctccccagtactcgcctcgcctggacacgccgttctgttgttaccacttgtcagtcacgatctcttccttcgtggagtttgcgtgttgggagtccgtggatcatggctgaaactgcacgcgttctcgtctccttgctctggcacatcattgtgtggagctgctgaacgccactgtctctagctcctgtatcgccgtgccggcgctcggctccccaacttcgctgttgcctactggacctgctgctctctctgcaacagctcgtcggctccctagaaattccccagccgtcgcctgcctcctcgctgacgttctccctcgtcgcgtccgcagcgctaccgcgagttcaacatcgcccaggcgcccccgtactcggtttcaggccattgcaccaaacgcgcatctccaaagtgccatcgagtttcatctcatctcacggtggccagggatcttcgaagaacagaactccgccgccgtggtttggcgcagtgaattacctctacgccgacccgttaactcgcgccattttcggtcgagttcacgcccgcactattggtttgtgagatcactgaagctctctggtaaatgtgtttttgggatctttagtgtagtttacaaattttaagtagtttaagtgtgctctagaaaggattaattgaatatttaggaagcaaatgtgagcaccaaaaattgtgagaactttcgagagtcttgttatcagaagataaactcttggtaagtagtttaagtgtgctctagaaaggattaattgaatatttaggaagcaaatgtgagcaccaaaaattgtgagaacttttgagagtcttgttatcagaaaataaactcttggtaaaagtttgtggctgtttgtaagccatttgctcagaaatccttgtagagtccctaattggaataataagaagaacataatcacatgtggattagaactttggaagaaggaacaagtttaacaagtgaaacctgatctttggataaagaagtaagagtgcatagtgggatctggatttttggcgtagtttgaagattgttctaatcctctagaagttcaagttgtaggattcaaatcagagaagcaagtccttacttaaggcaagcatagagttcttggttatggaggcagagttccctggtgtagtctgagagcttagtgatgatattagaatgtttagctcccctattgtttggttagttttgtgtgcacctttagtaaggtgtagtttgtactgctttaaagtattttttttgtagttgcataagtatatgcattcatgttcatatcatttcatgtagagctcccagcagaaggagtgtaaattcaagatgaagtggttgtgaaagaggagtttgctctagtgcctattcagcaagtggatggagctatctaactggttattgggtagaaaggtcttgagcctcttcactgcaacaaaggcaagccccggtgcatttacccctttcttgtatatacacttaagtctagtgaaatgtgcattaagtttataggaattgcttggtaactattggatgcattgcctaccttgatatccataccttcataaatacttctgatgaagtatcaaaatatgatttacaaaaatgcttagccctgcttagatcttgtggatagaggctgtcttttgcaataatgcctagctcaggggttatcccgaggaaggatggcttctacctgcaagaatatttttattgggagcgtggtgggatcttactgcaaagttccctataatgctcttttcatcctaaggaacacaaacaatcctaaggatggaagtacttaaatcggaacttgggctatgaacaggtgatgttctacccaggttaattaaggattgaatgcgtatgtaggcatgtatgatcaaggactatcttaactggccacatgccctggatatgggacagggtaagcttaaacccggctattccatacatgaaaagacaatcgcacactgggagtggagagatggcgagagtggcacgtaccctcctggcaaaggaccgcctaaaaagggtggtgtgctctcgggtggcgcggacctgttcatgtagtggaggatctgtgggaacggttgacatatgcaagggttaagtgctacatatgtcgtgtggttagagatcctcagctgagtaaatcgattcggatcgccgttatatccccggagagtggagacttgatctccgacctacaacctaagtcaggatgtaaacattatgaataaaaatgatgttgtattgatgagatggtgaaattagactagatgctaccagagtctattaatatttaatctggcgttaaaatattgaaagtaaggactcactttagtaaactatttctgcaaaagtatctaagttgattcttgctaaagccttttccttgattcctacttaaccagcacatccttgagagtcatttttccttagttgggtaagacttgcgaaagtacactccgtactcagggttttcgaacccatgttgttgtaggtgatgaggagtactctatgtgttcgtgaggctggagagcgtttccagttctagaggaggactagctaggtttatatataagctttggagggtttctaccttcctgcttttgtaataagttatgcactttgagtatatcaggacttgtaataaatattactctttagaaacatgtaaaacttgagttttgaaaaggtaaagaatgtttgtaaagtcttccgctctttatctccgaagtgtgtgtatcgaatatgattactgtaatatgcatgtatggtgggagatccttgggatgatgagttcaagtggttgaactcgtgacagccttgttaagttacctggtacacgtgcacagccatctgaggccatcaaggcaaggattggtgcatgtaggtctgataacttgggagggctgccacagatatatcgggtcgtgccggtccggcactaaaatatttcatgtcgtgccgtgccagggccgtgctttttttccgtgcttcgggccggcccatcaggcctggcccaaatgtacacctatacaccaaaccagctctgtggtgcaccggaccgagttcctagataggttggtttttaggactctggcagatggcgtgccggactagaggtgcgcaccagattgattacgtaaagagtaagttttcagacctagagcagtttggctgaaagaaactcggtccttagtggactcctcaacggagacgtaggtttccgtggaacagaactcgagtaaacaaaatgacgtgttctttgtgttcttgtgattgcaatttgttttcctcctttcttccctaagttctattgcgtttgatcctcaatatacattctcatgttgttctatgttttaattcctcagattcaagataacaacatacacaagtataacctatccctttactccggtaaaactgtatcgtgttctaacctctagttagaatcgagttttgtttttagttgataaatttcaggttctcgcctactcaatccgctctagcgactttcacagctccaaacaactccttacaaggttgttaatgttatatatcaaaactttcatttagaacttgcaaggcttttaggctttgcgttgcaaaattgccatcgttatttcaattgtttactattcacaaatatgcattgaatatttatttcatcaataagttcttttaccatatctttttgaatagtggggtcgcagatgtgcaaactgacaaccattcaacaaacttaaattgtctaatacactagacctgatccaatgttagattaagactagttcgggtcaagttaggaaaaaataatagtgttaaaatctgtctcaagctcaacccaaggcattagcgggttggatcatatcaggctagttttttttaatctttttgcactttgggtaaaaaaaattaagataaggttattgccacatggaaaatcatggtccaaatccaacacaatgtattggcaggtcgaaccgagtttttcgggtgaattagattatattgaggtgaccaactatttcatatgttgtttggtttcaaaaataagctagtttatatcacttcccatattttactttttatttgaaataaaatggattgacagactcataagtattaagctaatattattataaagaataaattcattttatcaaaaaaataaaaatatttttataatatatcacatcttctgaaatgatttcattcctcaaataaacatactctagaatttcagcgagtgagcaacgtcgcgcactcgcgcccaagttttatcgtgaaaaatctaagcggcctttcgcccgtccgcatccttgtttcacgggcttttgtgggggccaacatattttgggctttagaagcctagcctgttatattgctataacatattcatgggctttagaagcctagcccgttataatatagagactaatcttacctgagcaggccttaaaaaaacgcccttaaaaaatgcgacaaggatctggcaatctcgtctcacctgatcttttttgctaaaaaaaactctagaaacaaagacagagagaaaaaagaaagctaaggagtcgaagaggaaaaggagaggtggccaggtggtggtgggggacgaccggacgaggaagtagtggcctgtgcgtgccgtcgcggaggagggggtggcgatggagaagggcgcgggcacgcggcggcggcggctggtggaaaggggatcggatcgccttgccttcatcaccggccagacgcgcagcctctcctgcgacccgattccagattcaccacttcgttcacagtttgaaggtggcactcgtgatgatgggttcagcgagagaaatcagttgcagaagtcagaacctagcgacctggtacctggatttcaagatcctggtactcgccaaggagtcaaggctagaaccttaagctatgatgccctggtacctgaatttgaacgagctggtggccgccaagaaaataacgcaagtaccttgagctatgaagacgaacttttccgcaaatttaagatgggcagtgcagtccctgaaattcagccagtaaatcaaacaccattgcatacccatgatcaggaaactgtgagtaacaatataattcatgctggagttagtaagaatactagtcatgatggagttagtaagaatacaagtcatgatgaagtggcaagtgtccaacctagcagagaagcggaaatgagacccagatctgcacctccaagccaatcaacccaagcggacaattcaggttggtctgtggaaactctgatggaactcttagatttcactccacaggaaataaccaaggccatttcggcgaccgagagtaaccgtttcgtagcatctgtcgtcattgctttcctggtggttctgtcaaactggggccttgacattggtggtgccatcaccagagtattagttggtacaaggcctcttctatttctcattgtaaccaacatcaccattgtcttcacattgttgatggagaacaaagaccccaatgtgagaagcagacccgttggcgtcaatctgggttcagctgatagcttagggcagatgctagagatcgggttgctgctacagaaagcactaggtgctctgctgattgactgcagcgtttgcgctgttattatgatatgttttcttggattctgagggagcctgggtagaagtctcacagaaacctttgtaattttttttgtctcatgctctggactgttattccattttgtaacatctcattttggctgagttctaatttatgcacccatgttttctgtttttctgagcgtctgtagttaattagagattacttgaaccaggtcaatggatacagactacagagcgaagagcgaatattcttggtgatcttatatcttgattatttagcgctagtttggcaatctcatttttacaagggattctcatttttctaagataaagtaaactatttttttgaaaaaaataaaaa

SEQ ID NO: 74759 - DNA, 5075 bp, Zea Mays
ctcccttctcgtagtgcccctcgcattctgttctcagcccgctctcctctctgctcggtctccccagtactcgcctcgcctggacacgccgttctgttgttaccacttgtcagtcacgatctcttccttcgtggagtttgcgtgttgggagtccgtggatcatggctgaaactgcacgcgttctcgtctccttgctctggcacatcattgtgtggagctgctgaacgccactgtctctagctcctgtatcgccgtgccggcgctcggctccccaacttcgctgttgcctactggacctgctgctctctctgcaacagctcgtcggctccctagaaattccccagccgtcgcctgcctcctcgctgacgttctccctcgtcgcgtccgcagcgctaccgcgagttcaacatcgcccaggcgcccccgtactcggtttcaggccattgcaccaaacgcgcatctccaaagtgccatcgagtttcatctcatctcacggtggccagggatcttcgaaggtttcctcgaccgtaactccgccgccgtggtttggcgcagtgaattacctctacgccgacccgttaactcgcgccattttcggtcgagttcacgcccgcactattggtttgtgagatcactgaagctctctggtaaatgtgtttttgggatctttagtgtagtttacaaattttaagtagtttaagtgtgctctagaaaggattaattgaatatttaggaagcaaatgtgagcaccaaaaattgtgagaactttcgagagtcttgttatcagaagataaactcttggtaagtagtttaagtgtgctctagaaaggattaattgaatatttaggaagcaaatgtgagcaccaaaaattgtgagaacttttgagagtcttgttatcagaaaataaactcttggtaaaagtttgtggctgtttgtaagccatttgctcagaaatccttgtagagtccctaattggaataataagaagaacataatcacatgtggattagaactttggaagaaggaacaagtttaacaagtgaaacctgatctttggataaagaagtaagagtgcatagtgggatctggatttttggcgtagtttgaagattgttctaatcctctagaagttcaagttgtaggattcaaatcagagaagcaagtccttacttaaggcaagcatagagttcttggttatggaggcagagttccctggtgtagtctgagagcttagtgatgatattagaatgtttagctcccctattgtttggttagttttgtgtgcacctttagtaaggtgtagtttgtactgctttaaagtattttttttgtagttgcataagtatatgcattcatgttcatatcatttcatgtagagctcccagcagaaggagtgtaaattcaagatgaagtggttgtgaaagaggagtttgctctagtgcctattcagcaagtggatggagctatctaactggttattgggtagaaaggtcttgagcctcttcactgcaacaaaggcaagccccggtgcatttacccctttcttgtatatacacttaagtctagtgaaatgtgcattaagtttataggaattgcttggtaactattggatgcattgcctaccttgatatccataccttcataaatacttctgatgaagtatcaaaatatgatttacaaaaatgcttagccctgcttagatcttgtggatagaggctgtcttttgcaataatgcctagctcaggggttatcccgaggaaggatggcttctacctgcaagaatatttttattgggagcgtggtgggatcttactgcaaagttccctataatgctcttttcatcctaaggaacacaaacaatcctaaggatggaagtacttaaatcggaacttgggctatgaacaggtgatgttctacccaggttaattaaggattgaatgcgtatgtaggcatgtatgatcaaggactatcttaactggccacatgccctggatatgggacagggtaagcttaaacccggctattccatacatgaaaagacaatcgcacactgggagtggagagatggcgagagtggcacgtaccctcctggcaaaggaccgcctaaaaagggtggtgtgctctcgggtggcgcggacctgttcatgtagtggaggatctgtgggaacggttgacatatgcaagggttaagtgctacatatgtcgtgtggttagagatcctcagctgagtaaatcgattcggatcgccgttatatccccggagagtggagacttgatctccgacctacaacctaagtcaggatgtaaacattatgaataaaaatgatgttgtattgatgagatggtgaaattagactagatgctaccagagtctattaatatttaatctggcgttaaaatattgaaagtaaggactcactttagtaaactatttctgcaaaagtatctaagttgattcttgctaaagccttttccttgattcctacttaaccagcacatccttgagagtcatttttccttagttgggtaagacttgcgaaagtacactccgtactcagggttttcgaacccatgttgttgtaggtgatgaggagtactctatgtgttcgtgaggctggagagcgtttccagttctagaggaggactagctaggtttatatataagctttggagggtttctaccttcctgcttttgtaataagttatgcactttgagtatatcaggacttgtaataaatattactctttagaaacatgtaaaacttgagttttgaaaaggtaaagaatgtttgtaaagtcttccgctctttatctccgaagtgtgtgtatcgaatatgattactgtaatatgcatgtatggtgggagatccttgggatgatgagttcaagtggttgaactcgtgacagccttgttaagttacctggtacacgtgcacagccatctgaggccatcaaggcaaggattggtgcatgtaggtctgataacttgggagggctgccacagatatatcgggtcgtgccggtccggcactaaaatatttcatgtcgtgccgtgccagggccgtgctttttttccgtgcttcgggccggcccatcaggcctggcccaaatgtacacctatacaccaaaccagctctgtggtgcaccggaccgagttcctagataggttggtttttaggactctggcagatggcgtgccggactagaggtgcgcaccagattgattacgtaaagagtaagttttcagacctagagcagtttggctgaaagaaactcggtccttagtggactcctcaacggagacgtaggtttccgtggaacagaactcgagtaaacaaaatgacgtgttctttgtgttcttgtgattgcaatttgttttcctcctttcttccctaagttctattgcgtttgatcctcaatatacattctcatgttgttctatgttttaattcctcagattcaagataacaacatacacaagtataacctatccctttactccggtaaaactgtatcgtgttctaacctctagttagaatcgagttttgtttttagttgataaatttcaggttctcgcctactcaatccgctctagcgactttcacagctccaaacaactccttacaagaaacaaagacagagagaaaaaagaaagctaaggagtcgaagaggaaaaggagaggtggccaggtggtggtgggggacgaccggacgaggaagtagtggcctgtgcgtgccgtcgcggaggagggggtggcgatggagaagggcgcgggcacgcggcggcggcggctggtggaaaggggatcggatcgccttgccttcatcaccggccagacgcgcagcctctcctgcgacccgattccagattcaccacttcgttcacagtttgaaggtggcactcgtgatgatgggttcagcgagagaaatcagttgcagaagtcagaacctagcgacctggtacctggatttcaagatcctggtactcgccaaggagtcaaggctagaaccttaagctatgatgccctggtacctgaatttgaacgagctggtggccgccaagaaaataacgcaagtaccttgagctatgaagacgaacttttccgcaaatttaagatgggcagtgcagtccctgaaattcagccagtaaatcaaacaccattgcatacccatgatcaggaaactgtgagtaacaatataattcatgctggagttagtaagaatactagtcatgatggagttagtaagaatacaagtcatgatgaagtggcaagtgtccaacctagcagagaagcggaaatgagacccagatctgcacctccaagccaatcaacccaagcggacaattcaggttggtctgtggaaactctgatggaactcttagatttcactccacaggaaataaccaaggccatttcggcgaccgagagtaaccgtttcgtagcatctgtcgtcattgctttcctggtggttctgtcaaactggggccttgacattggtggtgccatcaccagagtattagttggtacaaggcctcttctatttctcattgtaaccaacatcaccattgtcttcacattgttgatggagaacaaagaccccaatgtgagaagcagacccgttggcgtcaatctgggttcagctgatagcttagggcagatgctagagatcgggttgctgctacagaaagcactaggtgctctgctgattgactgcagcgtttgcgctgttattatgatatgttttcttggattctgagggagcctgggtagaagtctcacagaaacctttgtaattttttttgtctcatgctctggactgttattccattttgtaacatctcattttggctgagttctaatttatgcacccatgttttctgtttttctgagcgtctgtagttaattagagattacttgaaccaggtcaatggatacagactacagagcgaagagcgaatattcttggtgatcttatatcttgattatttagcgctagtttggcaatctcatttttacaagggattctcatttttctaagataaagtaaactatttttttgaaaaaaataaaaa

SEQ ID NO: 74760 - DNA, 3782 bp, Zea Mays
cccagccgtcgcctgcctcctcgctgacgttctccctcgtcgcgtccgcagcgctaccgcgagttcaacatcgcccaggcgcccccgtactcggtttcaggccattgcaccaaacgcgcatctccaaagtgccatcgagtttcatctcatctcacggtggccagggatcttcgaagaactccgccgccgtggtttggcgcagtgaattacctctacgccgacccgttaactcgcgccattttcggtcgagttcacgcccgcactattggtttgtgagatcactgaagctctctggtgatgaggagtactctatgtgttcgtgaggctggagagcgtttccagttctagaggaggactagctaggtttatatataagctttggagggtttctaccttcctgcttttgtaataagttatgcactttgagtatatcaggacttgtaataaatattactctttagaaacatgtaaaacttgagttttgaaaaggtaaagaatgtttgtaaagtcttccgctctttatctccgaagtgtgtgtatcgaatatgattactgtaatatgcatgtatggtgggagatccttgggatgatgagttcaagtggttgaactcgtgacagccttgttaagttacctggtacacgtgcacagccatctgaggccatcaaggcaaggattggtgcatgtaggtctgataacttgggagggctgccacagatatatcgggtcgtgccggtccggcactaaaatatttcatgtcgtgccgtgccagggccgtgctttttttccgtgcttcgggccggcccatcaggcctggcccaaatgtacacctatacaccaaaccagctctgtggtgcaccggaccgagttcctagataggttggtttttaggactctggcagatggcgtgccggactagaggtgcgcaccagattgattacgtaaagagtaagttttcagacctagagcagtttggctgaaagaaactcggtccttagtggactcctcaacggagacgtaggtttccgtggaacagaactcgagtaaacaaaatgacgtgttctttgtgttcttgtgattgcaatttgttttcctcctttcttccctaagttctattgcgtttgatcctcaatatacattctcatgttgttctatgttttaattcctcagattcaagataacaacatacacaagtataacctatccctttactccggtaaaactgtatcgtgttctaacctctagttagaatcgagttttgtttttagttgataaatttcaggttctcgcctactcaatccgctctagcgactttcacagctccaaacaactccttacaaggttgttaatgttatatatcaaaactttcatttagaacttgcaaggcttttaggctttgcgttgcaaaattgccatcgttatttcaattgtttactattcacaaatatgcattgaatatttatttcatcaataagttcttttaccatatctttttgaatagtggggtcgcagatgtgcaaactgacaaccattcaacaaacttaaattgtctaatacactagacctgatccaatgttagattaagactagttcgggtcaagttaggaaaaaataatagtgttaaaatctgtctcaagctcaacccaaggcattagcgggttggatcatatcaggctagttttttttaatctttttgcactttgggtaaaaaaaattaagataaggttattgccacatggaaaatcatggtccaaatccaacacaatgtattggcaggtcgaaccgagtttttcgggtgaattagattatattgaggtgaccaactatttcatatgttgtttggtttcaaaaataagctagtttatatcacttcccatattttactttttatttgaaataaaatggattgacagactcataagtattaagctaatattattataaagaataaattcattttatcaaaaaaataaaaatatttttataatatatcacatcttctgaaatgatttcattcctcaaataaacatactctagaatttcagcgagtgagcaacgtcgcgcactcgcgcccaagttttatcgtgaaaaatctaagcggcctttcgcccgtccgcatccttgtttcacgggcttttgtgggggccaacatattttgggctttagaagcctagcctgttatattgctataacatattcatgggctttagaagcctagcccgttataatatagagactaatcttacctgagcaggccttaaaaaaacgcccttaaaaaatgcgacaaggatctggcaatctcgtctcacctgatcttttttgctaaaaaaaactctagaaacaaagacagagagaaaaaagaaagctaaggagtcgaagaggaaaaggagaggtggccaggtggtggtgggggacgaccggacgaggaagtagtggcctgtgcgtgccgtcgcggaggagggggtggcgatggagaagggcgcgggcacgcggcggcggcggctggtggaaaggggatcggatcgccttgccttcatcaccggccagacgcgcagcctctcctgcgacccgattccagattcaccacttcgttcacagtttgaaggtggcactcgtgatgatgggttcagcgagagaaatcagttgcagaagtcagaacctagcgacctggtacctggatttcaagatcctggtactcgccaaggagtcaaggctagaaccttaagctatgatgccctggtacctgaatttgaacgagctggtggccgccaagaaaataacgcaagtaccttgagctatgaagacgaacttttccgcaaatttaagatgggcagtgcagtccctgaaattcagccagtaaatcaaacaccattgcatacccatgatcaggaaactgtgagtaacaatataattcatgctggagttagtaagaatactagtcatgatggagttagtaagaatacaagtcatgatgaagtggcaagtgtccaacctagcagagaagcggaaatgagacccagatctgcacctccaagccaatcaacccaagcggacaattcaggttggtctgtggaaactctgatggaactcttagatttcactccacaggaaataaccaaggccatttcggcgaccgagagtaaccgtttcgtagcatctgtcgtcattgctttcctggtggttctgtcaaactggggccttgacattggtggtgccatcaccagagtattagttggtacaaggcctcttctatttctcattgtaaccaacatcaccattgtcttcacattgttgatggagaacaaagaccccaatgtgagaagcagacccgttggcgtcaatctgggttcagctgatagcttagggcagatgctagagatcgggttgctgctacagaaagcactaggtgctctgctgattgactgcagcgtttgcgctgttattatgatatgttttcttggattctgagggagcctgggtagaagtctcacagaaacctttgtaattttttttgtctcatgctctggactgttattccattttgtaacatctcattttggctgagttctaatttatgcacccatgttttctgtttttctgagcgtctgtagttaattagagattacttgaaccaggtcaatggatacagactacagagcgaagagcgaatattcttggtgatcttatatcttgattatttagcgctagtttggcaatctcatttttacaagggattctcatttttctaagataaagtaaactatttttttgaaaaaaataaaaa

SEQ ID NO: 74761 - DNA, 3966 bp, Zea Mays
gtccgcagcgctaccgcgagttcaacatcgcccaggcgcccccgtactcggtttcaggccattgcaccaaacgcgcatctccaaagtgccatcgagtttcatctcatctcacggtggccagggatcttcgaaggtttcctcgaccaacagaactccgccgccgtggtttggcgcagtgaattacctctacgccgacccgttaactcgcgccattttcggtcgagttcacgcccgcactattggtttgtgagatcactgaagctctctgagctcccagcagaaggagtgtaaattcaagatgaagtggttgtgaaagaggagtttgctctagtgcctattcagcaagtggatggagctatctaactggttattgggtagaaaggtcttgagcctcttcactgcaacaaaggcaagccccggtgcatttacccctttcttgtatatacacttaagtctagtgaaatgtgcattaagtttataggaattgcttggtaactattggatgcattgcctaccttgatatccataccttcataaatacttctgatgaagtatcaaaatatgatttacaaaaatgcttagccctgcttagatcttgtggatagaggctgtcttttgcaataatgcctagctcaggggttatcccgaggaaggatggcttctacctgcaagaatatttttattgggagcgtggtgggatcttactgcaaagttccctataatgctcttttcatcctaaggaacacaaacaatcctaaggatggaagtacttaaatcggaacttgggctatgaacaggtgatgttctacccaggttaattaaggattgaatgcgtatgtaggcatgtatgatcaaggactatcttaactggccacatgccctggatatgggacagggtaagcttaaacccggctattccatacatgaaaagacaatcgcacactgggagtggagagatggcgagagtggcacgtaccctcctggcaaaggaccgcctaaaaagggtggtgtgctctcgggtggcgcggacctgttcatgtagtggaggatctgtgggaacggttgacatatgcaagggttaagtgctacatatgtcgtgtggttagagatcctcagctgagtaaatcgattcggatcgccgttatatccccggagagtggagacttgatctccgacctacaacctaagtcaggatgtaaacattatgaataaaaatgatgttgtattgatgagatggtgaaattagactagatgctaccagagtctattaatatttaatctggcgttaaaatattgaaagtaaggactcactttagtaaactatttctgcaaaagtatctaagttgattcttgctaaagccttttccttgattcctacttaaccagcacatccttgagagtcatttttccttagttgggtaagacttgcgaaagtacactccgtactcagggttttcgaacccatgttgttgtaggtgatgaggagtactctatgtgttcgtgaggctggagagcgtttccagttctagaggaggactagctaggtttatatataagctttggagggtttctaccttcctgcttttgtaataagttatgcactttgagtatatcaggacttgtaataaatattactctttagaaacatgtaaaacttgagttttgaaaaggtaaagaatgtttgtaaagtcttccgctctttatctccgaagtgtgtgtatcgaatatgattactgtaatatgcatgtatggtgggagatccttgggatgatgagttcaagtggttgaactcgtgacagccttgttaagttacctggtacacgtgcacagccatctgaggccatcaaggcaaggattggtgcatgtaggtctgataacttgggagggctgccacagatatatcgggtcgtgccggtccggcactaaaatatttcatgtcgtgccgtgccagggccgtgctttttttccgtgcttcgggccggcccatcaggcctggcccaaatgtacacctatacaccaaaccagctctgtggtgcaccggaccgagttcctagataggttggtttttaggactctggcagatggcgtgccggactagaggtgcgcaccagattgattacgtaaagagtaagttttcagacctagagcagtttggctgaaagaaactcggtccttagtggactcctcaacggagacgtaggtttccgtggaacagaactcgagtaaacaaaatgacgtgttctttgtgttcttgtgattgcaatttgttttcctcctttcttccctaagttctattgcgtttgatcctcaatatacattctcatgttgttctatgttttaattcctcagattcaagataacaacatacacaagtataacctatccctttactccggtaaaactgtatcgtgttctaacctctagttagaatcgagttttgtttttagttgataaatttcaggttctcgcctactcaatccgctctagcgactttcacagctccaaacaactccttacaagaaacaaagacagagagaaaaaagaaagctaaggagtcgaagaggaaaaggagaggtggccaggtggtggtgggggacgaccggacgaggaagtagtggcctgtgcgtgccgtcgcggaggagggggtggcgatggagaagggcgcgggcacgcggcggcggcggctggtggaaaggggatcggatcgccttgccttcatcaccggccagacgcgcagcctctcctgcgacccgattccagattcaccacttcgttcacagtttgaaggtggcactcgtgatgatgggttcagcgagagaaatcagttgcagaagtcagaacctagcgacctggtacctggatttcaagatcctggtactcgccaaggagtcaaggctagaaccttaagctatgatgccctggtacctgaatttgaacgagctggtggccgccaagaaaataacgcaagtaccttgagctatgaagacgaacttttccgcaaatttaagatgggcagtgcagtccctgaaattcagccagtaaatcaaacaccattgcatacccatgatcaggaaactgtgagtaacaatataattcatgctggagttagtaagaatactagtcatgatggagttagtaagaatacaagtcatgatgaagtggcaagtgtccaacctagcagagaagcggaaatgagacccagatctgcacctccaagccaatcaacccaagcggacaattcaggttggtctgtggaaactctgatggaactcttagatttcactccacaggaaataaccaaggccatttcggcgaccgagagtaaccgtttcgtagcatctgtcgtcattgctttcctggtggttctgtcaaactggggccttgacattggtggtgccatcaccagagtattagttggtacaaggcctcttctatttctcattgtaaccaacatcaccattgtcttcacattgttgatggagaacaaagaccccaatgtgagaagcagacccgttggcgtcaatctgggttcagctgatagcttagggcagatgctagagatcgggttgctgctacagaaagcactaggtgctctgctgattgactgcagcgtttgcgctgttattatgatatgttttcttggattctgagggagcctgggtagaagtctcacagaaacctttgtaattttttttgtctcatgctctggactgttattccattttgtaacatctcattttggctgagttctaatttatgcacccatgttttctgtttttctgagcgtctgtagttaattagagattacttgaaccaggtcaatggatacagactacagagcgaagagcgaatattcttggtgatcttatatcttgattatttagcgctagtttggcaatctcatttttacaagggattctcatttttctaagataaagtaaactatttttttgaaaaaaataaaaa

SEQ ID NO: 74762 - DNA, 1229 bp, Zea Mays
ggctcgttttgtgctcacttaagattcaccacttcgttcacagtttgaaggtggcactcgtgatgatgggttcagcgagagaaatcagttgcagaagtcagaacctagcgacctggtacctggatttcaagatcctggtactcgccaaggagtcaaggctagaaccttaagctatgatgccctggtacctgaatttgaacgagctggtggccgccaagaaaataacgcaagtaccttgagctatgaagacgaacttttccgcaaatttaagatgggcagtgcagtccctgaaattcagccagtaaatcaaacaccattgcatacccatgatcaggaaactgtgagtaacaatataattcatgctggagttagtaagaatactagtcatgatggagttagtaagaatacaagtcatgatgaagtggcaagtgtccaacctagcagagaagcggaaatgagacccagatctgcacctccaagccaatcaacccaagcggacaattcaggttggtctgtggaaactctgatggaactcttagatttcactccacaggaaataaccaaggccatttcggcgaccgagagtaaccgtttcgtagcatctgtcgtcattgctttcctggtggttctgtcaaactggggccttgacattggtggtgccatcaccagagtattagttggtacaaggcctcttctatttctcattgtaaccaacatcaccattgtcttcacattgttgatggagaacaaagaccccaatgtgagaagcagacccgttggcgtcaatctgggttcagctgatagcttagggcagatgctagagatcgggttgctgctacagaaagcactaggtgctctgctgattgactgcagcgtttgcgctgttattatgatatgttttcttggattctgagggagcctgggtagaagtctcacagaaacctttgtaattttttttgtctcatgctctggactgttattccattttgtaacatctcattttggctgagttctaatttatgcacccatgttttctgtttttctgagcgtctgtagttaattagagattacttgaaccaggtcaatggatacagactacagagcgaagagcgaatattcttggtgatcttatatcttgattatttagcgctagtttggcaatctcatttttacaagggattctcatttttctaagataaagtaaactatttttttgaaaaaaataaaaa

SEQ ID NO: 74763 - DNA, 1338 bp, Zea Mays
cagaaggagtgtaaattcaagatgaagtggttgtgaaagaggagtttgctctagtgcctattcagcaagtggatggagctatctaactggttattgggtagaaaggtcttgagcctcttcactgcaacaaagattcaccacttcgttcacagtttgaaggtggcactcgtgatgatgggttcagcgagagaaatcagttgcagaagtcagaacctagcgacctggtacctggatttcaagatcctggtactcgccaaggagtcaaggctagaaccttaagctatgatgccctggtacctgaatttgaacgagctggtggccgccaagaaaataacgcaagtaccttgagctatgaagacgaacttttccgcaaatttaagatgggcagtgcagtccctgaaattcagccagtaaatcaaacaccattgcatacccatgatcaggaaactgtgagtaacaatataattcatgctggagttagtaagaatactagtcatgatggagttagtaagaatacaagtcatgatgaagtggcaagtgtccaacctagcagagaagcggaaatgagacccagatctgcacctccaagccaatcaacccaagcggacaattcaggttggtctgtggaaactctgatggaactcttagatttcactccacaggaaataaccaaggccatttcggcgaccgagagtaaccgtttcgtagcatctgtcgtcattgctttcctggtggttctgtcaaactggggccttgacattggtggtgccatcaccagagtattagttggtacaaggcctcttctatttctcattgtaaccaacatcaccattgtcttcacattgttgatggagaacaaagaccccaatgtgagaagcagacccgttggcgtcaatctgggttcagctgatagcttagggcagatgctagagatcgggttgctgctacagaaagcactaggtgctctgctgattgactgcagcgtttgcgctgttattatgatatgttttcttggattctgagggagcctgggtagaagtctcacagaaacctttgtaattttttttgtctcatgctctggactgttattccattttgtaacatctcattttggctgagttctaatttatgcacccatgttttctgtttttctgagcgtctgtagttaattagagattacttgaaccaggtcaatggatacagactacagagcgaagagcgaatattcttggtgatcttatatcttgattatttagcgctagtttggcaatctcatttttacaagggattctcatttttctaagataaagtaaactatttttttgaaaaaaataaaaa

SEQ ID NO: 74764 - DNA, 1253 bp, Zea Mays
gtcagacatatgcttgttgggaaattgccacaaagaagtaagacaagattcaccacttcgttcacagtttgaaggtggcactcgtgatgatgggttcagcgagagaaatcagttgcagaagtcagaacctagcgacctggtacctggatttcaagatcctggtactcgccaaggagtcaaggctagaaccttaagctatgatgccctggtacctgaatttgaacgagctggtggccgccaagaaaataacgcaagtaccttgagctatgaagacgaacttttccgcaaatttaagatgggcagtgcagtccctgaaattcagccagtaaatcaaacaccattgcatacccatgatcaggaaactgtgagtaacaatataattcatgctggagttagtaagaatactagtcatgatggagttagtaagaatacaagtcatgatgaagtggcaagtgtccaacctagcagagaagcggaaatgagacccagatctgcacctccaagccaatcaacccaagcggacaattcaggttggtctgtggaaactctgatggaactcttagatttcactccacaggaaataaccaaggccatttcggcgaccgagagtaaccgtttcgtagcatctgtcgtcattgctttcctggtggttctgtcaaactggggccttgacattggtggtgccatcaccagagtattagttggtacaaggcctcttctatttctcattgtaaccaacatcaccattgtcttcacattgttgatggagaacaaagaccccaatgtgagaagcagacccgttggcgtcaatctgggttcagctgatagcttagggcagatgctagagatcgggttgctgctacagaaagcactaggtgctctgctgattgactgcagcgtttgcgctgttattatgatatgttttcttggattctgagggagcctgggtagaagtctcacagaaacctttgtaattttttttgtctcatgctctggactgttattccattttgtaacatctcattttggctgagttctaatttatgcacccatgttttctgtttttctgagcgtctgtagttaattagagattacttgaaccaggtcaatggatacagactacagagcgaagagcgaatattcttggtgatcttatatcttgattatttagcgctagtttggcaatctcatttttacaagggattctcatttttctaagataaagtaaactatttttttgaaaaaaataaaaa

SEQ ID NO: 74765 - DNA, 1598 bp, Zea Mays
tccaaaaataaaatccaatcgaggggaaaaataatccttttcccgttcttctgaagctgtcctcttcttcccgtcgcttcgccgtcccgcaccagggaggagaggaggcttcaccgcgaagctcgccatgatctcgccggagaggagttcgtcacagagcccgcggtcgcaggcggtggcgggggcgccattcctgtggatatctgtcatggatcccgtcagatgggcaccggcgtgcaggcctacatctcctaccgcgtcatcaccaagaccaacctccctgaatttgagggaccagagaaaattgttattcgacgctatagtgattttgaatggttgcatgatcggcttgctgagaggtacaaaggcgtttttatacctccccttccggagaagaatgctgttgagaaattccggtttagcaaggagttcattgaattgcgtcgtcaagctttggatttatttgttaacaggatagcttcacaccctgaactcaagcaaagtgatgtcttgaggacatttttgcaggcagatgaagagataatggatagggcaagatcttatgagaccggtatttttaagaaaccatcagattttttacagatgtttaaggacgtacagtcaaaagtcagtgatgttgttctgggaaaagaaaagcccgtggaggaatctactcctgaatatgagaagcttaaaagttacatatttgagctagaaattcatttagcagaggcccaaaaacaagcataccgtcttgtgaaaagacacagagaacttggacaatctttggcggacttcggaaaggcgattaagcttttgggctcttgtgaaggagatttgatggaaaaggtgttttctgaagttggttcaaagtcagagatgttgtcaataaagctacaaagagagacaaccttctctttaactttgaagaacccttgaaagattatgtgcgtgctctacaatctataaaagccactatgctggatcgagctaatgctttcaggcagcactttgatttggatcaggagaggaagtataaagagcttaatcttgaaaaattgaagttcatgaaccctgagaagtatgccgaagcagaatctgagtttagagggttgaaagcagacagtgaggaggctacgaagaagtttgaacacatagtaagactaatgaacgaagagctctctcgtttccaggagcagaaaacagctgacattggactcgcattccatgaatttgccaagggtcaggctaagctagctaaggacattgcggatgcatggcgcagcgtcctcccaaagctcgaagcttgttccacatcataaagtgtgatccgtgtttcctcatgatgtttgggaaggggttggtagctggtgaggtttaggctgttttttttttccagcctgttttgacacggattcctgtatacttgaactgcgggttggaaatgtaccagctgttagattcagttgacataatttcttgctgtttgagcctgtaaccatcatctcttcttagatcaattgacacaactgctggaatcgcgtaataatggtaatcaataatgaagaaatgctgtaccacggtgctggttcctgtaa

SEQ ID NO: 74766 - DNA, 1506 bp, Zea Mays
tccaaaaataaaatccaatcgaggggaaaaataatccttttcccgttcttctgaagctgtcctcttcttcccgtcgcttcgccgtcccgcaccagggaggagaggaggcttcaccgcgaagctcgccatgatctcgccggagaggagttcgtcacagagcccgcggtcgcaggcggtggcgggggcgccattcctgtggatatctgtcatggatcccgtcagatgggcaccggcgtgcaggcctacatctcctaccgcgtcatcaccaagaccaacctccctgaatttgagggaccagagaaaattgttattcgacgctatagtgattttgaatggttgcatgatcggcttgctgagaggtacaaaggcgtttttatacctccccttccggagaagaatgctgttgagaaattccggtttagcaaggagttcattgaattgcgtcgtcaagctttggatttatttgttaacaggatagcttcacaccctgaactcaagcaaagtgatgtcttgaggacatttttgcaggcagatgaagagataatggatagggcaagatcttatgagaccggtatttttaagaaaccatcagattttttacagatgtttaagcagtcaaaagtcagtgatgttgttctgggaaaagaaaagcccgtggaggaatctactcctgaatatgagaagcttaaaagttacatatttgagctagaaattcatttagcagaggcccaaaaacaagcataccgtcttgtgaaaagacacagagaacttggacaatctttggcggacttcggaaaggcgattaagcttttgggctcttgtgaaggagatttgatggaaaaggtgttttctgaagttggttcaaagtcagagatgttgtcaataaagctacaaagagaggcagacaaccttctctttaactttgaagaacccttgaaagattatgtgcgtgctctacaatctataaaagccactatgctggatcgagctaatgctttcaggcagcactttgatttggatcaggagaggaagtataaagagcttaatcttgaaaaattgaagttcatgaaccctgagaagtatgccgaagcagaatctgagtttagagggttgaaagcagacagtgaggaggctacgaagaagtttgaacacatagctaagctagctaaggacattgcggatgcatggcgcagcgtcctcccaaagctcgaagcttgttccacatcataaagtgtgatccgtgtttcctcatgatgtttgggaaggggttggtagctggtgaggtttaggctgttttttttttccagcctgttttgacacggattcctgtatacttgaactgcgggttggaaatgtaccagctgttagattcagttgacataatttcttgctgtttgagcctgtaaccatcatctcttcttagatcaattgacacaactgctggaatcgcgtaataatggtaatcaataatgaagaaatgctgtaccacggtgctggttcctgtaa

SEQ ID NO: 74767 - DNA, 1509 bp, Zea Mays
tccaaaaataaaatccaatcgaggggaaaaataatccttttcccgttcttctgaagctgtcctcttcttcccgtcgcttcgccgtcccgcaccagggaggagaggaggcttcaccgcgaagctcgccatgatctcgccggagaggagttcgtcacagagcccgcggtcgcaggcggtggcgggggcgccattcctgtggatatctgtcatggatcccgtcagatgggcaccggcgtgcaggcctacatctcctaccgcgtcatcaccaagaccaacctccctgaatttgagggaccagagaaaattgttattcgacgctatagtgattttgaatggttgcatgatcggcttgctgagaggtacaaaggcgtttttatacctccccttccggagaagaatgctgttgagaaattccggtttagcaaggagttcattgaattgcgtcgtcaagctttggatttatttgttaacaggatagcttcacaccctgaactcaagcaaagtgatgtcttgaggacatttttgcaggcagatgaagagataatggatagggcaagatcttatgagaccggtatttttaagaaaccatcagattttttacagatgtttaagtcaaaagtcagtgatgttgttctgggaaaagaaaagcccgtggaggaatctactcctgaatatgagaagcttaaaagttacatatttgagctagaaattcatttagcagaggcccaaaaacaagcataccgtcttgtgaaaagacacagagaacttggacaatctttggcggacttcggaaaggcgattaagcttttgggctcttgtgaaggagatttgatggaaaaggtgttttctgaagttggttcaaagtcagagatgttgtcaataaagctacaaagagaggcagacaaccttctctttaactttgaagaacccttgaaagattatgtgcgtgctctacaatctataaaagccactatgctggatcgagctaatgctttcaggcagcactttgatttggatcaggagaggaagtataaagagcttaatcttgaaaaattgaagttcatgaaccctgagaagtatgccgaagcagaatctgagtttagagggttgaaagcagacagtgaggaggctacgaagaagtttgaacacataggtcaggctaagctagctaaggacattgcggatgcatggcgcagcgtcctcccaaagctcgaagcttgttccacatcataaagtgtgatccgtgtttcctcatgatgtttgggaaggggttggtagctggtgaggtttaggctgttttttttttccagcctgttttgacacggattcctgtatacttgaactgcgggttggaaatgtaccagctgttagattcagttgacataatttcttgctgtttgagcctgtaaccatcatctcttcttagatcaattgacacaactgctggaatcgcgtaataatggtaatcaataatgaagaaatgctgtaccacggtgctggttcctgtaa

SEQ ID NO: 74768 - DNA, 1701 bp, Zea Mays
tccaaaaataaaatccaatcgaggggaaaaataatccttttcccgttcttctgaagctgtcctcttcttcccgtcgcttcgccgtcccgcaccagggaggagaggaggcttcaccgcgaagctcgccatgatctcgccggagaggagttcgtcacagagcccgcggtcgcaggcggtggcgggggcgccattcctgtggatatctgtcatggatcccgtcagatgggcaccggcgtgcaggcctacatctcctaccgcgtcatcaccaagaccaacctccctgaatttgagggaccagagaaaattgttattcgacgctatagtgattttgaatggttgcatgatcggcttgctgagaggtacaaaggcgtttttatacctccccttccggagaagaatgctgttgagaaattccggtttagcaaggagttcattgaattgcgtcgtcaagctttggatttatttgttaacaggatagcttcacaccctgaactcaagcaaagtgatgtcttgaggacatttttgcaggcagatgaagaggtctccgtaggataactgctaataactacgtaactcttatgtccagtgatcatttgacctgatctcttgctgaaatttccatcacaacataaataataaataatggatagggcaagatcttatgagaccggtatttttaagaaaccatcagattttttacagatgtttaaggacgtacagtcaaaagtcagtgatgttgttctgggaaaagaaaagcccgtggaggaatctactcctgaatatgagaagcttaaaagttacatatttgagctagaaattcatttagcagaggcccaaaaacaagcataccgtcttgtgaaaagacacagagaacttggacaatctttggcggacttcggaaaggcgattaagcttttgggctcttgtgaaggagatttgatggaaaaggtgttttctgaagttggttcaaagtcagagatgttgtcaataaagctacaaagagaggcagacaaccttctctttaactttgaagaacccttgaaagattatgtgcgtgctctacaatctataaaagccactatgctggatcgagctaatgctttcaggcagcactttgatttggatcaggagaggaagtataaagagcttaatcttgaaaaattgaagttcatgaaccctgagaagtatgccgaagcagaatctgagtttagagggttgaaagcagacagtgaggaggctacgaagaagtttgaacacatagtaagactaatgaacgaagagctctctcgtttccaggagcagaaaacagctgacattggactcgcattccatgaatttgccaagggtcaggctaagctagctaaggacattgcggatgcatggcgcagcgtcctcccaaagctcgaagcttgttccacatcataaagtgtgatccgtgtttcctcatgatgtttgggaaggggttggtagctggtgaggtttaggctgttttttttttccagcctgttttgacacggattcctgtatacttgaactgcgggttggaaatgtaccagctgttagattcagttgacataatttcttgctgtttgagcctgtaaccatcatctcttcttagatcaattgacacaactgctggaatcgcgtaataatggtaatcaataatgaagaaatgctgtaccacggtgctggttcctgtaa

SEQ ID NO: 74769 - DNA, 1442 bp, Zea Mays
tccaaaaataaaatccaatcgaggggaaaaataatccttttcccgttcttctgaagctgtcctcttcttcccgtcgcttcgccgtcccgcaccagggaggagaggaggcttcaccgcgaagctcgccatgatctcgccggagaggagttcgtcacagagcccgcggtcgcaggcggtggcgggggcgccattcctgtggatatctgtcatggatcccgtcagatgggcaccggcgtgcaggcctacatctcctaccgcgtcatcaccaagaccaacctccctgaatttgagggaccagagaaaattgttattcgacgctatagtgattttgaatggttgcatgatcggcttgctgagaggtacaaaggcgtttttatacctccccttccggagaagaatgctgttgagaaattccggtttagcaaggagttcattgaattgcgtcgtcaagctttggatttatttgttaacaggatagcttcacaccctgaactcaagcaaagtgatgtcttgaggacatttttgcaggcagatgaagagataatggatagggcaagatcttatgagaccggtatttttaagaaaccatcagattttttacagatgtttaagaacttggacaatctttggcggacttcggaaaggcgattaagcttttgggctcttgtgaaggagatttgatggaaaaggtgttttctgaagttggttcaaagtcagagatgttgtcaataaagctacaaagagaggcagacaaccttctctttaactttgaagaacccttgaaagattatgtgcgtgctctacaatctataaaagccactatgctggatcgagctaatgctttcaggcagcactttgatttggatcaggagaggaagtataaagagcttaatcttgaaaaattgaagttcatgaaccctgagaagtatgccgaagcagaatctgagtttagagggttgaaagcagacagtgaggaggctacgaagaagtttgaacacatagtaagactaatgaacgaagagctctctcgtttccaggagcagaaaacagctgacattggactcgcattccatgaatttgccaagggtcaggctaagctagctaaggacattgcggatgcatggcgcagcgtcctcccaaagctcgaagcttgttccacatcataaagtgtgatccgtgtttcctcatgatgtttgggaaggggttggtagctggtgaggtttaggctgttttttttttccagcctgttttgacacggattcctgtatacttgaactgcgggttggaaatgtaccagctgttagattcagttgacataatttcttgctgtttgagcctgtaaccatcatctcttcttagatcaattgacacaactgctggaatcgcgtaataatggtaatcaataatgaagaaatgctgtaccacggtgctggttcctgtaa

SEQ ID NO: 74770 - DNA, 1488 bp, Zea Mays
tccaaaaataaaatccaatcgaggggaaaaataatccttttcccgttcttctgaagctgtcctcttcttcccgtcgcttcgccgtcccgcaccagggaggagaggaggcttcaccgcgaagctcgccatgatctcgccggagaggagttcgtcacagagcccgcggtcgcaggcggtggcgggggcgccattcctgtggatatctgtcatggatcccgtcagatgggcaccggcgtgcaggcctacatctcctaccgcgtcatcaccaagaccaacctccctgaatttgagggaccagagaaaattgttattcgacgctatagtgattttgaatggttgcatgatcggcttgctgagaggatagcttcacaccctgaactcaagcaaagtgatgtcttgaggacatttttgcaggcagatgaagagataatggatagggcaagatcttatgagaccggtatttttaagaaaccatcagattttttacagatgtttaaggacgtacagtcaaaagtcagtgatgttgttctgggaaaagaaaagcccgtggaggaatctactcctgaatatgagaagcttaaaagttacatatttgagctagaaattcatttagcagaggcccaaaaacaagcataccgtcttgtgaaaagacacagagaacttggacaatctttggcggacttcggaaaggcgattaagcttttgggctcttgtgaaggagatttgatggaaaaggtgttttctgaagttggttcaaagtcagagatgttgtcaataaagctacaaagagaggcagacaaccttctctttaactttgaagaacccttgaaagattatgtgcgtgctctacaatctataaaagccactatgctggatcgagctaatgctttcaggcagcactttgatttggatcaggagaggaagtataaagagcttaatcttgaaaaattgaagttcatgaaccctgagaagtatgccgaagcagaatctgagtttagagggttgaaagcagacagtgaggaggctacgaagaagtttgaacacatagtaagactaatgaacgaagagctctctcgtttccaggagcagaaaacagctgacattggactcgcattccatgaatttgccaagggtcaggctaagctagctaaggacattgcggatgcatggcgcagcgtcctcccaaagctcgaagcttgttccacatcataaagtgtgatccgtgtttcctcatgatgtttgggaaggggttggtagctggtgaggtttaggctgttttttttttccagcctgttttgacacggattcctgtatacttgaactgcgggttggaaatgtaccagctgttagattcagttgacataatttcttgctgtttgagcctgtaaccatcatctcttcttagatcaattgacacaactgctggaatcgcgtaataatggtaatcaataatgaagaaatgctgtaccacggtgctggttcctgtaa

SEQ ID NO: 74771 - DNA, 1145 bp, Zea Mays
taactgctaataactacgtaactcttatgtccagtgatcatttgacctgatctcttgctgaaatttccatcacaacataaataataaataatggatagggcaagatcttatgagaccggtatttttaagaaaccatcagattttttacagatgtttaaggacgtacagtcaaaagtcagtgatgttgttctgggaaaagaaaagcccgtggaggaatctactcctgaatatgagaagcttaaaagttacatatttgagctagaaattcatttagcagaggcccaaaaacaagcataccgtcttgtgaaaagacacagagaacttggacaatctttggcggacttcggaaaggcgattaagcttttgggctcttgtgaaggagatttgatggaaaaggtgttttctgaagttggttcaaagtcagagatgttgtcaataaagctacaaagagagacaaccttctctttaactttgaagaacccttgaaagattatgtgcgtgctctacaatctataaaagccactatgctggatcgagctaatgctttcaggcagcactttgatttggatcaggagaggaagtataaagagcttaatcttgaaaaattgaagttcatgaaccctgagaagtatgccgaagcagaatctgagtttagagggttgaaagcagacagtgaggaggctacgaagaagtttgaacacatagtaagactaatgaacgaagagctctctcgtttccaggagcagaaaacagctgacattggactcgcattccatgaatttgccaagggtcaggctaagctagctaaggacattgcggatgcatggcgcagcgtcctcccaaagctcgaagcttgttccacatcataaagtgtgatccgtgtttcctcatgatgtttgggaaggggttggtagctggtgaggtttaggctgttttttttttccagcctgttttgacacggattcctgtatacttgaactgcgggttggaaatgtaccagctgttagattcagttgacataatttcttgctgtttgagcctgtaaccatcatctcttcttagatcaattgacacaactgctggaatcgcgtaataatggtaatcaataatgaagaaatgctgtaccacggtgctggttcctgtaa

SEQ ID NO: 74772 - DNA, 2651 bp, Zea Mays
ctcgtcgttcaccatcagcggaggcggccccggaacgaggtgctgactggtgagccgacgagcaagacgacaagagccacccccacccaccacatctcagaccacaaacgccatcatgcaccgactctgatccaatttcacacgcatactagcgccgccggtagcagcaccggcagccgcgttcctctccgccatggatcccgcgaacagcagcgcgggcgccgagctcgacgacgcgtccgagtggcgcacccgggcgctgggcggcacggagtacagctggctccgcgccgtgccgggcggcaccggcaccacgctgctcgcgctccgcctatcccgcggcgacgcggccgaggcggcgctgcgctccctgcgggacgcgcaccccgtcctccgcgcccgcctccggacctcttctccctccggcccgacgctggcgttccccgatccggcaccgccgttcccgctggcgccgctcccggccccgggctccgcgcccgacttccacgcgctcctcgagcacgagctcaaccgcaacccgtgggccgacgaccccgcgtcctccgacgacgccccggtcctcttcgcgacgctctacgagctcccagccgccacgggcgacgcggcgctgttcgtccggatccacacggtcgcgtgcgaccgctcggcggcgagtgcgctggccagggagctcgtcgcgctgctggccggcgccggcggcgaggagcccgacccggaggatgcggcggcggaagcggggctggaggcgaggatcccccagagggacacctggaagccgttctgggcgcgcgggttggatatggtgggctactccatcaacggcctgcggacgtccacgctgccgttcgtggagaccggcacggagaggtccacgcagatgctgcggctcgggctcggcctcgacgagacgacgaggctgctcgacgcgtgcaaggagaacggggtgaggctgtgctccgccgtggccgccgcgacgatgctcgccgcgcggcagtcgaagccgctggagagcggccagcaggagacgtactctgtcgtgacccttatcaattgccgcaagtttcttgagccagtcttggaggaccgcaacgttgggttcttctactccgccatcaccaacacgcacacgatccacggcggggaagggctgtgggagctggccaagagatgccacgactcgtacaccagcgccaagagcaacaagaaacacctcaccgacatcaacgacctcaacttcctcatgtgccgggccatcgagaacccccagctgacgaccgccggcgcgctacggacggcgctcgtctccgtgttcgaggaccccgtggtcgccgacgtggccgaggtgcagagcaaggccggcgtggaggactgcgtctgctgcgccaccgtgcacggcatcggcccgtcgatcggcgtgttcgactcgatcaaggacggcaagctggactgggcgtgcgtctacccttctcctctgcactccaggaagcaggtccaggagatcttcgacaaggtgacgcagattttgcaccatgcagctgcggctgaggaaaattttggagactgcacctaacgatgtcgtcgggagctttagactgtgttcaacggtgtgcccttggctccccctcccctaccactgtagccgatttaggggctacagtgcgcccctaaatccttcaccggcttcctcctcctcctcctctcccctcccgattccttctctctcccgctaaatggatgggcacgctacgccggatttctcccccgcggtcggttcgttgggccacacaatcgcgcggtcggaaaactccgcggagggcaaaggaggcgaagcaagggcgacgtatccgccgccggagaaggtagccgtcgatccgcttcattggaacttcaaggtccacccgcgatgagcaaagcaggcggtcgatccggcgcggcggtcgggtatggcggccgcggagcagctgaaggagctgggggagaagctgcaggcggtggtgccggctcctgcggatgaactcgccaagctcctcgaggtagttctggttgatttggttcaagatgacggaggaaaaggtggggcggatcttcatcggcgggctgtcgtgtaacaccacgaagcgcacgctcgagcgcaccttcggtcagtacggcaaggtcatcgaggctcagtcagttcaatttctgcatgttaggaagttagcaaagttgctggaaaagaaattcactaatcatgtgagctcactggttagcatttttgcggtgatgggttcagtaaagatcaattggaggcatatacactgttagattcagttttgctaggtgtgatctgttttgtggacagaaccagatacctgtttttggcttgttagcacttaagataactgctgccagctttagaacacaaaagaatcatcaccggcatggttaatgaactccagtcaagtaaacatggttgcattaagaagtgtctagctctagcaggaccttgaatgctgtgtttatacggtggtttaattttggtaatttcgatactatttatcgcaggagacagttctattatgtttgacatatgtgcatgtgttgaaagaccaaatgcccatccatatgtgttagggaaggaaactgtccag

SEQ ID NO: 74773 - DNA, 2953 bp, Zea Mays
cttcttctcgtctatatagacagacagtccatcgccaccgctctcagctctttccttctggtctctcgttggtcgtagagctagcggcggcggccatatatggtgcaaggcgaggagagttcctggaggatggagagggcagcgctgcctctcaaccaggcgctcgcgtatggagtccaagcccacggcgccggcggcgccgccgctgcgccgccgacctgcttcctggacttccaccagcctgcggccgcggccgctgcctacttcgggttcggggagctggaggaggccctcatccatggcggcggcggcggcgtcgatcccggcgtgatcaccaagaacgacgtcgcgcaggcaaagtcggcggcggcggcggcaggatatctcgcgggtgctgctgccaggccgcccacgctggagatcttcccttcgttgccaatgaggcatcaacagcagctgcacagtgggaattcgcagtcagtagggagcaccactgactcgagctcagcccagaacgcaatgtctcagatggagctggcgtccccagcagcctcctctgcgccgcggcaggaggccatgatggtgaccgctgatggttacagctacaagccaggcctcgccgctgcggctgccggtgccgccccgccgagctttcagtttcagcagcagcaccagcaccaccacccgctcccgctgcacggagacggaggtggagaccatgacaagtgtcattcgcacgtacagaggaagcatggatccacaggaaaagatggcaagctggtagatgccaagacggaacggcggctggcgcagaacagagaggctgcgaggaagagcaggctgaggaagaaggcttacgtgcagcagctcgagactaccaggatcaggcttcagcacgtcgagcacgagttccagagagcacggtcacactcacagggcgtgggcgttggggggtgcggcgccgccggggacatgagctgtggcgccgccatgttcgacatggagtacgcgcggtggctggacgacgacagcaagcggctggcggagctccgaggcgggctgcaggcgcacctgctgctggacgccaacctgggcctcatcgtggaggagtgcatgcagcaccacgacgagctgttccagctcaaggcggcgctcgcgcgctccgacgtcttccacctcctcaccggctcctggaccacccccgccgagcgctgcttcttctggatgggaggcttccgcccgtctgagctgctcaaggtcctgataccgcagctggacccgctgacggagcagcagctgctggggatctgcagcctgcagcagtcgtcggagcaggcggaggaggcgctcgcccagggcctgcaccagctgcaccaggccctggccgacacagtcgccgccggcacgctcaacgagggctccgccgcccccaactgcatgaacatcatggccgtcgcacttgacaagattgccagcctcgaaaacttctatcaacaggccgacaatctaaggcagcagacgttgcatcagatgcgccgcatcctgaccactcggcaggctgcgcggtgcttcctctctattggggagtactacagccgccttagagctctcagcaacctctgggcttcccgtcccggcgacaccttcatcaggtcagagagcctcagccccacagcaacggaactgcaagccctgcaccaccagcggcagaatcagttcagcggattttgaggccttacctggtggtgcggtggtgtcggagggtgtaaactttggcggcgaaggtgatgttacaaagattagaggttttgagagagagatgcattgtaatgttctatcattaaagtactaagaaagcaatatcactaggcgaaaagggcggggggaaaggaattgctgtggtgcgatgttgggtggctgacctgttcatatggctcttgaactgattgaagggttagccccgcagaattttttgcgggtagcagcagaaaacaaagcagtggcagaagattctggctgctcacttgccagagagcactaattgcagttagagtgacagagtaaccattaaatgcctttttcaaatcaagtattttggcgaacacattttcgtgggcagacaataatctgtcacctgtagttcaacaaatgaaaatgaaacaactaacagtgggagccaatctcccattctagattctgctaagcactgatggaaaagaacgaaactgtgacggtaaagaagcgccgatagtgaaacaactagaaaatattatgcaccctcctaaattatatataagtcgttttgacttttctagatacataaacgaattataatttagaatgaaacatggggagtgcatagcaagaaatatcaatattgtgcaacacatgtaaaaacagcaataggaatcttacataaactgacaagtaaattgtaagatgcaagaccagagcgatcgatggacaaatgaaggaaaggagaagcaattttcacattatttgagatcaacttatcacttatcagtaggctcaaaattccaaaatcaactctgcttccaatatcatctgccatggacagctgaattaggcggttgctgcacaatgcacagaacttcccatcagatgacatgacaaacaacactcatgaaactgtggaaatcttcactccttttactgcaaaatttctgatacagaaagaccagggaaaaaggataaaaagccacaagagcatacagagcagaaaataagcgaggcagaagacttcacaaatcacaaaacaaggttgaaatagatgaaatgaagacaacgaaatacagtttggattgtggaaattgctgaacactaactaccgaatcaagtgaacacaacatagcagcacttttaaatgcaggttggatataagaaacatatcacatatagctataaatgagaacccagcaggaatgcaagaatg

SEQ ID NO: 74774 - DNA, 2511 bp, Zea Mays
gagctagcggcggcggccatatatggtgcaaggcgaggagagttcctggaggatggagagggcagcgctgcctctcaaccaggcgctcgcgtatggagtccaagcccacggcgccggcggcgccgccgctgcgccgccgacctgcttcctggacttccaccagcctgcggccgcggccgctgcctacttcgggttcggggagctggaggaggccctcatccatggcggcggcggcggcgtcgatcccggcgtgatcaccaagaacgacgtcgcgcaggcaaagttgtcattcgcacgtacagaggaagcatggatccacaggaaaagatggcaagctggtagatgccaagacggaacggcggctggcgcagaacagagaggctgcgaggaagagcaggctgaggaagaaggcttacgtgcagcagctcgagactaccaggatcaggcttcagcacgtcgagcacgagttccagagagcacggtcacactcacagggcgtgggcgttggggggtgcggcgccgccggggacatgagctgtggcgccgccatgttcgacatggagtacgcgcggtggctggacgacgacagcaagcggctggcggagctccgaggcgggctgcaggcgcacctgctgctggacgccaacctgggcctcatcgtggaggagtgcatgcagcaccacgacgagctgttccagctcaaggcggcgctcgcgcgctccgacgtcttccacctcctcaccggctcctggaccacccccgccgagcgctgcttcttctggatgggaggcttccgcccgtctgagctgctcaaggtcctgataccgcagctggacccgctgacggagcagcagctgctggggatctgcagcctgcagcagtcgtcggagcaggcggaggaggcgctcgcccagggcctgcaccagctgcaccaggccctggccgacacagtcgccgccggcacgctcaacgagggctccgccgcccccaactgcatgaacatcatggccgtcgcacttgacaagattgccagcctcgaaaacttctatcaacaggccgacaatctaaggcagcagacgttgcatcagatgcgccgcatcctgaccactcggcaggctgcgcggtgcttcctctctattggggagtactacagccgccttagagctctcagcaacctctgggcttcccgtcccggcgacaccttcatcaggtcagagagcctcagccccacagcaacggaactgcaagccctgcaccaccagcggcagaatcagttcagcggattttgaggccttacctggtggtgcggtggtgtcggagggtgtaaactttggcggcgaaggtgatgttacaaagattagaggttttgagagagagatgcattgtaatgttctatcattaaagtactaagaaagcaatatcactaggcgaaaagggcggggggaaaggaattgctgtggtgcgatgttgggtggctgacctgttcatatggctcttgaactgattgaagggttagccccgcagaattttttgcgggtagcagcagaaaacaaagcagtggcagaagattctggctgctcacttgccagagagcactaattgcagttagagtgacagagtaaccattaaatgcctttttcaaatcaagtattttggcgaacacattttcgtgggcagacaataatctgtcacctgtagttcaacaaatgaaaatgaaacaactaacagtgggagccaatctcccattctagattctgctaagcactgatggaaaagaacgaaactgtgacggtaaagaagcgccgatagtgaaacaactagaaaatattatgcaccctcctaaattatatataagtcgttttgacttttctagatacataaacgaattataatttagaatgaaacatggggagtgcatagcaagaaatatcaatattgtgcaacacatgtaaaaacagcaataggaatcttacataaactgacaagtaaattgtaagatgcaagaccagagcgatcgatggacaaatgaaggaaaggagaagcaattttcacattatttgagatcaacttatcacttatcagtaggctcaaaattccaaaatcaactctgcttccaatatcatctgccatggacagctgaattaggcggttgctgcacaatgcacagaacttcccatcagatgacatgacaaacaacactcatgaaactgtggaaatcttcactccttttactgcaaaatttctgatacagaaagaccagggaaaaaggataaaaagccacaagagcatacagagcagaaaataagcgaggcagaagacttcacaaatcacaaaacaaggttgaaatagatgaaatgaagacaacgaaatacagtttggattgtggaaattgctgaacactaactaccgaatcaagtgaacacaacatagcagcacttttaaatgcaggttggatataagaaacatatcacatatagctataaatgagaacccagcaggaatgcaagaatg

SEQ ID NO: 74775 - DNA, 3058 bp, Zea Mays
atggtgcaaggcgaggagagttcctggaggatggagagggcagcgctgcctctcaaccaggcgctcgcgtatggagtccaagcccacggcgccggcggcgccgccgctgcgccgccgacctgcttcctggacttccaccagcctgcggccgcggccgctgcctacttcgggttcggggagctggaggaggccctcatccatggcggcggcggcggcgtcgatcccggcgtgatcaccaagaacgacgtcgcgcaggcaaagtcggcggcggcggcggcaggatatctcgcgggtgctgctgccaggccgcccacgctggagatcttcccttcgttgccaatgaggcatcaacagcagctgcacagtgggaattcgcagtcagtagggagcaccactgactcgagctcagcccagaacgcaatgtctcagatggagctggcgtccccagcagcctcctctgcgccgcggcaggaggccatgatggtgaccgctgatggttacagctacaagccaggcctcgccgctgcggctgccggtgccgccccgccgagctttcagtttcagcagcagcaccagcaccaccacccgctcccgctgcacggagacggaggtggagaccatgacaagaggaagcatggatccacaggaaaagatggcaagctggtagatgccaagacggaacggcggctggcgcagaacagagaggctgcgaggaagagcaggctgaggaagaaggcttacgtgcagcagctcgagactaccaggatcaggcttcagcacgtcgagcacgagttccagagagcacggtcacactcacagggcgtgggcgttggggggtgcggcgccgccggggacatgagctgtggtaatgcccagtcaccgtccgtacatccgcttccttccaattcaagtactaccattgctgcaaaagcttcgccatgcggctgcagctgcggcctgtagctgccgccgcaggccacggcgcagttaccgagaggaacggccggcctgcctgcctcgtttggcgtgaaaaaacttgtgctgctagcagtggagtaactccgtttatacgtacccacgcatacaggcgccgccatgttcgacatggagtacgcgcggtggctggacgacgacagcaagcggctggcggagctccgaggcgggctgcaggcgcacctgctgctggacgccaacctgggcctcatcgtggaggagtgcatgcagcaccacgacgagctgttccagctcaaggcggcgctcgcgcgctccgacgtcttccacctcctcaccggctcctggaccacccccgccgagcgctgcttcttctggatgggaggcttccgcccgtctgagctgctcaaggtcctgataccgcagctggacccgctgacggagcagcagctgctggggatctgcagcctgcagcagtcgtcggagcaggcggaggaggcgctcgcccagggcctgcaccagctgcaccaggccctggccgacacagtcgccgccggcacgctcaacgagggctccgccgcccccaactgcatgaacatcatggccgtcgcacttgacaagattgccagcctcgaaaacttctatcaacaggccgacaatctaaggcagcagacgttgcatcagatgcgccgcatcctgaccactcggcaggctgcgcggtgcttcctctctattggggagtactacagccgccttagagctctcagcaacctctgggcttcccgtcccggcgacaccttcatcaggtcagagagcctcagccccacagcaacggaactgcaagccctgcaccaccagcggcagaatcagttcagcggattttgaggccttacctggtggtgcggtggtgtcggagggtgtaaactttggcggcgaaggtgatgttacaaagattagaggttttgagagagagatgcattgtaatgttctatcattaaagtactaagaaagcaatatcactaggcgaaaagggcggggggaaaggaattgctgtggtgcgatgttgggtggctgacctgttcatatggctcttgaactgattgaagggttagccccgcagaattttttgcgggtagcagcagaaaacaaagcagtggcagaagattctggctgctcacttgccagagagcactaattgcagttagagtgacagagtaaccattaaatgcctttttcaaatcaagtattttggcgaacacattttcgtgggcagacaataatctgtcacctgtagttcaacaaatgaaaatgaaacaactaacagtgggagccaatctcccattctagattctgctaagcactgatggaaaagaacgaaactgtgacggtaaagaagcgccgatagtgaaacaactagaaaatattatgcaccctcctaaattatatataagtcgttttgacttttctagatacataaacgaattataatttagaatgaaacatggggagtgcatagcaagaaatatcaatattgtgcaacacatgtaaaaacagcaataggaatcttacataaactgacaagtaaattgtaagatgcaagaccagagcgatcgatggacaaatgaaggaaaggagaagcaattttcacattatttgagatcaacttatcacttatcagtaggctcaaaattccaaaatcaactctgcttccaatatcatctgccatggacagctgaattaggcggttgctgcacaatgcacagaacttcccatcagatgacatgacaaacaacactcatgaaactgtggaaatcttcactccttttactgcaaaatttctgatacagaaagaccagggaaaaaggataaaaagccacaagagcatacagagcagaaaataagcgaggcagaagacttcacaaatcacaaaacaaggttgaaatagatgaaatgaagacaacgaaatacagtttggattgtggaaattgctgaacactaactaccgaatcaagtgaacacaacatagcagcacttttaaatgcaggttggatataagaaacatatcacatatagctataaatgagaacccagcaggaatgcaagaatg

SEQ ID NO: 74776 - DNA, 3048 bp, Zea Mays
atggtgcaaggcgaggagagttcctggaggatggagagggcagcgctgcctctcaaccaggcgctcgcgtatggagtccaagcccacggcgccggcggcgccgccgctgcgccgccgacctgcttcctggacttccaccagcctgcggccgcggccgctgcctacttcgggttcggggagctggaggaggccctcatccatggcggcggcggcggcgtcgatcccggcgtgatcaccaagaacgacgtcgcgcaggcaaagtcggcggcggcggcggcaggatatctcgcgggtgctgctgccaggccgcccacgctggagatcttcccttcgttgccaatgaggcatcaacagcagctgcacagtgggaattcgcagtcagtagggagcaccactgactcgagctcagcccagaacgcaatgtctcagatggagctggcgtccccagcagcctcctctgcgccgcggcaggaggccatgatggtgaccgctgatggttacagctacaagccaggcctcgccgctgcggctgccggtgccgccccgccgagctttcagtttcagcagcagcaccagcaccaccacccgctcccgctgcacggagacggaggtggagaccatgacaagaggaagcatggatccacaggaaaagatggcaagctggtagatgccaagacggaacggcggctggcgcagaacagagaggctgcgaggaagagcaggctgaggaagaaggcttacgtgcagcagctcgagactaccaggatcaggcttcagcacgtcgagcacgagttccagagagcacggtcacactcacagggcgtgggcgttggggggtgcggcgccgccggggacatgagctgtggcgccgccatgttcgacatggagtacgcgcggtggctggacgacgacagcaagcggctggcggagctccgaggcgggctgcaggcgcacctgctgctggacgccaacctgggcctcatcgtggaggagtgcatgcagcaccacgacgagctgttccagctcaaggcggcgctcgcgcgctccgacgtcttccacctcctcaccggctcctggaccacccccgccgagcgctgcttcttctggatgggaggcttccgcccgtctgagctgctcaaggtcctgataccgcagctggacccgctgacggagcagcagctgctggggatctgcagcctgcagcagtcgtcggagcaggcggaggaggcgctcgcccagggcctgcaccagctgcaccaggccctggccgacacagtcgccgccggcacgctcaacgagggctccgccgcccccaactgcatgaacatcatggccgtcgcacttgacaagattgccagcctcgaaaacttctatcaacaggccgacaatctaaggcagcagacgttgcatcagatgcgccgcatcctgaccactcggcaggctgcgcggtgcttcctctctattggggagtactacagccgccttagagctctcagcaacctctgggcttcccgtcccggcgagtatgtttcacaagcttgatcacctgcaaaaacttgactctccattagtgtcatgttgatcaactgcactgtggctgttcccaaccatgtctgaatcacatgtattccttcatttttttttaaagatagggtcacctgttttcggaattcattatatgaaaaaagtcagaaatggacgtggctgacaatgacatgtatttctcgtgtaacagcaccttcatcaggtcagagagcctcagccccacagcaacggaactgcaagccctgcaccaccagcggcagaatcagttcagcggattttgaggccttacctggtggtgcggtggtgtcggagggtgtaaactttggcggcgaaggtgatgttacaaagattagaggttttgagagagagatgcattgtaatgttctatcattaaagtactaagaaagcaatatcactaggcgaaaagggcggggggaaaggaattgctgtggtgcgatgttgggtggctgacctgttcatatggctcttgaactgattgaagggttagccccgcagaattttttgcgggtagcagcagaaaacaaagcagtggcagaagattctggctgctcacttgccagagagcactaattgcagttagagtgacagagtaaccattaaatgcctttttcaaatcaagtattttggcgaacacattttcgtgggcagacaataatctgtcacctgtagttcaacaaatgaaaatgaaacaactaacagtgggagccaatctcccattctagattctgctaagcactgatggaaaagaacgaaactgtgacggtaaagaagcgccgatagtgaaacaactagaaaatattatgcaccctcctaaattatatataagtcgttttgacttttctagatacataaacgaattataatttagaatgaaacatggggagtgcatagcaagaaatatcaatattgtgcaacacatgtaaaaacagcaataggaatcttacataaactgacaagtaaattgtaagatgcaagaccagagcgatcgatggacaaatgaaggaaaggagaagcaattttcacattatttgagatcaacttatcacttatcagtaggctcaaaattccaaaatcaactctgcttccaatatcatctgccatggacagctgaattaggcggttgctgcacaatgcacagaacttcccatcagatgacatgacaaacaacactcatgaaactgtggaaatcttcactccttttactgcaaaatttctgatacagaaagaccagggaaaaaggataaaaagccacaagagcatacagagcagaaaataagcgaggcagaagacttcacaaatcacaaaacaaggttgaaatagatgaaatgaagacaacgaaatacagtttggattgtggaaattgctgaacactaactaccgaatcaagtgaacacaacatagcagcacttttaaatgcaggttggatataagaaacatatcacatatagctataaatgagaacccagcaggaatgcaagaatg

SEQ ID NO: 74777 - DNA, 392 bp, Zea Mays
cggcgcagtccgggaccgaccttcttggcgctcacattctcccttgcctgctccatcatcttctccaccagctgaaacagacacaaaaagccatggcagggttgccttcaggacactgtcttgtcttgacagagcatatcgactgttacactgacaactagcaaatgaccggtactccgtaaaaggaagcgattgagtgaaacttgttactgtaccatctttttcttcgacagcagaatcgtcctctgcaaaacaaaaacgcaacacggacgtcgtgtttgatcagatcaatgcatagtagtatactagatatgaataaggagatggtgtcatgacgaacaaatgcttcgccttcccagtacctcctctgctctgaggcgctcgttctcctc

SEQ ID NO: 74778 - DNA, 3249 bp, Zea Mays
atgccgtcgcccatcaccgggtatacagcgccgggcggcggcgccgccgctgccgccacctggtacatcatgggaggagccgcgttgtgctgcatgcccatcgggccggccgggaccatgccgacgccgtggccgtggccggcgaaggcgccccgcacgacgccggccttcacgaggaagtcctccagcgtcatctcgcccagcgtcgcctgccgcccgctggccgcgacgccgccgccgctcgccgcctggggctgcgccacgggctgcggcgccgcgctggcctggaagtccgccgggccctggctgatctcggcccagacctcctccaccgtcttccgggacagcggcggcggcagcgcgaacgaaccctgccgaaccagtcccctcccacttcctcctcctcctccgttctcacctgtgcccgtcgtcgtcgccacgggcaccggctcacgctccgcgccctccttgttgcagccggctgtggcggcctggaactcctcggcgttccatatgttggccatgaactcgtccatgttcatggatccgaagttgcggcccggctcgcacagcgagttctgcagctcctccagcgtcagcgacataatggacgactgccgcgccagcgggtccaccgcctgctgttgctgctgctgctcctcggcagcgtcgctggtctgggcgcgtgagtgctgcgaggtgacctcctgctcgtcgagggccttcacgtttttgctcatctcggacgccatctctcagtcgacctatgagactggctccttttaggacactctctgctgatgcgttgttgaacgcgacgcgtgcttatagcctgcatgcgaaagccaggcgtggtgatcagaaaacattggtgcatgcatcgagaaaacccaggtgcggtgccgggtaggggcttcatcgtcatcaataacaaacagccagtccaaattacgcgcgcagccgcagtttgctgcgcttcggtcaggctctgatgactgatcggcatcgtctctagcatgcgtggatagacgcttcctctgtttggatctttgttcagaagtgaattaccagcagcttcttgcagaggatcttctgcgctctccggcgtcgcatgttgcgcagaggccagagcgcagtacttatcctgacagaataatctacgcaccccagtgcaggaccctgacgaacattcagcacgtgcttgttgtcgacttctccaccgccgcacgagatcagatagatacagggagcggtgttgttacacaaaagagtatacgacgaaacctcgggctccttttccccggttctgttatgtattaattatttttttatataccagtgagctcggcgtgctctgttccgttgcctggcagaggccaaaattagcgcgtgtgagtgtgacgttgctctccggccgtttcctaaacgggacaggtcactgctgatggaccgcgaggaggcgtgaccatctgaaccgggtttcctacggcttcccgacgagcacgagcacgctgttgacatctagctcggctgcagccaagacacctcagtgtatgttaccgacgtagcgtgatcgtctactcctattcattcaaactcgaatggcgcgtccggcgtgcctcgcggaatttgtatctgcatgacgtacttgtccgggtacagtgtagaagggtgtttggtttgccttgtttgtttattgccaatacatttggattaaataagattgaaataaaataacaaaatttttgatttgtttgggatttaaatccaaacgttctcactcaatctatatatagattgagaattgagagcgaaccgaacataaaatgagtggtttactagcattaaatatagtttaattataaaattaattatacagctaaataataaaatataaaatgaatttattaaaaccaaataattgataatcaaacattattatttaagcatttgatgtgatacgaactaaactaaaaactaaattttagtcgcaaaaccgtacatgctctcaaaagagcatgccctctaaaaataacatgtagccacaagcctgtttggattttcaagtttagctaaaagtatagtgctaaaatttagtaccatgctccaaaagatccgttgtacttggggcgcttcatcgcgaaagtgtatgccaattgttgcgggtacatggtactacttttatcagggctggactgttaaggcttattccaacaattccttctctcatcgcactctatttatactttctattcattttcaaatacaccatactctttggttctttcccctctctattagggctggacatttttaaatagatttaggtttgtttctaaataattgaaactgtgcaaaaaaaaatattaaaaaaatatgctgtagtaacattaatgttgttatatcctagtcctccgtgacaacatgattgcatcaggtgacatattcagaatgctctgcttttaaatcactctttgctttgctctgttggtatctgaccattgcagttgcagctggcgttactaaaagactggcgacgcatactaacttcttggatctacatctacttcaactccgtgaacgacaggcatcggtgctgaatacgagcagagtttcacaaatcaccttttatatcctagatgtggaatgctcaactacttcgaaatctatgcagacaacagacacattgcagcacctcctgtatgattcggcatgcaagatttgttgtctctatacactgcgaaaccatgtgttccatctctctgtaattacaacgaggcgattgctacagctagcgccaaatattcatctacacaaccgagttaataacgaaatactagtattttttttttaccattttcatcagatttattctgtatgtgtgctctggatttcatgcatgatgtttgcattcagtagcaacaaaaaaacagtcacgaaaggcaatactgtattaccaaacaaggggcgtggcaaagccgcgcagagtagggttctagtcatctagtgctgtggtcacggattgcgcggcgaacagtattaccagaccacaggcaaacacctcgcatttctaactgaaaaccccaaacaaaacgagcagagatgtctgcatatgctgaaacggaggtggagagcgaaggcgaggcgaggcgaggcgacgcggtgcgtacctcctcaggcgccgcggaagccggaagggagccgcccgcctccaggcggccgcgtgcgtccgggtccggcagccgcgat

SEQ ID NO: 74779 - DNA, 345 bp, Zea Mays
ggtaccgcaccgtggtcgccgtgcgggcacgaccggggtcgaagccgaagatcttgcggctgtagacggcgcagctacgccgtcgacgtaggagaatggggctctccggcgcagcaccaactgcatccacttcctcaactcgccgccgtagccaccacaagcacctccatcggctcctcctcctcgatctggggcggcgacctacagcgccccgccctgccttctgtctttgctccctgcatggttgcacccggtgtcctgatctctcctctgccgcatttcaccaatacgtgtgggtgttgtttatcaaatcaggcctgattgtttcctctcactcaattcttt

SEQ ID NO: 74780 - DNA, 1362 bp, Zea Mays
aagccagacatctcatgccacgcctctctatcatcattattcaagacaccggaaatgttaccgcataattttacttaaataaatattgtgtgcctttggaaataaaggaatggttattataagaagaccgaaaacccggtccatctctgtgtggccggtatgcttttaaaaaagaactgctacaaagaattgagtgagaggaaacaatcaggcctgatttgataaacaacccccacacgtattggtgaaatgcggcagaggagagatcaggacaccgggcgtgcaaccatgcagggagcaaagacggaaggcagggcggggcgctgtagctgtaggtcttctctccttttcatttcagtgaaggaaactggaattctcgcactaccgcttattatctgaactcgtacactggccgacctcacttggacttggtgcgtgtgtggtcaggaaggcgacgacgacgacgatgaaggttttgctgctccgcacaccgcgcgcagtggcgacgcgaccacagccggtcgccgcctcggatcgaggaggaggagccgatggaggtgcttgtggtggctacggtggcgaggacattcattggagtgctccattcattgaggcagcatgcctaagataaagacaagccgtgtcaagtatcctgaaggatgggagcttattgaaccaacaatccgtgagttggatgccaaaatgagagaagctgaaaatgatccacatgatgggaagagaaagtgtgaagctctctggcctattttccgcatttctcatcaaaggagccgctacatatacgatctttactacagaaggaaggagatatcacaggagctttatgagttctgcctagaccagggttatgcagaccgtaacctgattgcaaagtggaaaaaggttacgagcgcctttgttgcctccggtgcatacaaacacgtgaccacaacttcgcaacgacatgcgtctgccgcgtccccaagcatctgagggaggaacaggtgatagaatgtgtccactgcggctgcaggggttgtgccagcggtgactaatcttgtcatcatgttgttgggctcacggctcatcatcgcaacgttaaccagatgaggtgccctgctgtgagcatggatccgctgcggtgattagcatgagtttattgggtaactagtggggagtactaaatttcctcacgtttggacgtttcaactgttatgtactacgctttctcgtgtctcagatgcttgcgttaaattagtggcgcttttgcattttatatgagtctgttaattggttattgttatgggttctaacaaaaaaatttctacgatttactacgtttttttttcaaaaaatcagaaaaaa

SEQ ID NO: 74781 - DNA, 1801 bp, Zea Mays
aagccagacatctcatgccacgcctctctatcatcattattcaagacaccggaaatgttaccgcataattttacttaaataaatattgtgtgcctttggaaataaaggaatggttattataagaagaccgaaaacccggtccatctctgtgtggccggtatgcttttaaaaaagaactgctacaaagaattgagtgagaggaaacaatcaggcctgatttgataaacaacccccacacgtattggtgaaatgcggcagaggagagatcaggacaccgggcgtgcaaccatgcagggagcaaagacggaaggcagggcggggcgctgtagctgcgacgacgacgacgatgaaggttttgctgctccgcacaccgcgcgcagtggcgacgcgaccacagccggtcgccgcctcggatcgaggaggaggagccgatggaggtgcttgtggtggctacggtggcgaggtgaggaagtggatgcagttggtgctgcgccggagagccccattctccgacgtcgactgcgtagcttcgccgtctacagccgcaggattttcggcttcgaccccggtcgggcccgcacggcgaccacagtgcggtaccggaatagggttctcggcggcggggacgggtggtgatggggagatttttcatgtccgttcggattcgtctgggaccctcgcgcaacggccgttgtgcgaggccttttctggccgtccagatgagatcgaacggttggggaaaaaagcggagtttagtttctttgcgccgctgagcgctggcagtcgcggcccaagcctgaggtcacagccccacagtcgccccttcggacttccctttattccccttcctatataatcccatcgccactgccttcttcttccgcttccaacttccgttccgcaaatcgaaagctcggcgttgccctgcctcgagctcgaaggactttgtccctttacgtcgttgtccagctcctcgcatattgtggcctggtgcagattggagatccgcccggacttggatcgagtcctccttgctccattcattgaggcagcatgcctaagataaagacaagccgtgtcaagtatcctgaaggatgggagcttattgaaccaacaatccgtgagttggatgccaaaatgagagaagctgaaaatgatccacatgatgggaagagaaagtgtgaagctctctggcctattttccgcatttctcatcaaaggagccgctacatatacgatctttactacagaaggaaggagatatcacaggagctttatgagttctgcctagaccagggttatgcagaccgtaacctgattgcaaagtggaaaaagccaggttacgagcgcctttgttgcctccggtgcatacaaacacgtgaccacaacttcgcaacgacatgcgtctgccgcgtccccaagcatctgagggaggaacaggtgatagaatgtgtccactgcggctgcaggggttgtgccagcggtgactaatcttgtcatcatgttgttgggctcacggctcatcatcgcaacgttaaccagatgaggtgccctgctgtgagcatggatccgctgcggtgattagcatgagtttattgggtaactagtggggagtactaaatttcctcacgtttggacgtttcaactgttatgtactacgctttctcgtgtctcagatgcttgcgttaaattagtggcgcttttgcattttatatgagtctgttaattggttattgttatgggttctaacaaaaaaatttctacgatttactacgtttttttttcaaaaaatcagaaaaaa

SEQ ID NO: 74782 - DNA, 2053 bp, Zea Mays
gcagaaccacgctaaaatctcgcccaaatcatccccgccccagcaatggcgacctccttcggtttcggcagctccgcgaccgcgggctccacggcctcctcccccttctcctccaccccatcagccttctccttctcccagccggcgtctgcctcctcccctgcccccgcctttggctcctccctcttctcctcatcctccgccgccgcttcttctgctccaacttttgggtcctccctgttcagggcctcgtccgccgccgccgcacccgcctcctctcccgctttcggattcggatccaccttctcgttcggtcagtccatggcggcggcctcatcggccgcgtccgcgccatcccttttcggtgcaacgcccgcatcctccgctggaacaacccttagcttattcggcgctgctacctccgccgcaagcagccctgggttcttcggcgccacctccactgccgcaagcagccccggcctcttcggtgcgtccgccactggctctgcggcaacctccccgagtctgttcggtggcacctcgggcctattcggcgggacttcctccgcagcgaccaccccgagcccattcggggccacctcttccacggcggcgacagttagtccgttcggcgccgcctcttctgctgcgtccactccaagcctcttctctggaggggccacgggatttagctttggctcgtcggcgtccggttccaccactaccacggccgccgccccggcaccatcatttggcttctcgttcaactcggggccggccgcgtcaagcactgcatccacgccgacatcagcaccggctttagggtttggcggcgccactggctcgtcgctgttcgggtccaccacctctgcgcccctcttcagtaccaccaccgcttcttctccagcgtctgctgcgaccaccacgccatcctttgggttctcttcttcgccagcaacaaccgcttccgccccatcgtttggctttacaccatcatcaggaagcgcgacgaccgcgaacacggctccttctttgttttcatcatccgccaccacactaaccacaccggcgtcctcgtcctccactggcttctccttggccacttcgcaggctgcacctgctccctcattgttctctaccagtgcaataggtagctcgtctgtcactacgcctggattttcctttggttcatcttcggcagcttctacaccaactttagcctctgtgtttgcaactggttcctccactgtgccatcagcggctgcagcttctgcagcatctgggtcgtcgttcccagctgtttctaccagtggttttagttttgcagttgcgccatcatcatcagcagctgcagctactgccactaccaccactgtcacaagtgcttctacatctgcaggcatgacaaccacggctcctttgactggaacaacggggtttccaaattttaatcttcaaacaactaccccagcttctacctcatctcccacactggcatttggtgagcttacatggttattcaccatctgcagttcttcaattttatgtcttcaatgagacgatgactgaggttcagcggtattttaccatgcctacgtgtctggtttgaaccaattattatgcttctggatttggtcccaatgtcatcattgttacagcatcatattcacacacgaagttacagcctccagtttgtagaacataataacatctcaaatgaatctacatcattgcttcaggtcccaacattattgtaccttcactatactaaccattatacttgtatgtttttcttatactaggtgtttctactactgctgctagctcatcagccaccagcaccacaactcaagcaacttcctcagctgttcaagtcagcagcacaggtccgactactactacatctatcactccagcagcatcccaagcacctaagctaccatcagaaattgttggcaaaaatgttgaggagattattagggactggaacaatgagcttcaagaccgtactgcaaaattcaggaaacatgccaccgcaatagctgaatgggat

SEQ ID NO: 74783 - DNA, 290 bp, Zea Mays
attttatgtcttcaatgagacgatgactgaggttcagcggtgtttctactactgctgctagctcatcagccaccagcaccacaactcaagcaacttcctcagctgttcaagtcagcagcacaggtccgactactactacatctatcactccagcagcatcccaagcacctaagctaccatcagaaattgttggcaaaaatgttgaggagattattagggactggaacaatgagcttcaagaccgtactgcaaaattcaggaaacatgccaccgcaatagctgaatgggat

SEQ ID NO: 74784 - DNA, 954 bp, Zea Mays
tttgaaagtgatgaagatatgctattcccgttcactaatgttattggcaagtgatatggagtttaggttctcaatttattaacaactgatcagtctgaacaacgaaggctgaggtggctaaagttgttgaaacacaaacaggcttggagcgtcaacttgaattgatagaaactcatcaacgagaggtagacaaggctctacagagtatggaggaggaagctgaacgcgtattccaggatgaacgagtgttacttcatgaagatggagctgcttcagcaagagatactatgtatgaacaagcagaagttgtggagcatgaactgcaacatatgacagaacaagtaaaatccatcattcagactatgaatgctactcagggtggtgagctcgagtccgctgatagtatgacaccatttgatgttgctgtccgaatactggataatcaactgcgttccctgatgtggattgatgagaaggttaatgagttctctggcagaatacagaggctgcctaacaacagcgtttcagccgaacgtgactctggaattcccaggttttggttaagctgattaattcgccgcattttcttgcggccctaatcgaggttcagtaaacattcttcgcttggttattctgctgctccaccggccaaggtttcgcgttattttctccccgttcaagcactttggtgccatgtagctctagccggttcactctggattggtaccattcagtgtcacttgtgcacacttcagcatagtttctatttgtttaacgttggacgtgattacggcatgtttggatctatttgtgttaactgttttagaagctaaaattagcactatttacgctattgtgttcaatatggagcacaagtctgcagaactaatctcaactcactttcatcccttaggtcttttttgttttacggttaatccatgtggattgagtgat

SEQ ID NO: 74785 - DNA, 820 bp, Zea Mays
cggctccacaagcccaaggccttggcgtgctttctctgctgtgctgcacgggtagacaaggctctacagagtatggaggaggaagctgaacgcgtattccaggatgaacgagtgttacttcatgaagatggagctgcttcagcaagagatactatgtatgaacaagcagaagttgtggagcatgaactgcaacatatgacagaacaagtaaaatccatcattcagactatgaatgctactcagggtggtgagctcgagtccgctgatagtatgacaccatttgatgttgctgtccgaatactggataatcaactgcgttccctgatgtggattgatgagaaggttaatgagttctctggcagaatacagaggctgcctaacaacagcgtttcagccgaacgtgactctggaattcccaggttttggttaagctgattaattcgccgcattttcttgcggccctaatcgaggttcagtaaacattcttcgcttggttattctgctgctccaccggccaaggtttcgcgttattttctccccgttcaagcactttggtgccatgtagctctagccggttcactctggattggtaccattcagtgtcacttgtgcacacttcagcatagtttctatttgtttaacgttggacgtgattacggcatgtttggatctatttgtgttaactgttttagaagctaaaattagcactatttacgctattgtgttcaatatggagcacaagtctgcagaactaatctcaactcactttcatcccttaggtcttttttgttttacggttaatccatgtggattgagtgat

SEQ ID NO: 74786 - DNA, 822 bp, Zea Mays
gaccgtgtaaccgaaatgtgctctccaatctttggtccctctgatggtatcaaaggctccacagcaagcatgatcttcagcttgggtgtccatggggacgatgtcgtcggggtcatcgtcgtcgccatccttgcttctgaatttacctcatgaggccccaatctcgaacggcaccaggctctcctcccccaatccgttggattaagccacttccgtggtttgacagcctcttcaaaagatgtaccactgctcagtaaatccatctccttggacaaatcacctgtaagttgcaaagttggtgccgaccaagttaggagagggcaggagccggcgcacggtagcgtgtgcggtcggcggcgaaacggggccgacgagtcaggggagggcaagagccggcacagggcagggcgtgcagtcggcggtgaaacagggccgacggttggaggccgtggccgagggtgaggcgggccgatggagcaggcccatgggcgacgacggggacatgaacttgaaggcgaggtcaggaagagaatggcgtggagggcagggaccgaatggaagccgccgcgagggggttagcggcgaagcgtggctggtggtcggaggccgtggccgagggtgatgcctgcgtgctggtggagcgggccacgagcgacagcgggaacagggacccgagactgcctgcgggatgaggagtaatggcgctggtcaggcgtggggcgggtgaggagcgaccgacggcgggtgaggagccgccgcgcgagagccgcgaccgacggagagcctgcggacatctctagggttttttctagatgggccata

SEQ ID NO: 74787 - DNA, 1592 bp, Zea Mays
attcgaattaatattacccatcttgtgatatgctgctatgtggttgtaatgcaatatataaacttttagttatcatgttaccttattaggggggattggaccaaaatccaaatcctaacaaaggaatccaattataatcctactacagaaagtccaccatccagtccaaacatatctcaatgtgcttaagagtctaatttaatccaagtccctcaagttggaatccatccatcatgatccaaccatcagccatcgcattcatcgtgacccaaccatctcaggaaggcgtcttactcttccccttccccatcacaggcaacttgaccaccaagcgaagctgactctctcatctcatctatcatgtcagatctccagccagagctctccgcaaaactactcactgtgaaactccaatgttagccttcatccatcaggcactggacactccacatgatcctcactgcagaactccaagtcatgaccatattgagctactgcttgttgcactccgctacgttactgcctccgtgctctacctcaaggcccatcactacggcatcatcatcaccctacatatgcctttgctttgtgcttgttatagtgatattttctacaatgcatttctgtcatatgtgagaaagcgttctgatggaaaacactcaaagtttcagcatgtatttactgtgttccagttttcaagtcttttgagttttgtttatgctatactgcttgacagttttaaccacctaagacaccaacagtcagagtacaggactgtatctggtgttgctgggcctctgatcatattggataaagtaaagctcattctgcgcgtgaaattgcatcgtaccttgggtgtccatggggacgatgtcgtcggggtcatcgtcgtcgccatccttgcttctgaatttacctcatgaggccccaatctcgaacggcaccaggctctcctcccccaatccgttggattaagccacttccgtggtttgacagcctcttcaaaagatgtaccactgctcagtaaatccatctccttggacaaatcacctgtaagttgcaaagttggtgccgaccaagttaggagagggcaggagccggcgcacggtagcgtgtgcggtcggcggcgaaacggggccgacgagtcaggggagggcaagagccggcacagggcagggcgtgcagtcggcggtgaaacagggccgacggttggaggccgtggccgagggtgaggcgggccgatggagcaggcccatgggcgacgacggggacatgaacttgaaggcgaggtcaggaagagaatggcgtggagggcagggaccgaatggaagccgccgcgagggggttagcggcgaagcgtggctggtggtcggaggccgtggccgagggtgatgcctgcgtgctggtggagcgggccacgagcgacagcgggaacagggacccgagactgcctgcgggatgaggagtaatggcgctggtcaggcgtggggcgggtgaggagcgaccgacggcgggtgaggagccgccgcgcgagagccgcgaccgacggagagcctgcggacatctctagggttttttctagatgggccata

SEQ ID NO: 74788 - DNA, 3802 bp, Zea Mays
taacatcagactttcccaagtggaatattgcttagggcaagctccctccatcggggtcgtagagttggagggcccagtccatctgggaggtcccagtgccgcccgctcaccagttaccagccaggccgtcgggaggggagagagagagagagagacgaaaagatcgagacccatacgctcagatcgaagttcgacttctcctctccccctcccccaacctaacagattcgtgtagcacagatccatccgactttgggttgatttcttcctttgctgctgatcagaaagttacagatggatcatgctgaggtctctggtttgttgtgtattggtacacgtgaaacagatgggggtgaagaatcatatgcggctgagtaccctaaaatggatcaggataccaatgcaacgaccaaatttgatgtagtaatggagacttcagcaatgtatactgatcaaatcaacaccaatgcttgcttagatgaatatcacatgtctggaaaacagcctatggaagaaatgggatttggcagtgcacatccctttgaacttccatcagaaggaatggtagctgattctggggaagaaagcatgccatctagccctgacacatctaccagtaattatgatgcgcctggttacacggagcaaaatctgcagcatatctataattcgtatgatgcactggttgacaaagacggagttgtgcttactcctgccttcatgatatgtgacaaaactttgtatcttgaacctcacctcactttctcattggacgggatcaagattgagtatttggatttagattcctttgaagacgagaagctgtcagctctacaatgggaaatatctaatattatttccatcagttgtaaatggactcgtagtgttggatctgccttaataacactccttgttggatctacagcagaaacaggaaatgcaggtcctgttagagcacgattttctcttgatgattcgcaatggccaaggagacaacagaggatttgggaactgggaccaagatatcaagaaatatggaaagacatcccatcagatgattttgcattggagaattggagcatcgaaccctgtctgtttttccctaggcaatacttttccagcactgaggactttgaagatgttatttatccccaaggagatcctgatgctgtttctattagcaaaagagatgttgagctcctgcttcctgaaacctttgtcaatgatacaataattgacttttatatcaagtacttgagcacaagaattgaatctaccaagaagcgcaggtgccacttctttaatagcttcttttttcgcaagctggcagatcttgacaaagatcaggggagagctccagaaggtagagcagccttcttgcgtgttcgcaaatggacccgcaaaataaatgtatttgacaaagattttctgttcattccagtcaacttcaacttgcattggagtttaattgttatttgctatcctggcgaagtggcgacatttgaagatggtgatgccaagctctcagctaaactcccatgcattttacacatggattcacttaaaggaagtcacactggactcaaggatatcattcaaagttatttatgggaagagtggaaggaaagacaccctgaatcagcatcagataattcagacaagttcttaaacttgagatttgtctcccttgagctccctcagcaggataattcatatgattgtggcttattcttgctccattatgtggaattatttttgacagatgctccaagtaacttcaaccctctgaagattgatgtattttctggctttcttagtgatgattggtttccacccccagaagcttctctgaagcgttcggtggtccgaaagttaattcatgagctggtaactggatcttttcagaatcatcccaagctagcttgtggtggtgagcagcttgacgaaagacatcaaagatgctcaaatcctggtgaacctgaaacagtttgcacagttgatgatggaactccatgaagtacagccatccaagtccatctgtttatatgattccaaagaggggctacctacttctggatgcatgttggacactggaagtgtcccaattgttgatgtacagaatctacaagagtcagaggtttgtgcaccagtgaaggatactgttgtttgcttgtcaatccaggatgagaaaaatgacccacttgcatctaacagtcaacttaatatgagatcatattccccagaaggtgatggcgtgattaaggaatcaaatcgtgtggtgacagataaggaaaatgataagtctttgtttctttctttggataatgaccaaaaagttcacagccaagcagaagctgaggtgcaggatattatggttcgtactagctgctcaatatctgaaattttagctcagaaaattaccagcaaagaacagccctcccaaaaaagcatagaagttggggatgagtgctttagaccttctcaagatatggattatgttatgatgtttgactccagcaaagatgagaatggaccaaatccagaaagattgacagctgaaggtgattgtggcgatcctcatgaacgtctggatttagtcacagtaggtgatatcggaaaaatggttgtagacaatgcaatcatcgaagatgtgaagagtaataacacaactgcaaacaatgtcaatcacggtgagctgcatgtttcattgcagttgccagagggaaacactgacaatggtatgactggtgttagcacagcttcctctttagacataaaagagggaaacaatgacaaagtagtggcagatgcctctgcacatgaaggtgatataaatgacaatggtagctctgaattgaaaataggaaatacgaacagtggtattactggtgttatcgcagcttcctcagacttaaaagaggaaaatattgacaaagtagtggcaggtgactgtgcacatgaaagtgatataaatgctaaggattgcactgagttgaacattggaaatactgataatagtattgctggtgatagtacagtttcccctgaggtgagcgcggaaaacactgatcaaatcatagcaggtgattgtggaaatgaaaccgatttaaaagctgatggtgagggtgctgacaaattcttagcaactgacagtgctcttccttgtgaagatgatgcaacttgcatggatggtgcgaatgtgattgtatcactagatgtaccccgtagcacgaagaatgatacattttccaagaacacatcttctgacgctgaaatgcctctgcctgttggaacctgtgagctcgtcgatagaccttcttccgagaatgacatgtctgagcacacatcttttgatggtaaacggcctgcggatgataggactttggaagagaacgaaatggttatgcctggtgatgaaaaaacagaggtgcattacaagcgacggaaggttttggcctcagagaaacaaagcagcttctccggagcaacttctacagattaggtttggctggtgtgagacttagttttagtttctgggatatgtgacctgtctagtccttgacaatatgctgcctgtgatatagtatatatttctgtaatataaggtactgccactaatgactgtagaaataacaaaaagaactggaatcctgaaccctgatgtctgcttgacagcgtggtttgagaattgagatactgtatatggtctgagtattgcacgacctgcactgcacatgcaagttgcacgatataggctgtttccaaacatgtggaaggccttgtttacctgattagttgggat

SEQ ID NO: 74789 - DNA, 3528 bp, Zea Mays
taacatcagactttcccaagtggaatattgcttagggcaagctccctccatcggggtcgtagagttggagggcccagtccatctgggaggtcccagtgccgcccgctcaccagttaccagccaggccgtcgggaggggagagagagagagagagacgaaaagatcgagacccatacgctcagatcgaagttcgacttctcctctccccctcccccaacctaacagattcgtgtagcacagatccatccgactttgggttgatttcttcctttgctgctgatcagaaagttacagatggatcatgctgaggtctctggtttgttgtgtattggtacacgtgaaacagatgggggtgaagaatcatatgcggctgagtaccctaaaatggatcaggataccaatgcaacgaccaaatttgatgtagtaatggagacttcagcaatgtatactgatcaaatcaacaccaatgcttgcttagatgaatatcacatgtctggaaaacagcctatggaagaaatgggatttggcagtgcacatccctttgaacttccatcagaaggaatggtagctgattctggggaagaaagcatgccatctagccctgacacatctaccagtaattatgatgcgcctggttacacggagcaaaatctgcagcatatctataattcgtatgatgcactggttgacaaagacggagttgtgcttactcctgccttcatgatatgtgacaaaactttgtatcttgaacctcacctcactttctcattggacgggatcaagattgagtatttggatttagattcctttgaagacgagaagctgtcagctctacaatgggaaatatctaatattatttccatcagttgtaaatggactcgtagtgttggatctgccttaataacactccttgttggatctacagcagaaacaggaaatgcaggtcctgttagagcacgattttctcttgatgattcgcaatggccaaggagacaacagaggatttgggaactgggaccaagatatcaagaaatatggaaagacatcccatcagatgattttgcattggagaattggagcatcgaaccctgtctgtttttccctaggcaatacttttccagcactgaggactttgaagatgttatttatccccaaggagatcctgatgctgtttctattagcaaaagagatgttgagctcctgcttcctgaaacctttgtcaatgatacaataattgacttttatatcaagtacttgagcacaagaattgaatctaccaagaagcgcaggtgccacttctttaatagcttcttttttcgcaagctggcagatcttgacaaagatcaggggagagctccagaaggtagagcagccttcttgcgtgttcgcaaatggacccgcaaaataaatgtatttgacaaagattttctgttcattccagtcaacttcaacttgcattggagtttaattgttatttgctatcctggcgaagtggcgacatttgaagatggtgatgccaagctctcagctaaactcccatgcattttacacatggattcacttaaaggaagtcacactggactcaaggatatcattcaaagttatttatgggaagagtggaaggaaagacaccctgaatcagcatcagataattcagacaagttcttaaacttgagatttgtctcccttgagctccctcagcaggataattcatatgattgtggcttattcttgctccattatgtggaattatttttgacagatgctccaagtaacttcaaccctctgaagattgatgtattttctggctttcttagtgatgattggtttccacccccagaagcttctctgaagcgttcggtggtccgaaagttaattcatgagctggtaactggatcttttcagaatcatcccaagctagcttgtggtggtgagcagcttgacgaaagacatcaaagatgctcaaatcctggtgaacctgaaacagtttgcacagttgatgatggaactccatgaagtacagccatccaagtccatctgtttatatgattccaaagaggggctacctacttctggatgcatgttggacactggaagtgtcccaattgttgatgtacagaatctacaagagtcagaggtttgtgcaccagtgaaggatactgttgtttgcttgtcaatccaggatgagaaaaatgacccacttgcatctaacagtcaacttaatatgagatcatattccccagaaggtgatggcgtgattaaggaatcaaatcgtgtggtgacagataaggaaaatgataagtctttgtttctttctttggataatgaccaaaaagttcacagccaagcagaagctgaggtgcaggatattatggttcgtactagctgctcaatatctgaaattttagctcagaaaattaccagcaaagaacagccctcccaaaaaagcatagaagttggggatgagtgctttagaccttctcaagatatggattatgttatgatgtttgactccagcaaagatgagaatggaccaaatccagaaagattgacagctgaaggtgattgtggcgatcctcatgaacgtctggatttagtcacagtaggtgatatcggaaaaatggttgtagacaatgcaatcatcgaagatgtgaagagtaataacacaactgcaaacaatgtcaatcacggtgagctgcatgtttcattgcagttgccagagggaaacactgacaatggtatgactggtgttagcacagcttcctctttagacataaaagagggaaacaatgacaaagtagtggcagatgcctctgcacatgaaggtgatataaatgacaatggtagctctgaattgaaaataggaaatacgaacagtggtattactggtgttatcgcagcttcctcagacttaaaagaggaaaatattgacaaagtagtggcaggtgactgtgcacatgaaagtgatataaatgctaaggattgcactgagttgaacattggaaatactgataatagtattgctggtgatagtacagtttcccctgaggtgagcgcggaaaacactgatcaaatcatagcaggtgattgtggaaatgaaaccgatttaaaagctgatggtgagggtgctgacaaattcttagcaactgacagtgctcttccttgtgaagatgatgcaacttgcatggatggtgcgaatgtgattgtatcactagatgtaccccgtagcacgaagaatgatacattttccaagaacacatcttctgacgctgaaatgcctctgcctgttggaacctgtgagctcgtcgatagaccttcttccgagaatgacatgtctgagcacacatcttttgatggtaaacggcctgcggatgataggactttggaagagaacgaaatggttatgcctggtgatgaaaaaacagaggtgcattacaagcgacggaaggttttggcctcagagaaacaaagcagcttctccggagcaacttctacagattaggctagaatcaataagctatagggccg

SEQ ID NO: 74790 - DNA, 3792 bp, Zea Mays
ctttcccaagtggaatattgcttagggcaagctccctccatcggtccgtctctctcagcttcttcgtcttctctcttaggttgacctctttgcctcaactgcgccgcccgctcaccaagccaggcagaggctgcaggggtcgtagagttggagggcccagtccatctgggaggtcccagtgccgcccgctcaccagttaccagccaggccgtcgggaggggagagagagagagagagacgaaaagatcgagacccatacgctcagatcgaagttcgacttctcctctccccctcccccaacctaacagattcgtgtagcacagatccatccgactttgggttgatttcttcctttgctgctgatcagaaagttacagatggatcatgctgaggtctctggtttgttgtgtattggtacacgtgaaacagatgggggtgaagaatcatatgcggctgagtaccctaaaatggatcaggataccaatgcaacgaccaaatttgatgtagtaatggagacttcagcaatgtatactgatcaaatcaacaccaatgcttgcttagatgaatatcacatgtctggaaaacagcctatggaagaaatgggatttggcagtgcacatccctttgaacttccatcagaaggaatggtagctgattctggggaagaaagcatgccatctagccctgacacatctaccagtaattatgatgcgcctggttacacggagcaaaatctgcagcatatctataattcgtatgatgcactggttgacaaagacggagttgtgcttactcctgccttcatgatatgtgacaaaactttgtatcttgaacctcacctcactttctcattggacgggatcaagattgagtatttggatttagattcctttgaagacgagaagctgtcagctctacaatgggaaatatctaatattatttccatcagttgtaaatggactcgtagtgttggatctgccttaataacactccttgttggatctacagcagaaacaggaaatgcaggtcctgttagagcacgattttctcttgatgattcgcaatggccaaggagacaacagaggatttgggaactgggaccaagatatcaagaaatatggaaagacatcccatcagatgattttgcattggagaattggagcatcgaaccctgtctgtttttccctaggcaatacttttccagcactgaggactttgaagatgttatttatccccaaggagatcctgatgctgtttctattagcaaaagagatgttgagctcctgcttcctgaaacctttgtcaatgatacaataattgacttttatatcaagtacttgagcacaagaattgaatctaccaagaagcgcaggtgccacttctttaatagcttcttttttcgcaagctggcagatcttgacaaagatcaggggagagctccagaaggtagagcagccttcttgcgtgttcgcaaatggacccgcaaaataaatgtatttgacaaagattttctgttcattccagtcaacttcaacttgcattggagtttaattgttatttgctatcctggcgaagtggcgacatttgaagatggtgatgccaagctctcagctaaactcccatgcattttacacatggattcacttaaaggaagtcacactggactcaaggatatcattcaaagttatttatgggaagagtggaaggaaagacaccctgaatcagcatcagataattcagacaagttcttaaacttgagatttgtctcccttgagctccctcagcaggataattcatatgattgtggcttattcttgctccattatgtggaattatttttgacagatgctccaagtaacttcaaccctctgaagattgatgtattttctggctttaatcatcccaagctagcttgtggtggtgagcagcttgacgaaagacatcaaagatgctcaaatcctggtgaacctgaaacagtttgcacagttgatgatggaactccatgaagtacagccatccaagtccatctgtttatatgattccaaagaggggctacctacttctggatgcatgttggacactggaagtgtcccaattgttgatgtacagaatctacaagagtcagaggtttgtgcaccagtgaaggatactgttgtttgcttgtcaatccaggatgagaaaaatgacccacttgcatctaacagtcaacttaatatgagatcatattccccagaaggtgatggcgtgattaaggaatcaaatcgtgtggtgacagataaggaaaatgataagtctttgtttctttctttggataatgaccaaaaagttcacagccaagcagaagctgaggtgcaggatattatggttcgtactagctgctcaatatctgaaattttagctcagaaaattaccagcaaagaacagccctcccaaaaaagcatagaagttggggatgagtgctttagaccttctcaagatatggattatgttatgatgtttgactccagcaaagatgagaatggaccaaatccagaaagattgacagctgaaggtgattgtggcgatcctcatgaacgtctggatttagtcacagtaggtgatatcggaaaaatggttgtagacaatgcaatcatcgaagatgtgaagagtaataacacaactgcaaacaatgtcaatcacggtgagctgcatgtttcattgcagttgccagagggaaacactgacaatggtatgactggtgttagcacagcttcctctttagacataaaagagggaaacaatgacaaagtagtggcagatgcctctgcacatgaaggtgatataaatgacaatggtagctctgaattgaaaataggaaatacgaacagtggtattactggtgttatcgcagcttcctcagacttaaaagaggaaaatattgacaaagtagtggcaggtgactgtgcacatgaaagtgatataaatgctaaggattgcactgagttgaacattggaaatactgataatagtattgctggtgatagtacagtttcccctgaggtgagcgcggaaaacactgatcaaatcatagcaggtgattgtggaaatgaaaccgatttaaaagctgatggtgagggtgctgacaaattcttagcaactgacagtgctcttccttgtgaagatgatgcaacttgcatggatggtgcgaatgtgattgtatcactagatgtaccccgtagcacgaagaatgatacattttccaagaacacatcttctgacgctgaaatgcctctgcctgttggaacctgtgagctcgtcgatagaccttcttccgagaatgacatgtctgagcacacatcttttgatggtaaacggcctgcggatgataggactttggaagagaacgaaatggttatgcctggtgatgaaaaaacagaggtgcattacaagcgacggaaggttttggcctcagagaaacaaagcagcttctccggagcaacttctacagattaggtttggctggtgtgagacttagttttagtttctgggatatgtgacctgtctagtccttgacaatatgctgcctgtgatatagtatatatttctgtaatataaggtactgccactaatgactgtagaaataacaaaaagaactggaatcctgaaccctgatgtctgcttgacagcgtggtttgagaattgagatactgtatatggtctgagtattgcacgacctgcactgcacatgcaagttgcacgatataggctgtttccaaacatgtggaaggccttgtttacctgattagttgggat

SEQ ID NO: 74791 - DNA, 3815 bp, Zea Mays
ctttcccaagtggaatattgcttagggcaagctccctccatcggtccgtctctctcagcttcttcgtcttctctcttaggttgacctctttgcctcaactgcgccgcccgctcaccaagccaggcagaggctgcaggggtcgtagagttggagggcccagtccatctgggaggtcccagtgccgcccgctcaccagttaccagccaggccgtcgggaggggagagagagagagagagacgaaaagatcgagacccatacgctcagatcgaagttcgacttctcctctccccctcccccaacctaacagattcgtgtagcacagatccatccgactttgggttgatttcttcctttgctgctgatcagaaagttacagatggatcatgctgaggtctctggtttgttgtgtattggtacacgtgaaacagatgggggtgaagaatcatatgcggctgagtaccctaaaatggatcaggataccaatgcaacgaccaaatttgatgtagtaatggagacttcagcaatgtatactgatcaaatcaacaccaatgcttgcttagatgaatatcacatgtctggaaaacagcctatggaagaaatgggatttggcagtgcacatccctttgaacttccatcagaaggaatggtagctgattctggggaagaaagcatgccatctagccctgacacatctaccagtaattatgatgcgcctggttacacggagcaaaatctgcagcatatctataattcgtatgatgcactggttgacaaagacggagttgtgcttactcctgccttcatgatatgtgacaaaactttgtatcttgaacctcacctcactttctcattggacgggatcaagattgagtatttggatttagattcctttgaagacgagaagctgtcagctctacaatgggaaatatctaatattatttccatcagttgtaaatggactcgtagtgttggatctgccttaataacactccttgttggatctacagcagaaacaggaaatgcaggtcctgttagagcacgattttctcttgatgattcgcaatggccaaggagacaacagaggatttgggaactgggaccaagatatcaagaaatatggaaagacatcccatcagatgattttgcattggagaattggagcatcgaaccctgtctgtttttccctaggcaatacttttccagcactgaggactttgaagatgttatttatccccaaggagatcctgatgctgtttctattagcaaaagagatgttgagctcctgcttcctgaaacctttgtcaatgatacaataattgacttttatatcaagtacttgagcacaagaattgaatctaccaagaagcgcaggtgccacttctttaatagcttcttttttcgcaagctggcagatcttgacaaagatcaggggagagctccagaaggtagagcagccttcttgcgtgttcgcaaatggacccgcaaaataaatgtatttgacaaagattttctgttcattccagtcaacttcaacttgcattggagtttaattgttatttgctatcctggcgaagtggcgacatttgaagatggtgatgccaagctctcagctaaactcccatgcattttacacatggattcacttaaaggaagtcacactggactcaaggatatcattcaaagttatttatgggaagagtggaaggaaagacaccctgaatcagcatcagataattcagacaagttcttaaacttgagatttgtctcccttgagatgctccaagtaacttcaaccctctgaagattgatgtattttctggctttcttagtgatgattggtttccacccccagaagcttctctgaagcgttcggtggtccgaaagttaattcatgagctggtaactggatcttttcagaatcatcccaagctagcttgtggtggtgagcagcttgacgaaagacatcaaagatgctcaaatcctggtgaacctgaaacagtttgcacagttgatgatggaactccatgaagtacagccatccaagtccatctgtttatatgattccaaagaggggctacctacttctggatgcatgttggacactggaagtgtcccaattgttgatgtacagaatctacaagagtcagaggtttgtgcaccagtgaaggatactgttgtttgcttgtcaatccaggatgagaaaaatgacccacttgcatctaacagtcaacttaatatgagatcatattccccagaaggtgatggcgtgattaaggaatcaaatcgtgtggtgacagataaggaaaatgataagtctttgtttctttctttggataatgaccaaaaagttcacagccaagcagaagctgaggtgcaggatattatggttcgtactagctgctcaatatctgaaattttagctcagaaaattaccagcaaagaacagccctcccaaaaaagcatagaagttggggatgagtgctttagaccttctcaagatatggattatgttatgatgtttgactccagcaaagatgagaatggaccaaatccagaaagattgacagctgaaggtgattgtggcgatcctcatgaacgtctggatttagtcacagtaggtgatatcggaaaaatggttgtagacaatgcaatcatcgaagatgtgaagagtaataacacaactgcaaacaatgtcaatcacggtgagctgcatgtttcattgcagttgccagagggaaacactgacaatggtatgactggtgttagcacagcttcctctttagacataaaagagggaaacaatgacaaagtagtggcagatgcctctgcacatgaaggtgatataaatgacaatggtagctctgaattgaaaataggaaatacgaacagtggtattactggtgttatcgcagcttcctcagacttaaaagaggaaaatattgacaaagtagtggcaggtgactgtgcacatgaaagtgatataaatgctaaggattgcactgagttgaacattggaaatactgataatagtattgctggtgatagtacagtttcccctgaggtgagcgcggaaaacactgatcaaatcatagcaggtgattgtggaaatgaaaccgatttaaaagctgatggtgagggtgctgacaaattcttagcaactgacagtgctcttccttgtgaagatgatgcaacttgcatggatggtgcgaatgtgattgtatcactagatgtaccccgtagcacgaagaatgatacattttccaagaacacatcttctgacgctgaaatgcctctgcctgttggaacctgtgagctcgtcgatagaccttcttccgagaatgacatgtctgagcacacatcttttgatggtaaacggcctgcggatgataggactttggaagagaacgaaatggttatgcctggtgatgaaaaaacagaggtgcattacaagcgacggaaggttttggcctcagagaaacaaagcagcttctccggagcaacttctacagattaggtttggctggtgtgagacttagttttagtttctgggatatgtgacctgtctagtccttgacaatatgctgcctgtgatatagtatatatttctgtaatataaggtactgccactaatgactgtagaaataacaaaaagaactggaatcctgaaccctgatgtctgcttgacagcgtggtttgagaattgagatactgtatatggtctgagtattgcacgacctgcactgcacatgcaagttgcacgatataggctgtttccaaacatgtggaaggccttgtttacctgattagttgggat

SEQ ID NO: 74792 - DNA, 1259 bp, Zea Mays
cccaagtggaatattgcttagggcaagctccctccatcggtccgtctctctcagcttcttcgtcttctctcttaggttgacctctttgcctcaactgcgccgcccgctcaccaagccaggcagaggctgcaggggtcgtagagttggagggcccagtccatctgggaggtcccagtgccgcccgctcaccagttaccagccaggccgtcgggaggggagagagagagagagagacgaaaagatcgagacccatacgctcagatcgaagttcgacttctcctctccccctcccccaacctaacagattcgtgtagcacagatccatccgactttgggttgatttcttcctttgctgctgatcagaaagttacagatggatcatgctgaggtctctggtttgttgtgtattggtacacgtgaaacagatgggggtgaagaatcatatgcggctgagtaccctaaaatggatcaggataccaatgcaacgaccaaatttgatgtagtaatggagacttcagcaatgtatactgatcaaatcaacaccaatgcttgcttagatgaatatcacatgtctggaaaacagcctatggaagaaatgggatttggcagtgcacatccctttgaacttccatcagaaggaatggtagctgattctggggaagaaagcatgccatctagccctgacacatctaccagtaattatgatgcgcctggttacacggagcaaaatctgcagcatatctataattcgtatgatgcactggttgacaaagacggagttgtgcttactcctgccttcatgatatgtgacaaaactttgtatcttgaacctcacctcactttctcattggacgggatcaagattgagtatttggatttagattcctttgaagacgagaagctgtcagctctacaatgggaaatatctaatattatttccatcagttgtaaatggactcgtagtgttggatctgccttaataacactccttgttggatctacagcagaaacaggaaatgcaggtcctgttagagcacgattttctcttgatgattcgcaatggccaaggagacaacagaggatttgggaactgggaccaagatatcaagaaatatggaaagacatcccatcagatgattttgcattggagaattggagcatcgaaccctgtctgtttttccctaggcaatacttttccagctggtcactacatcttttccaccattgcatgccattctcttctccaatctggggagtga

SEQ ID NO: 74793 - DNA, 1074 bp, Zea Mays
gtggaatattgcttagggcaagctccctccatcggtccgtctctctcagcttcttcgtcttctctcttaggttgacctctttgcctcaactgcgccgcccgctcaccaagccaggcagaggctgcaggggtcgtagagttggagggcccagtccatctgggaggtcccagtgccgcccgctcaccagttaccagccaggccgtcgggaggggagagagagagagagagacgaaaagatcgagacccatacgctcagatcgaagttcgacttctcctctccccctcccccaacctaacagattcgtgtagcacagatccatccgactttgggttgatttcttcctttgctgctgatcagaaagttacagatggatcatgctgaggtctctggtttgttgtgtattggtacacgtgaaacagatgggggtgaagaatcatatgcggctgagtaccctaaaatggatcaggataccaatgcaacgaccaaatttgatgtagtaatggagacttcagcaatgtatactgatcaaatcaacaccaatgcttgcttagatgaatatcacatgtctggaaaacagcctatggaagaaatgggatttggcagtgcacatccctttgaacttccatcagaaggaatggtagctgattctggggaagaaagcatgccatctagccctgacacatctaccagtaattatgatgcgcctggttacacggagcaaaatctgcagcatatctataattcgtatgatgcactggttgacaaagacggagttgtgcttactcctgccttcatgatatgtgacaaaactttgtatcttgaacctcacctcactttctcattggacgggatcaagattgagtatttggatttagattcctttgaagacgagaagctgtcagctctacaatgggaaatatctaatattatttccatcagttgtaaatggactcgtagtgttggatctgccttaataacactccttgttggatctacagcagaaacaggaaatgcagattcgggtgcaccatctttgggtggcttggatagcatcgcttcgagttgcaactact

SEQ ID NO: 74794 - DNA, 317 bp, Zea Mays
ccacgacgctgcaaccaccactgcggccctgcctaactgcacgaataaaaaaaactccggcatctctcaatcctccgccacctcagccgatctcgatgcccaccactgcgcagcccacacgctcaccatcgccgtcgcgtcgtgcctcgcctcacctcacagccgtgcggcctggtcgtcgttgagcagggagccagcgctaagctcgttgtgcccggactcgacctcgccaccatcaccgcctcgcccggagcagccttggcccaccgcgtcgcgccattgcctcgtccgtcgttgccatgactgcgatccatttt

SEQ ID NO: 74795 - DNA, 1432 bp, Zea Mays
cgccacgatactcgctgtaatcatccctcccagcagccgaccgagagcaaggcggggctgtgcagcgtgaccggaggccgtctatcagtgaacagataaacagagaaagcggccacggttgagagttgagaggccacgaaccccaccaagattccacaaaactccatcaccagatccagaacccacttccacttcctctctcgtgttttcattttaggccagaataaactccagccacttcggcatgcgccgggaatttgattcttctgcctaaaatagtcacgctaccttccacctccccctactactctgactctccctcgtcttcttcgctaccaagatgatggcggaggcgtggacgccggtgctgttgccggcgacggcgccctgcttctggcagcaggacacgcactcggttttgtggcggagaggagacgcgtggacggcggaggagaacaagctgttcgagaaggcgctggcgcagatcgaccggaacgcgccggacaggtgggagaaggtggcggcggtgctgccctggaagacggtcgacgacgtgaggagccactaccacgccctcgagaaggacgtgggcgtcatcgaggccggcgggctcgtgccgttcccgcgctacagcggctcggtcccgccgccgtccgggttcgccctcgaggactggggcggcggcgaccgcgggttcaggcgcgcgcgcggctcggaggagatgcaggagcggaagaagggtgtcccctggacggaggaggagcacaagcttttcttgatggggctgaggaagtacgggagaggggactggaggaacatctcgcgcaagtacgtgacgacccggacgccgacgcaggtggccagccacgcgcagaagtacttcatccggctcagctccggcggcaaggacaagcggcggtccagcatccacgacatcaccaccgtcaacctcccaggcgacgccccgcgctcgtcgccgcccgcggccaccaccaacccctccgccggcgccctggtggtggacgtgaagcccttcgtgtgacgaggatgaagagtggcacagcctcgtcgtccagctgccagctcgcggcagctccgagcgactgcgttcatcgagaacaagacgccatgggcggcaatgcggcatccgtttcagttcagtgtacataattcggcaagtacagagcccaacaacttccacgtaaaagggtctcgcgaggtttttgtccgccagccattgctgcttgccgtacgtcgctgtagaagaaacctgaaacacggccagccacgatcacatgtgatgcgtttagggtttagtcactttagtgtgtgatgcttgcttgctcttgcagggtctcgcagtagtaggcactgagttggacgtccaccgaggaagaaggtatcatatgaaatctataaacaatactaaaat

SEQ ID NO: 74796 - DNA, 830 bp, Zea Mays
catatcattaaaaaaaaagcatataaataaaatttagataatttgctggagtcggtcttgtatagccctttacctcaggcagtaaaatgttcagattcggcaaacgggcacgggctatataatcgtggaaatagaggcgcagcgcagggcactgtttccgccgaggcccttttctggcgccggaccaccgcaccatggcgtcccttgtcgcgagccgatatgaaaagtttgtggttttattatttttttttctttttcttttttacctagagcgcactacggcactagagagctagagcatccttttttcacaccgctatatctgaggaagtggtgcgtgtacctgctgcgcaccaattttggtatagcagctggagcatctttaacaggatcgggtaactcagaaaacgctccttcgaggtaaaagtcataatgggctttatccggtgccatgctccccacattcggcgtcccccccaagtcgattaggccttactgctgtcatggcgtccacagatctctggcatcagcggcttgggcatccctcgtttagtattgtgtcttcagttcttaggtccaataaactagcatgtgcacctagtcagtcgtcttcagtttgtgattcgtgtcagcgtgccaaaattcatcagttacctttttataaatccaatcatgtttcatcctctccactagaacttgttcactccgatgtatggggtcctgctatcacctctgtcggtggttttaaatattatgtgagttttttagatgattatagtcgatacacctggatctatctccttaaacgcaaatctgatgttgaacatgcc

SEQ ID NO: 74797 - DNA, 1754 bp, Zea Mays
ctccaacttcgaccattgtcactcgccttcgaaacaacatcagcaagcctctgctgcataccgatggaactattcggtataatccatcaagtcgaagttttggcttatctgctgttcctatgaattatcatcatgctctagccaacgaaaaatggcgccttgccatggatgctgagtatactgcactgatgcaaaatggtacatggtccctggttcccaagccatctggacacaacatcattagttgcaaatgggtttttcgcataaaggaacacgctgatggctccgtggataaatacaaagctcgtcttgttgctcggggattcactcaacagcacggcattgattactttgagacgtttagtccagtcgtaaaaatgtctactgtccggcttgtgctctctattgccatatctcgtcaatgggatatccgtcaacttgatattagcaatgcttttcttcatggtgttcttaatgaggatgtgtatatgcatcagcccccggggtttcaagatccttcaaaacctggttttgtctgcaagcttcataaagctatatatgggcttaaacagtctcctcgtgcatggtactctcgtcttagtgatcgtctctgccagcttggttttgttccttcggttgctgacacttctctcttcacctttcatcaaggcgcagttatcatgtatttattggtttatgttgatgatataattattgttagctcttcaccgtccatcactcagcttctcttgcagcagctttcagtgacttttccagtcaaggatcttggccctcttcatttttttctcggcattgaagtggcttccaattccgggggtatgacactcactcagcagaaatatgcccgtgatattcttcgtcgcgctgacatggagaattgcaagtcagtcccgactcccttatgcgttactgacaagctttctcgacatcatggcaacaagctagtatgtcagtttctcgctcagccagccgatattcattgggaagctgtaaaacgcattcttcgatttgtaaaaggaacacttcatactggattatatctccgaaagactggttctactttattgagtatctttacagatgcggattgggctggttgtattgatgaccgacgttctactgggggttttgctattttctttggttccaatcttatatcctggagcgctcgcaagcaacctacagtatctcgttcatccactgaggctgaatataaagcactagctaatggcactgctgaagctatctggatacaatctttgctcaaagaacttcgtattatgcagccacgtcctcctgttctttggtgtgataatttgggagccacatacttaagcgccaatcctgtttttcatggtcgaataaagcatgttgaggtggattttcattttgttagggagaaagtggctcttggagcattgcaggtccggcttatatcatctggagatcagatcgctgatatatttactaagcctgcaaccaaacagatgttggagcgcagtcgtttcaatcttaaccttgtgtccaccggttaagattgcagggggatgttagcattctgttgtatagcgtagccaaggttgttagcatctatgctagattaactcctagattagctcctagacggttttagttttgtatctatcctgtgcacatgctatctatataaagaaacaaagcaagcaccgaggtgctgtgccaccaattatattcttcctattgcattgttcaac

SEQ ID NO: 74798 - DNA, 1728 bp, Zea Mays
cgaaacaacatcagcaagcctctgctgcataccgatggaactattcggtataatccatcaagtcgaagttttggcttatctgctgttcctatgaattatcatcatgctctagccaacgaaaaatggcgccttgccatggatgctgagtatactgcactgatgcaaaatggtacatggtccctggttcccaagccatctggacacaacatcattagttgcaaatgggtttttcgcataaaggaacacgctgatggctccgtggataaatacaaagctcgtcttgttgctcggggattcactcaacagcacggcattgattactttgagacgtttagtccagtcgtaaaaatgtctactgtccggcttgtgctctctattgccatatctcgtcaatgggatatccgtcaacttgatattagcaatgcttttcttcatggtgttcttaatgaggatgtgtatatgcatcagcccccggggtttcaagatccttcaaaacctggttttgtctgcaagcttcataaagctatatatgggcttaaacagtctcctcgtgcatggtactctcgtcttagtgatcgtctctgccagcttggttttgttccttcggttgctgacacttctctcttcacctttcatcaaggcgcagttatcatgtatttattggtttatgttgatgatataattattgttagctcttcaccgtccatcactcagcttctcttgcagcagctttcagtgacttttccagtcaaggatcttggccctcttcatttttttctcggcattgaagtggcttccaattccgggggtatgacactcactcagcagaaatatgcccgtgatattcttcgtcgcgctgacatggagaattgcaatatagttggggctcttcagtatcttactctcactcgacctgatttatcttttgcggtaaataaagtatgtcagtttctcgctcagccagccgatattcattgggaagctgtaaaacgcattcttcgatttgtaaaaggaacacttcatactggattatatctccgaaagactggttctactttattgagtatctttacagatgcggattgggctggttgtattgatgaccgacgttctactgggggttttgctattttctttggttccaatcttatatcctggagcgctcgcaagcaacctacagtatctcgttcatccactgaggctgaatataaagcactagctaatggcactgctgaagctatctggatacaatctttgctcaaagaacttcgtattatgcagccacgtcctcctgttctttggtgtgataatttgggagccacatacttaagcgccaatcctgtttttcatggtcgaataaagcatgttgaggtggattttcattttgttagggagaaagtggctcttggagcattgcaggtccggcttatatcatctggagatcagatcgctgatatatttactaagcctgcaaccaaacagatgttggagcgcagtcgtttcaatcttaaccttgtgtccaccggttaagattgcagggggatgttagcattctgttgtatagcgtagccaaggttgttagcatctatgctagattaactcctagattagctcctagacggttttagttttgtatctatcctgtgcacatgctatctatataaagaaacaaagcaagcaccgaggtgctgtgccaccaattatattcttcctattgcattgttcaac

SEQ ID NO: 74799 - DNA, 1368 bp, Zea Mays
cggcaattatacattcttccaggaacaaagttctcagagatctgcaggaagagatctttcatttctgccagcagtcctgaggatgccgaatccggcactcccccgccgcttgaaggctacaaataccatgctgagctcttgctcagatcgccatgcttcagacgcagaaggtgcgcatcacagagttcttggacgagcgctctgcttacctgaccaagttcgccaaggacgccgactcggagttcgacctgattgggcagaacgctatgaaagaacttgatgccgttggtgaccagatactggagaggctcgacagcaagatgcaagccttcgaggagacggctgaggtgcaacggcaagagatagaaatgaacgataaggtgttagaggacttcgaagactggatcgaaaaggagaaaaacgaagggatgttcttcaaaagccttggcaaggtcaaacctcggaacaagatggaaataaaggtgaaagccaaggtggaagcacagaaggtcaaagagattgcagaggagagtgcaggatcaaaaactcgtatgaacatttacctggggctgatggggatactcgggattacaattgcgaatgccatctttgcaacaccagaggtggagtggaggaaggttgctgctctgggtctgattttcattggtctggttgctcaggtcatctacgagcaggatatctcaccgccggaagctgagaagacagagaaaatagaagaataaaaaaggagttgcagacatatcggtagggtggtgtaatctcacacaggcaatgtaaactgtatatggtagcatgaatagatacaaggtttaatacttcaatcgttcataacccaagaaattatttaatacgtagttcggcaaacaaaccacaggtttctctaacctgagatctgatagactcaagcagacttcaaacctgcttcagagatatgtttcagcaatgttatagccaaaacatggtaacagtgttaccttcttgacgagttagaaaaatattgacacaatttttataatccaaaaaaaaatgtttaacatgtagcttggccaataaaccacaggtttctctaacctgaggtctgataaactcaagctgtcttcaatcttgcatcagagatttgtttcagcaacgttatagccaaaacatagtaacagtgttaaattcttgatgcgttacaaaaatattgatacatttttttataatccaaaaaaaatgtttgacatgtagcttggccaataaaccacaggtttctctaatctgagatctgataaacccaagctgtcttcaatcttgtatcagagatatgtttcagcaacgttatagccaaaacatggtaacagtgttaaa

SEQ ID NO: 74800 - DNA, 1478 bp, Zea Mays
tgagcccatgatgcccaactgcgtcgatttcggcccgactaatgacttcgtgacaccttgtggggctcgatattttcggtggctccaactggacaacaaagttccacttcatgcaaagtgggagtggcaagcaaaagcaagacgtaatagtacctgaggaaacccagcacgcaagggcaatttggtcttgttacggaacagaagggatatggttcccgggctccggcgacgacgagaggtaggcagaaatcgtttgccaaatcaacaccagcaacagcaaagcgactacagatagtacgagatgcttactctccacaccattcagtcatgcccctcgctgcgcagatcctctctgttccggcgtgctctgctaggcaggaagagatctttcatttctgccagcagtcctgaggatgccgaatccggcactcccccgccgcttgaaggctacaaataccatgctgagctcttgctcagatcgccatgcttcagacgcagaaggtgcgcatcacagagttcttggacgagcgctctgcttacctgaccaagttcgccaaggacgccgactcggagttcgacctgattgggcagaacgctatgaaagaacttgatgccgttggtgaccagatactggagaggctcgacagcaagatgcaagccttcgaggagacggctggggctgatggggatactcgggattacaattgcgaatgccatctttgcaacaccagaggtggagtggaggaaggttgctgctctgggtctgattttcattggtctggttgctcaggtcatctacgagcaggatatctcaccgccggaagctgagaagacagagaaaatagaagaataaaaaaggagttgcagacatatcggtagggtggtgtaatctcacacaggcaatgtaaactgtatatggtagcatgaatagatacaaggtttaatacttcaatcgttcataacccaagaaattatttaatacgtagttcggcaaacaaaccacaggtttctctaacctgagatctgatagactcaagcagacttcaaacctgcttcagagatatgtttcagcaatgttatagccaaaacatggtaacagtgttaccttcttgacgagttagaaaaatattgacacaatttttataatccaaaaaaaaatgtttaacatgtagcttggccaataaaccacaggtttctctaacctgaggtctgataaactcaagctgtcttcaatcttgcatcagagatttgtttcagcaacgttatagccaaaacatagtaacagtgttaaattcttgatgcgttacaaaaatattgatacatttttttataatccaaaaaaaatgtttgacatgtagcttggccaataaaccacaggtttctctaatctgagatctgataaacccaagctgtcttcaatcttgtatcagagatatgtttcagcaacgttatagccaaaacatggtaacagtgttaaa

SEQ ID NO: 74801 - DNA, 939 bp, Zea Mays
aaccagaacattcgattctaaaatttacaatttacaatttacagctgtgcggaggcgggagcagggggcagcgagcacctagcagcgcgcggccggcgactccaccgagacacctcagccggccgcgcggtcgcggttgcctccggctggctcctcgcctcgatggtggggatgtaccagcaccaactccgcgacgaccccttcgacaccctaagcggcggccactgcgaaaaggaagctctactgggatcaaaaaaagaaaggctgcttgaacatgccaacaaggaaatctgagaggcttgctaagagaatgaaactcatggcatcattgctcctcacgcaacggaaaaagattggagtaggtgagcactttcaggcagaggtacctggttggactgggcaaccttcagggaaagagctttcatgttacaggaatgacccagagacatcaaagatgttagggactagaatgtggcctcctgagggtgaagtttataaaactgacattgtagctgttgggcagggaaggcctggatcatgtaattgcccctacccaggatccttcctctgcagacagctccacacaaatgaagcaagagatcagctacgctctgaacttggtcgagtttttacaatgtggcaatttgattctatgggggaggaggtttctaagctgtggagtcgtgatgagcaactaaagttcgacgcacttgagcaattggttcccgttatggatcaaaagacatattgggctgttgtgtcgaaaaattttgcttcaaagcccaggatagatttgataaagtactatctgaatgtgttcctgatgagaagagtgttgtaccagtgcagactcggtcttctggaaattgatagtgacgaagatgacgtggaggaagaagaggacgaagatcaacctgaaggatccagctctctcagaga

SEQ ID NO: 74802 - DNA, 777 bp, Zea Mays
ttgaggcatagagcagatgcaaacttagctagcagagatggatggagactggggagaagagatggagaaaaggaagctctactgggatcaaaaaaagaaaggctgcttgaacatgccaacaaggaaatctgagaggcttgctaagagaatgaaactcatggcatcattgctcctcacgcaacggaaaaagattggagtaggtgagcactttcaggcagaggtacctggttggactgggcaaccttcagggaaagagctttcatgttacaggaatgacccagagacatcaaagatgttagggactagaatgtggcctcctgagggtgaagtttataaaactgacattgtagctgttgggcagggaaggcctggatcatgtaattgcccctacccaggatccttcctctgcagacagctccacacaaatgaagcaagagatcagctacgctctgaacttggtcgagtttttacaatgtggcaatttgattctatgggggaggaggtttctaagctgtggagtcgtgatgagcaactaaagttcgacgcacttgagcaattggttcccgttatggatcaaaagacatattgggctgttgtgtcgaaaaattttgcttcaaagcccaggatagatttgataaagtactatctgaatgtgttcctgatgagaagagtgttgtaccagtgcagactcggtcttctggaaattgatagtgacgaagatgacgtggaggaagaagaggacgaagatcaacctgaaggatccagctctctcagaga

SEQ ID NO: 74803 - DNA, 848 bp, Zea Mays
ctctaggtactttggggcttcacccagcgccccggagtggacgacgatgagaccttcagtcccgttgtcaagtttgccaccgttcgtgccgtcctctccctctccctctcctgggactgcacgccattgcatgcacacaaaaggaagctctactgggatcaaaaaaagaaaggctgcttgaacatgccaacaaggaaatctgagaggcttgctaagagaatgaaactcatggcatcattgctcctcacgcaacggaaaaagattggagtaggtgagcactttcaggcagaggtacctggttggactgggcaaccttcagggaaagagctttcatgttacaggaatgacccagagacatcaaagatgttagggactagaatgtggcctcctgagggtgaagtttataaaactgacattgtagctgttgggcagggaaggcctggatcatgtaattgcccctacccaggatccttcctctgcagacagctccacacaaatgaagcaagagatcagctacgctctgaacttggtcgagtttttacaatgtggcaatttgattctatgggggaggaggtttctaagctgtggagtcgtgatgagcaactaaagttcgacgcacttgagcaattggttcccgttatggatcaaaagacatattgggctgttgtgtcgaaaaattttgcttcaaagcccaggatagatttgataaagtactatctgaatgtgttcctgatgagaagagtgttgtaccagtgcagactcggtcttctggaaattgatagtgacgaagatgacgtggaggaagaagaggacgaagatcaacctgaaggatccagctctctcagaga

SEQ ID NO: 74804 - DNA, 543 bp, Zea Mays
tactgaactacacttctgacatccgtatataaaatttcgacagcatctcctttgcaaaatagcataaaggagggggcaacagtgtataaacatgtatcatgacaaaaaaaacatactaagtattattaaacggctagcaaaggaaagttaaacatacgacatgaactgaattaaccaatgcgcatgactagtaaaaaaacaaacttcctttgacatcaagtttctaattaaatcatggatgcgcttgggcagccttaatatgagagtgaaagtggacgtgctgctactcccctcattcccaacatatatcaagtacctgcattgagtaatgcaagagtgagatgacacatctcagcaagtaaaataataacaaaccgtttaaccacataagaacattgttttaccaccatttggtttcgcaaccttcttattacaaaggtgcagcacgaatacaacgtacaacacacctagttaccacacctcgcaggtagaaaccacaatagtaacatagtaatgtcacacttcatatatacctcatgagtg

SEQ ID NO: 74805 - DNA, 1454 bp, Zea Mays
gagagtccgcgtcaccaccgagacggacacgacacgacacgacccacgcaaaaagcacccacacaggtagtcaggcacacagctcctctgcgttacctttccccgtcggccggtttcatttacctcctcaatcctggcttgaatctgtgacccgtcgaggcggcgaagggccgaatcgcaccgcactgtagggagaagcttctgcaaggttttggagcgggcgatggaggcggcgagcaacggcgggcttctctaccacgaggtgcaggaagggaagctctgcgccgtgcactgcgtcaacaccgccctgcagggccccttcttctccgagttcgacctcgccgcgctcgccgccgacctcgaccagcgggagcgcctggtgatgctcgagggctcccgaagccccggtgcgggcaacgctgctgcaggggatttcttcgccgagggcgagggatctcacaacgtctcccttggcggcgatttcagcatccagaaggcgctggaggtttgggatctccaagttataccccttgattccccagctgcagggtcgtccctatttgacccagagcaggaggttgctttcatttgccacctgcaggaccactggttctgcatgaggaaggtgaacggggagtggtacaactttaatagtctctacccagctcccgagcacctgtcgaagttttacctctcagctttcattgacaccctgaaggggtcaggctggagtatatttgcagttagaggcaatttccccaaggagtgccctatggcaaccgaaggctctaacggtttcggtcaatggtttacccctgatgacgcccggaggataacagcctcctgtaaccaggtgcaaacaccacctactgagcaggtacaatcccctctacttgctgaacaaccagaagggatgagtgaaatggacatgatcgcagcgcagcaagaagaggctgatctgaatgctgctatagctgccagcttgatggacactggggttccatttgccagctatgccgcagctcgagaacatagcgattcacaagattctcctgctcgtgaagcagctccgagcaaagataataaccaggaagaagctggtaaagctgaaccgagcgcacctccctgtgaggaggacatccaggagttggcttcaggaagcgacaccagaagggaggttccttctgtagaggagaaagggtcagcgaaagaagaatagtctggcactttctgatcattctgtaactgagttagacccgtacaaacagaaactgcccaccatttgagtggagttatgccttcttctttttttttccccggttctgaacgccgtatacgaaatgcatagtctgaactgaatgggtttaagaacttttaactggtgtaactgtcatgtgcgaagtgcatagagactagagtctgagtggcggttttgaacccctttttccccgtcc

SEQ ID NO: 74806 - DNA, 1333 bp, Zea Mays
cagctcctctgcgttacctttccccgtcggccggtttcatttacctcctcaatcctggcttgaatctgtgacccgtcgaggcggcgaagggccgaatcgcaccgcactgtagggagaagcttctgcaaggttttggagcgggcgatggaggcggcgagcaacggcgggcttctctaccacgaggtgcaggaagggaagctctgcgccgtgcactgcgtcaacaccgccctgcagggccccttcttctccgagttcgacctcgccgcgctcgccgccgacctcgaccagcgggagcgcctggtgatgctcgagggctcccgaagccccggtgcgggcaacgctgctgcaggggatttcttcgccgagggcgagggatctcacaacgtctcccttggcggcgatttcagcatccaggttggattccgacacccagcattgagattccaagtggtatttgacgtgttcccaataatttgccaaattggacactggcagacactactattctgcaatggggaaatatgatatgtatctgtgctttgaatctgttgtaaattcacgtataacaatatacatatacacatgttttttaattcagataattacattaagacaaatttttgtaatgacgtggatgaaataaatatgatgtacgtttctgagccaatcaatccatgctgtgacttaaatagggacagatggaaactatgaaggaaaagaatgatgctgtagataaaacccatacctgtcagtcataaaacaatgaatttgagcacaaatagcggtgaatgccgactgttttggatgttgctgatattatgatgtttcacacatttttatatttatagtcgtttgtgcatgtctccataaagtttttaatttgacaccaattttctgtgaatatgctttaatgctatcctgatatgccactttgcaatatggaggcactccagttcttttaaagttttctccttcagccttcagaatgtatagaagggtcgccgaacttatgcaggaattagctatttcccttttttctttgaatcatgttcatctttgcattagcactttctattttatcagccattatatggagcaattagctatttcctctttttcttcattgaaccatgttcatctttgcattttataactgcagtgtcctggtcagatcctctgattatcactttacacatttggatgtgaaatgggggaaagatgattatgaattcattaagttttcgtttctaacccaaagctgcgatattttagtcatgggtcctggcacactcgtagagtcatggaatgggtaaatatttgcagtacatttttt

SEQ ID NO: 74807 - DNA, 1420 bp, Zea Mays
cagctcctctgcgttacctttccccgtcggccggtttcatttacctcctcaatcctggcttgaatctgtgacccgtcgaggcggcgaagggccgaatcgcaccgcactgtagggagaagcttctgcaaggttttggagcgggcgatggaggcggcgagcaacggcgggcttctctaccacgaggtgcaggaagggaagctctgcgccgtgcactgcgtcaacaccgccctgcagggccccttcttctccgagttcgacctcgccgcgctcgccgccgacctcgaccagcgggagcgcctggtgatgctcgagggctcccgaagccccggtgcgggcaacgctgctgcaggggatttcttcgccgagggcgagggatctcacaacgtctcccttggcggcgatttcagcatccaggttggattccgacacccagcattgagattccaagtggttttgcagaaggcgctggaggtttgggatctccaagttataccccttgattccccagctgcagggtcgtccctatttgacccagagcaggaggttgctttcatttgccacctgcaggaccactggttctgcatgaggaaggtgaacggggagtggtacaactttaatagtctctacccagctcccgagcacctgtcgaagttttacctctcagctttcattgacaccctgaaggggtcaggctggagtatatttgcagttagaggcaatttccccaaggagtgccctatggcaaccgaaggctctaacggtttcggtcaatggtttacccctgatgacgcccggaggataacagcctcctgtaaccaggtgcaaacaccacctactgagcaggtacaatcccctctacttgctgaacaaccagaagggatgagtgaaatggacatgatcgcagcgcagcaagaagaggctgatctgaatgctgctatagctgccagcttgatggacactggggttccatttgccagctatgccgcagctcgagaacatagcgattcacaagattctcctgctcgtgaagcagctccgagcaaagataataaccaggaagaagctggtaaagctgaaccgagcgcacctccctgtgaggaggacatccaggagttggcttcaggaagcgacaccagaagggaggttccttctgtagaggagaaagggtcagcgaaagaagaatagtctggcactttctgatcattctgtaactgagttagacccgtacaaacagaaactgcccaccatttgagtggagttatgccttcttctttttttttccccggttctgaacgccgtatacgaaatgcatagtctgaactgaatgggtttaagaacttttaactggtgtaactgtcatgtgcgaagtgcatagagactagagtctgagtggcggttttgaacccctttttccccgtcc

SEQ ID NO: 74808 - DNA, 1995 bp, Zea Mays
ccgtcacagcccgcgataaacgaaagagatcctggacagggaaagcgagcccgtgcggtgtggtcgagccagccagccagcgaacatggcacagtggaggtggcaacgacaccggtgaggcgagcctggttcctgaagaactcgctcgcctgctctgcctccctccctctcacaaaatcaccaggggttgcgggctgtggccctggagggcagggcatgcacgcgcgcgcacgaccgacgaccccctcgtgcaagctgcaaaccaccaccccacctcgcccccacgttcccttacgtgccctcccgtccagcgccgcgcggttgcccatcgaagcggccaaggcagggcgccagcgccacccggcccggccccttctcctgcttctgcttgctctgatgatggcccaggtatggacaaaaccagatagcgagggctacacgaagtgcactggacgcacgaagaatcgtcacggaaccaacagtacgaccgctggctatataatcgccgacgccaatggtggacttaaccaaatgagactgggaataagtgacatggtcgcggttgctaagctcatgaatgccacactagtaatcccggccctggatcacaaatcgttctggactgatccaagtgatttcaaagatatatttgacgtgcaacacttcaagcaaactctagaggatgatatcatggttgtggactccttgccgccagatttcaaaaggttcaaaccctacactagagcacccaagtcctgggccagggcttcttattatagggcattcacaaagacactgaagaaggccagggttgtgagattcacacatacagattcacgcattgccaacaacggtctccctccttccatccaaaggctccgatgccgtgcaaactacgaggcgctaaggtatgagaaggacatgctctcattcactggctgcagccacaacctaacacatcaagaggcagaggagctgagggaaatgcgactcagggtgcagcactggaaagagaaggagatcaacggtaaggagagaagactccaaggaggctgccctatgactcctcgtgaagcggctcttttcctgaaagctatgggttacccttccagcacaaggatctacgtcgtatcaggcgaaatatatggtgtgcgtagcatggacgcgttgaaggccgaatatccaaatgtctacacacattatagtctggcaacagtaaatgaattagagtctctcaggctgtaccagaacaggttagctgctgtagactacaatgtagccctccagagtgatgtttttgtgtatacatatgatgggaatatggctagagcagtccagggccataggagatacgaaggattccagaagaccataaaccctgacaggcgcaagcttgtcgagctcattgacaagctagatgaaggtacaatagattggacagggtttgcaagtgaggtgaagatgcaccatggaaacaggcttggaggtccgtatcagaggctgtttggtcgaagtccaaggcatgaggagtatttttatgcaaatcctcttccagggtgcttgtgcagaagaaacacacaggatcaagtggcatgaaccttacatacgaatagactgttatcatatattgaactttcctccaacccattgacatacaccaaacagtgaaaatccgggtaaactgacagcaaaaagacaagtttatgtagttttccatcttacatgaggatacaagagggaacactcactgaaatgtgcattttcaaaagatgtttattcaggttttaaaatagaacaggcaaagatattcaaagaggatacgtgttgtaccacagagtatataattagcagatttgatgagtttttagtgtatgtttgtatttactccatagtccacatgtaaagcctctcatgtatgagattcttctgggagcctccgacacttggtttgtcctccagatgtacagccttaaatctaaaaattaactttattca

SEQ ID NO: 74809 - DNA, 1902 bp, Zea Mays
aagagagagagagagaaagaaaaaaaagaatggacataaagtgggagtttacatcaaccgatcctatccccgcaaagtgccactagtgcttgtatgactactagtacacggcaaaaagagagtcccttgttcattggacactgggaaacacaaacttctgcctgtctgccgcctacctaaagcatctgtagacctgcaaatcaaggagcagaaagaatgatggcccaggtatggacaaaaccagatagcgagggctacacgaagtgcactggacgcacgaagaatcgtcacggaaccaacagtacgaccgctggctatataatcgccgacgccaatggtggacttaaccaaatgagactgggaataagtgacatggtcgcggttgctaagctcatgaatgccacactagtaatcccggccctggatcacaaatcgttctggactgatccaagtgatttcaaagatatatttgacgtgcaacacttcaagcaaactctagaggatgatatcatggttgtggactccttgccgccagatttcaaaaggttcaaaccctacactagagcacccaagtcctgggccagggcttcttattatagggcattcacaaagacactgaagaaggccagggttgtgagattcacacatacagattcacgcattgccaacaacggtctccctccttccatccaaaggctccgatgccgtgcaaactacgaggcgctaaggtacagtcgagagatcgaagagctaggtaatactctagtcggcagactgaggaacggatccaaccactacatcgcacttcacctaaggtatgagaaggacatgctctcattcactggctgcagccacaacctaacacatcaagaggcagaggagctgagggaaatgcgactcagggtgcagcactggaaagagaaggagatcaacggtaaggagagaagactccaaggaggctgccctatgactcctcgtgaagcggctcttttcctgaaagctatgggttacccttccagcacaaggatctacgtcgtatcaggcgaaatatatggtgtgcgtagcatggacgcgttgaaggccgaatatccaaatgtctacacacattatagtctggcaacagtaaatgaattagagtctctcaggctgtaccagaacaggttagctgctgtagactacaatgtagccctccagagtgatgtttttgtgtatacatatgatgggaatatggctagagcagtccagggccataggagatacgaaggattccagaagaccataaaccctgacaggcgcaagcttgtcgagctcattgacaagctagatgaaggtacaatagattggacagggtttgcaagtgaggtgaagatgcaccatggaaacaggcttggaggtccgtatcagaggctgtttggtcgaagtccaaggcatgaggagtatttttatgcaaatcctcttccagggtgcttgtgcagaagaaacacacaggatcaagtggcatgaaccttacatacgaatagactgttatcatatattgaactttcctccaacccattgacatacaccaaacagtgaaaatccgggtaaactgacagcaaaaagacaagtttatgtagttttccatcttacatgaggatacaagagggaacactcactgaaatgtgcattttcaaaagatgtttattcaggttttaaaatagaacaggcaaagatattcaaagaggatacgtgttgtaccacagagtatataattagcagatttgatgagtttttagtgtatgtttgtatttactccatagtccacatgtaaagcctctcatgtatgagattcttctgggagcctccgacacttggtttgtcctccagatgtacagccttaaatctaaaaattaactttattca

SEQ ID NO: 74810 - DNA, 1928 bp, Zea Mays
cagtgggacctacatgtcaccttcgccgaaatgaagcagcactcctccggaacatcgctctaccatctagcggcagagaccaaagtgcccatcgcaccatgtcggccgccgaaaccgctgtttctccgacgacgacgccgcagccgcagctgcaatcggatccgaacgccgccgccgacgcggccagttccaattctctctgggtggccgacgagacgcaaaccctaaccgaggtcctgctccaaccccaaccaaaccacctgtcgcctcctccttctggtgaaggggacgacgggatcactgcctccggtgctcctgttggtggggacgccgcggcatctgcttctgctgcggcggcggctaacgcgacgatagaagagcgggtgagggggccgtggtccccagaggaggacgcggtgctgagcaacctcgtggagaagttcggggcgcggaactggacgctgatcgcgcgtggcatcccgggccgctccggcaagtcctgccgcctgcgctggtgcaatcagctcgacccccaagtcaagcgcaagcctttcactgaggaggaccgcattataatggcagctcatgctgtccatgggaacaagtgggcatctatcgcaaagcttttggatgggagaacagacaatgccatcaagaatcactggaattccaccctgaggcgtcgctactgcaatgatggccaatgcaagcatggtggttctgtggagcgaagtatcccaaaggtgtccagggaagtttcagaagaaccttggcctttaaacgatcttaattccttcaccgctatggatgtaaaggatgatcctgtgcaaacagctccagatacttctcctcgggcaaggcacatcacagatcattgttctattactcaagtcgttgatccaccatacctgtcccgaccagcggcaaagattggtgctttcagaccatattatctaggacacacggaacctacccaacaagaaatgccaggtgctgtcgtcatgtttgactcaactcataaagtctcgactcctgaaagcgaggtattcaagtttgttgatcctatatgctttgctgctgaggtgccagacaaatgtgggtatggttgctgcggtgctcatgagcagcatcgtaagaactcattgctgggtcctgagttcagtgagtttgaaggtcatccacctgttttaaatattagctttgcttcattggtatcagaaattagcagcattgcctggatgagaagtggtatgcaaagcagtgattccagcaacttgatgcaatcaattccaccaacctgacaaagtaggaatcttttgtcagtggcggatccagaaacagatcaaatgaggggctaaattatggattggggaggctggagatggctgcaatgcgaatgaatggaaccaccatgtaaataatgtgcgaattacaaacgcgtgtgggttgctgtgtgccgtgcacatgggtgatgaactgatggacctgcattgtgctgttatgcgcctgcatcttgtaatcgtgggccttcttcgtattactatgctgaaatcactacatggtactaagtgttacttaggctgctggaccggggctgcagccccgccagccctggtcctggatccacccctgcttatgaacttgcatgctggagtattctgtagttgtttgctatattcagacatagtgatgtcaggtcattaattacaatcctggggctcactgtcaataggtgacgatgcattttcttttgcaagcattaatttatatttatttcggtgtttccaccttaatataattctatgttagcctaaagtagatattgtactgtaccgtgtgtagctgtgctgcttaaggtattggccgtgtttatttcattgtagaaaaacacatgctatctatttgatgtttgtagttgtcttcagttc

SEQ ID NO: 74811 - DNA, 1679 bp, Zea Mays
cctctctctctctctctctccctctctctctctctcagctcggctcgggttcctcgcgttcccacttcccttcccttccttcctcaccacttcttccgacccaagcaagagaaaactaaaaacaacccggacccaccaatcacgtgggcccacccaccgcctcaccaccagcgtccagggaggaggaaagggaaggaggaaccgaggaacccgccgcaccgcaggcacaggcaggcagggcagcagatcgcgagttccgacttccgacgcgtctccgaccaggccgccgccatttctctgtctccacacagcgggatccctccgccgctcgccgcttctcccttggtccaccgtccacccaaccatgtataacaattaccggaatcctccggggacgcatatgcccccgcagaattctcaacctgtccagtttgacaatccattgtacggtgcaagctcgggtctaatccgatctgggataggagtgtatggggagaagttcttgggctctagttcagagttcatgcaaagcaacatcaatagatacttctccaacccacagtattacttccacgtgaacgatcaatatgtccggaacaagttgaaagtcatattgttcccgttctttcacagggggcactggactcgaataagcgagccggtcggtggacggttgtcctacaagcctccaatatatgacataaatgcgccggatctgtacatccctttcatggcatttggaagcttcatcattctttcagggtttacattgggtttcatgggaaaaagctataaacctgcagtttacaagggcgctcatcggatggggcttccagctcacggtcctgaaaggcctgctctactcaatgggtggcggcgaggtgccactgctcgacctggtagcgtatggtggctatttattcgccgggctctcgctcgccgtcgtcgcgaggctcatgtgggcgtactcgtattacgtgatgatgccgtggatgagcctgtgcatgggggtgttcctggtgaggacgatgaagagggtgctcttcacggagatgaggagcagcgagaggcactcgtcgcggcagcattacttcctcctcttcatggcgatagtgcagttccccctgttcttctggctcggcagcataggcgtgtgatacacagttttgtgcgtgttatgatatttagatgtgttgtagaaaaaaaacagtcggaggatggtctcaccagcttgtgcccatccatattatgtgttcttgaggaaccttggatgtggtgctgtatagcttgggagctgttgttgtgaagttctacatgtgatccgtaatcatgttaacttagtccatgatgctattgttatcatttatttacagggagatgggtgctagttagtattgtggacatgttttctattcatcagtattgaatagttgaggtacccaattttccaatattattatgttgcagagataagttatccttgacaaaaatatatacgcttctcgaattctaattctccattccttgtaacaagagctgattgagtatttagggacatggaatcaccctgaacaggcaaggcttatgccatgcaggcagctgaagctgattatatacaaaaaaaaaaggaagggtggggcaaaacaaggtgggtttggaaaagaaaagaaaaaaaagat

SEQ ID NO: 74812 - DNA, 372 bp, Zea Mays
ctctctccctctctctctctctcagctcggctcgggttcctcgcgttcccacttcccttcccttccttcctcaccacttcttccgacccaagcaagagaaaactaaaaacaacccggacccaccaatcacgtgggcccacccaccgcctcaccaccagcgtccagggaggaggaaagggaaggaggaaccgaggaacccgccgcaccgcaggcacaggcaggcagggcagcagatcgcgagttccgacttccgacgcgtctccgaccaggccgccgccatttctctgtctccacacagcgggatccctccgccgctcgccgcttctcccttggtccaccgtccacccaacgccagagatcggccggtctcgg

SEQ ID NO: 74813 - DNA, 2244 bp, Zea Mays
atggggccctcccctctgacccatcaactgcgaaaagactactcacacacgtcaaactgtcccccccgacgcaccgccccccgacgcaaccgcgtccgcgtcggaccactgccgccgaaaccctacacgcccccgccacgccgcggcatggcggatccgccgcccgtggccgcctccgcctcgccggcgcagcccgaccagctcgccgccgcggcctccgtgtccaccccgcagaaccccaaccccctcctctcccctcaaattcccccgtccccgaccgtctccgacctctccgcgcacatctcgtccccgcagcagctcgaccaggcggctgcggcagctgacgcttcgggcggcggaggatccatggattacctcccgcgcccgccgcagctgcaggcgccttcgcccacgcaggcaggggtcggcgccgcggggtttgcccagatcccccgctcggggtcgacctcacgcctctccacggccacccagctccagcagtacgcggctaggatgtacggcgggcagatgagcttctcgggtggcggagggctcgtgggccagcagcagctggcggggcgcgcccccatgcttgggcagggccagctggggatgctgcaaggccagggtaacgcggcatctgcggcacattttgggcttcagtcgcagatgttggcgcaggctaggcaaaaggtcatggcacaaaacacccaattgaataatgctaatacagctcaagtgctgcaagggatgcagcccatgggtgtcatgggtgctatggggatgaaccagacgagaccgaatgtaactattccctatggtgctcaacaaaggtttgcccaggcacaaatgaggccacaagcatctcaacaacctgcactgtctccacagaaggtacctggtcaaggtttgtcgaggacagcatcaattaccgcattaaattcacaactgtctggatcatcacaaaatggacagatggtggcaatgtctatgcctcagcaacagcaacagcagcagcaatggttgaagcaaatgcaaccatccatgggctcaccactttccccacagcaacaatatcagaaccagcagaggctcctgttgatgcagcatcttcagcagaagacaggattgaaccaacaacaacttctccaaatccaacaacagcatccacatctcaatgtccaacagctgattaagcagcaacaatttctgaagcagtttcagcagcagcaaccgctacaatctcctcgtgttttagcatctggttcacagaaatctgcgaatcttacaggctcgcagccgggtacaccattgtcaggtggaactatgactggtggaagtggaagtcagggagctgaaggaactagccaacttcttgggaaaaggaaaatacaagatctggttgcacaggtagatcccttaggcaaggttgacccagaagtggaggatttacttctagaaatcgctgatgacttcattggctcggtgactgcatttgcgtgtaccttggcaaagcacaggaaatcatcagttgtcgaagccaaggatgtgttgctgcacttagaaaaaaattggaatttatctattcctggtttctcacggggggataagaatcctcaaagaaattctgcaaagcaactggtagatccccaacattcagaaagtgatgttactggtatcagaggcacaagcaataaacttggtgctaataactcggttggaaatcatcaaatacgacctccgatggcagaaccttcagcaatgccaacaatgggccctctatcaaaagcccctcgcttctagtggttatgcttctcttccctatcgaaggaaaaattcctgacaatctacctggaaaacaacccgtaggctctaactcaaggattgctagcaagtggaagcacaataaatccacgagcatctgtggcaaactgcagatgcttgtcttacagttacaggaaagcagttgctgacttaccaatcctctacatggggtcatatgtaactttattttattttattttatttttgtgcccgtaaatgcccccatccgttgtatataaatgtttttttttttggcaatggggcattatcgtcaccagttttgatgttgctaggtaggtgaacaaatactaaagtggatgcaacttatataatttaatgaaatgtaagattgatgtcatttttcgttactgagcagctgtgccttatctaaggctggttttgggactttcagcctttaat

SEQ ID NO: 74814 - DNA, 2218 bp, Zea Mays
gaaaagactactcacacacgtcaaactgtcccccccgacgcaccgccccccgacgcaaccgcgtccgcgtcggaccactgccgccgaaaccctacacgcccccgccacgccgcggcatggcggatccgccgcccgtggccgcctccgcctcgccggcgcagcccgaccagctcgccgccgcggcctccgtgtccaccccgcagaaccccaaccccctcctctcccctcaaattcccccgtccccgaccgtctccgacctctccgcgcacatctcgtccccgcagcagctcgaccaggcggctgcggcagctgacgcttcgggcggcggaggatccatggattacctcccgcgcccgccgcagctgcaggcgccttcgcccacgcaggcaggggtcggcgccgcggggtttgcccagatcccccgctcggggtcgacctcacgcctctccacggccacccagctccagcagtacgcggctaggatgtacggcgggcagatgagcttctcgggtggcggagggctcgtgggccagcagcagctggcggggcgcgcccccatgcttgggcagggccagctggggatgctgcaaggccagggtaacgcggcatctgcggcacattttgggcttcagtcgcagatgttggcgcaggctaggcaaaaggtcatggcacaaaacacccaattgaataatgctaatacagctcaagtgctgcaagggatgcagcccatgggtgtcatgggtgctatggggatgaaccagacgagaccgaatgtaactattccctatggtgctcaacaaaggtttgcccaggcacaaatgaggccacaagcatctcaacaacctgcactgtctccacagaaggtacctggtcaaggtttgtcgaggacagcatcaattaccgcattaaattcacaactgtctggatcatcacaaaatggacagatggtggcaatgtctatgcctcagcaacagcaacagcagcagcaatggttgaagcaaatgcaaccatccatgggctcaccactttccccacagcaacaatatcagaaccagcagaggctcctgttgatgcagcatcttcagcagaagacaggattgaaccaacaacaacttctccaaatccaacaacagcatccacatctcaatgtccaacagctgattaagcagcaacaatttctgaagcagtttcagcagcagcaaccgctacaatctcctcgtgttttagcatctggttcacagaaatctgcgaatcttacaggctcgcagccgggtacaccattgtcaggtggaactatgactggtggaagtggaagtcagggagctgaaggaactagccaacttcttgggaaaaggaaaatacaagatctggttgcacaggtagatcccttaggcaaggttgacccagaagtggaggatttacttctagaaatcgctgatgacttcattggctcggtgactgcatttgcgtgtaccttggcaaagcacaggaaatcatcagttgtcgaagccaaggatgtgttgctgcacttagaaaaaattggaatttatctattcctggtttctcacggggggataagaatcctcaaagaaattctgcaaagcaactggtagatccccaacattcagaaagtgatgttactggtatcagaggcacaagcaataaacttggtgctaataactcggttggaaatcatcaaatacgacctccgatggcagaaccttcagcaatgccaacaatgggccctctatcaaaagcccctcgcttctagtggttatgcttctcttccctatcgaaggaaaaattccttttcaggacaatctacctggaaaacaacccgtaggctctaactcaaggattgctagcaagtggaagcacaataaatccacgagcatctgtggcaaactgcagatgcttgtcttacagttacaggaaagcagttgctgacttaccaatcctctacatggggtcatatgtaactttattttattttattttatttttgtgcccgtaaatgcccccatccgttgtatataaatgtttttttttttggcaatggggcattatcgtcaccagttttgatgttgctaggtaggtgaacaaatactaaagtggatgcaacttatataatttaatgaaatgtaagattgatgtcatttttcgttactgagcagctgtgccttatctaaggctggttttgggactttcagcctttaat

SEQ ID NO: 74815 - DNA, 2602 bp, Zea Mays
gaaaagactactcacacacgtcaaactgtcccccccgacgcaccgccccccgacgcaaccgcgtccgcgtcggaccactgccgccgaaaccctacacgcccccgccacgccgcggcatggcggatccgccgcccgtggccgcctccgcctcgccggcgcagcccgaccagctcgccgccgcggcctccgtgtccaccccgcagaaccccaaccccctcctctcccctcaaattcccccgtccccgaccgtctccgacctctccgcgcacatctcgtccccgcagcagctcgaccaggcggctgcggcagctgacgcttcgggcggcggaggatccatggattacctcccgcgcccgccgcagctgcaggcgccttcgcccacgcaggcaggggtcggcgccgcggggtttgcccagatcccccgctcggggtcgacctcacgcctctccacggccacccagctccagcagtacgcggctaggatgtacggcgggcagatgagcttctcgggtggcggagggctcgtgggccagcagcagctggcggggcgcgcccccatgcttgggcagggccagctggggatgctgcaaggccagggtaacgcggcatctgcggcacattttgggcttcagtcgcagatgttggcgcaggctaggcaaaaggtcatggcacaaaacacccaattgaataatgctaatacagctcaagtgctgcaagggatgcagcccatgggtgtcatgggtgctatggggatgaaccagacgagaccgaatgtaactattccctatggtgctcaacaaaggtttgcccaggcacaaatgaggccacaagcatctcaacaacctgcactgtctccacagaaggtacctggtcaaggtttgtcgaggacagcatcaattaccgcattaaattcacaactgtctggatcatcacaaaatggacagatggtggcaatgtctatgcctcagcaacagcaacagcagcagcaatggttgaagcaaatgcaaccatccatgggctcaccactttccccacagcaacaatatcagaaccagcagaggctcctgttgatgcagcatcttcagcagaagacaggattgaaccaacaacaacttctccaaatccaacaacagcatccacatctcaatgtccaacagctgattaagcagcaacaatttctgaagcagtttcagcagcagcaaccgctacaatctcctcgtgttttagcatctggttcacagaaatctgcgaatcttacaggctcgcagccgggtacaccattgtcaggtggaactatgactggtggaagtggaagtcagggagctgaaggaactagccaacttcttgggaaaaggaaaatacaagatctggttgcacaggtagatcccttaggcaaggttgacccagaagtggaggatttacttctagaaatcgctgatgacttcattggctcggtgactgcatttgcgtgtaccttggcaaagcacaggaaatcatcagttgtcgaagccaaggatgtgttgctgcacttagaaaaaaattggaatttatctattcctggtttctcacggggggataagaatcctcaaagaaattctgcaaagcaactggtagatccccaacattcagaaagtgatgttactggtatcagaggcacaagcaataaacttggtgctaataactcggttggaaatcatcaaatacgacctccgatggcagaaccttcagcaatgccaacaatgggccctctatcaaaagcccctcgcttctagtggttatgcttctcttccctatcgaaggaaaaattcctgtaagttcacggagtgactaatgtggtgcttcctagtttttaatgccaatatttaacagcccaaggttattagttttatgcccttgtttgctagtaccgttatctcagtatctgcttccattttagactttcaagtttctgtattatattaatgtacatggtactccaagattgattaagagtgtagcaaaaaaattcaaaagatgtcccgttcttgtttgagagtgacgcaacttgtgcatgcaacctacccagtgtatgatgtgctctaacaatcccaggattggactagaatagccaaaatcatcgactttgtatgctaaatattgtggagtgtcaggatactgaatgttctgattgttctcacaattagccttctgaagtttcaggacaatctacctggaaaacaacccgtaggctctaactcaaggattgctagcaagtggaagcacaataaatccacgagcatctgtggcaaactgcagatgcttgtcttacagttacaggaaagcagttgctgacttaccaatcctctacatggggtcatatgtaactttattttattttattttatttttgtgcccgtaaatgcccccatccgttgtatataaatgtttttttttttggcaatggggcattatcgtcaccagttttgatgttgctaggtaggtgaacaaatactaaagtggatgcaacttatataatttaatgaaatgtaagattgatgtcatttttcgttactgagcagctgtgccttatctaaggctggttttgggactttcagcctttaat

SEQ ID NO: 74816 - DNA, 2219 bp, Zea Mays
ccagtttatcactactgctcatcaccggcctggccttcggcgatcccatattccccttccgatcccatcccttccgcatcgtccccgaacgacgcagacggacgcaaggcacggcgccgacatctccccgtggcccgagggcccagacatgaaggccctgggcgcgcacgccgccgacctgctccgaggcccgcacctactccgcgccgccgtcttcgctttcgccgttgcgctcgccttcctcgttggctaccactggcccaacgcctccccgcgccttgtcttcttctcgtccgatgcctcctcgtcgtcgcccaggtcgtcctcccgctctccttccgtcgtgctctcccctaactctaacgtctccttcgacccatccctgatccctacccccagcaccccgcctgcttcttctactcccaatgcctggtccccgcccgcactaccaccgccgacatcggcgccgccgcctcccctcccccctcctccaccaccagcgcgcctcggcatcgtcggcgaggacggcgctatgcaggacgacttcgacatcggcaacgtcggcgccaacgacactgatctggccaccgacgagaccgcgccgcaggagcctagcgacgtgggcgccagcggtggaccacctagggtgcggattgagaggttcccggtctgccccgagagcatgagggagtacataccctgcctcgacaacgaggatgatatcaagcggctgccctcgacggagcgcggggagcggtttgagcggcactgccctgccaaggacaagggtctcagctgcctcgtgccggcgcccaacgggtacaaggcgcccatcccctggcctcggagcagagacgaggtctggtttagcaacgtgcctcacacaagattgattgatgacaaaggaggacagaattggatcaccaaggtcaaagataaattcagatttcctggaggcggaactcaattcattcatggagcaaatcaatacctagaccagatctcccagatggtatcctgctcctggaggttaatagattgcttagagctggaggctactttgcttgggcagcccaacctgtttataagcatgaagaggcccaacaagaggcatggaaagagatggagaacctcactgcccgactttgctgggagtttgtgaagaaagagggatacatcgctatgtggaggaaacccttaaataactcttgctacattaaccgaggtcctgaaggaaaacctccactttgtgatgctgatgataacccggatgatgtctggtatgttggtctgaaagcatgtattagtcggcttccagagaatggcgaagcaccaactcctgttcaatggcctgcacgcttaatggagccaccaaagaggcttcaaggcgtcgaaatggatgcctactcatcaaagaatgagcttttcaaagcagaaacaaaattttgggacgacataattgacggttatatccgtatctttaagtggaggaagttcaaagtccggaatgtaatggacatgagggctggatttggagggtttgcagctgctttgatccgccagaaactggattggtgggtgatgaatgttgttcctattagtgagccaaatacactacctgtaatttttgatcgggggcttcttggagtagctcatgactggtgtgaaccctttgatacataccctaggacgtacgatctacttcatgcatctggtcttttctcaaaggagcagaacaggtgtaatatctctagcatcttgctggagatggaccggatactcagaccaggtggtaaagcatatattcgtgaccggaaagaagttatacaggagatcaaagaaataacgaatgccatggggtggcgtggtactatacgtgacactgccgaaggcgcgtacgccagtaggaaggttttgatgtgcgacaagcctatggcgcgttaggcgatcaggtgaagacaagcaggggtaattttaggtacttttgcaactgaaaagagctgctgtcgggactgacatttgtgctgtagatagggtaggtcaaggactaatttgtaactatttgattgatcatccatttgtaaaatgatgatctgtgtagtttctgacatgtgccaatttcttttgttgaaacattgtcatggaaaccctacaaaagtgggggaaatacgaagagaccgttttaaactaaacaatatcagagtaaaaattaataataa

SEQ ID NO: 74817 - DNA, 3129 bp, Zea Mays
atcactactgctcatcaccggcctggccttcggcgatcccatattccccttccgatcccatcccttccgcatcgtccccgaacgacgcagacggacgcaaggcacggcgccgacatctccccgtggcccgagggcccagacatgaaggccctgggcgcgcacgccgccgacctgctccgaggcccgcacctactccgcgccgccgtcttcgctttcgccgttgcgctcgccttcctcgttggctaccactggcccaacgcctccccgcgccttgtcttcttctcgtccgatgcctcctcgtcgtcgcccaggtcgtcctcccgctctccttccgtcgtgctctcccctaactctaacgtctccttcgacccatccctgatccctacccccagcaccccgcctgcttcttctactcccaatgcctggtccccgcccgcactaccaccgccgacatcggcgccgccgcctcccctcccccctcctccaccaccagcgcgcctcggcatcgtcggcgaggacggcgctatgcaggacgacttcgacatcggcaacgtcggcgccaacgacactgatctggccaccgacgagaccgcgccgcaggagcctagcgacgtgggcgccagcggtggaccacctagggtgcggattgagaggttcccggtctgccccgagagcatgagggagtacataccctgcctcgacaacgaggatgatatcaagcggctgccctcgacggagcgcggggagcggtttgagcggcactgccctgccaaggacaagggtctcagctgcctcgtgccggcgcccaacgggtacaaggcgcccatcccctggcctcggagcagagacgaggtctggtttagcaacgtgcctcacacaagattgattgatgacaaaggaggacagaattggatcaccaaggtcaaagataaattcagatttcctggaggcggaactcaattcattcatggagcaaatcaatacctagaccagatctcccagatggtaccaaatgttgcatttggatctcatactagagttgtcttggatgttggctgtggagtagcaagttttggtgcatatttactttcacgtgatgtcctgacattgtccatagctccaaaagatgttcatgaaaatcagattcagtttgctcttgaacgtggtgtgcctgcaatggcagcagcatttgcaacgcgccggttgttatatacaagccaagcgtttgatataatacattgctcacgctgccgaataaattggacccgtgatggtgagctgtgattactatataattatttttaattaacattgcacacttagtttgtcaccatgctgtatcttgatatcttcatagttaggctgaatgctcacttaactcttctctcccagttttcctagtcttcccccttagatctgtagggatgatatttttatttgtcttagacgtcgaatttatttcacgattctcaaagaaaataaatacttttaaccaatggatagaaaacgaggtgagttattgtgaagaagctaaaggttgttattgattgtatacttttcatttaaacttgatctcaaaggtatgtgcacttatctatgtactttccaaatttgcctaagttttgtacttttgttatcatatttgtttatttgaagatggtatcctgctcctggaggttaatagattgcttagagctggaggctactttgcttgggcagcccaacctgtttataagcatgaagaggcccaacaagaggcatggaaagagatggagaacctcactgcccgactttgctgggagtttgtgaagaaagagggatacatcgctatgtggaggaaacccttaaataactcttgctacattaaccgaggtcctgaaggaaaacctccactttgtgatgctgatgataacccggatgatgtctggtactcatttagcctgttgccataattattgaaatgcatatcaatttagtattctcttctgtaagctgggtccagcctttcttactgctgctgagttgtatttgatgagattatgtattctttatatcagatctcattgcgccatagatttctgtggatttatccgatcagcttttcatttgtcacattggctgtcatccctgtacacatatctttgctgcaaaacccttttttattactctttacattctattttatctcaggtatgttggtctgaaagcatgtattagtcggcttccagagaatggcgaagcaccaactcctgttcaatggcctgcacgcttaatggagccaccaaagaggcttcaaggcgtcgaaatggatgcctactcatcaaagaatgagcttttcaaagcagaaacaaaattttgggacgacataattgacggttatatccgtatctttaagtggaggaagttcaaagtccggaatgtaatggacatgagggctggatttggagggtttgcagctgctttgatccgccagaaactggattggtgggtgatgaatgttgttcctattagtgagccaaatacactacctgtaatttttgatcgggggcttcttggagtagctcatgactggtgtgaaccctttgatacataccctaggacgtacgatctacttcatgcatctggtcttttctcaaaggagcagaacaggtgtaatatctctagcatcttgctggagatggaccggatactcagaccaggtggtaaagcatatattcgtgaccggaaagaagttatacaggagatcaaagaaataacgaatgccatggggtggcgtggtactatacgtgacactgccgaaggcgcgtacgccagtaggaaggttttgatgtgcgacaagcctatggcgcgttaggcgatcaggtgaagacaagcaggggtaattttaggtacttttgcaactgaaaagagctgctgtcgggactgacatttgtgctgtagatagggtaggtcaaggactaatttgtaactatttgattgatcatccatttgtaaaatgatgatctgtgtagtttctgacatgtgccaatttcttttgttgaaacattgtcatggaaaccctacaaaagtgggggaaatacgaagagaccgttttaaactaaacaatatcagagtaaaaattaataataa

SEQ ID NO: 74818 - DNA, 2732 bp, Zea Mays
cggcgatcccatattccccttccgatcccatcccttccgcatcgtccccgaacgacgcagacggacgcaaggcacggcgccgacatctccccgtggcccgagggcccagacatgaaggccctgggcgcgcacgccgccgacctgctccgaggcccgcacctactccgcgccgccgtcttcgctttcgccgttgcgctcgccttcctcgttggctaccactggcccaacgcctccccgcgccttgtcttcttctcgtccgatgcctcctcgtcgtcgcccaggtcgtcctcccgctctccttccgtcgtgctctcccctaactctaacgtctccttcgacccatccctgatccctacccccagcaccccgcctgcttcttctactcccaatgcctggtccccgcccgcactaccaccgccgacatcggcgccgccgcctcccctcccccctcctccaccaccagcgcgcctcggcatcgtcggcgaggacggcgctatgcaggacgacttcgacatcggcaacgtcggcgccaacgacactgatctggccaccgacgagaccgcgccgcaggagcctagcgacgtgggcgccagcggtggaccacctagggtgcggattgagaggttcccggtctgccccgagagcatgagggagtacataccctgcctcgacaacgaggatgatatcaagcggctgccctcgacggagcgcggggagcggtttgagcggcactgccctgccaaggacaagggtctcagctgcctcgtgccggcgcccaacgggtacaaggcgcccatcccctggcctcggagcagagacgaggtctggtttagcaacgtgcctcacacaagattgattgatgacaaaggaggacagaattggatcaccaaggtcaaagataaattcagatttcctggaggcggaactcaattcattcatggagcaaatcaatacctagaccagatctcccagatggtaccaaatgttgcatttggatctcatactagagttgtcttggatgttggctgtggagtagcaagttttggtgcatatttactttcacgtgatgtcctgacattgtccatagctccaaaagatgttcatgaaaatcagattcagtttgctcttgaacgtggtgtgcctgcaatggcagcagcatttgcaacgcgccggttgttatatacaagccaagcgtttgatataatacattgctcacgctgccgaataaattggacccgtgatggtgagctgtgattactatataattatttttaattaacattgcacacttagtttgtcaccatgctgtatcttgatatcttcatagttaggctgaatgctcacttaactcttctctcccagttttcctagtcttcccccttagatctgtagggatgatatttttatttgtcttagacgtcgaatttatttcacgattctcaaagaaaataaatacttttaaccaatggatagaaaacgaggtgagttattgtgaagaagctaaaggttgttattgattgtatacttttcatttaaacttgatctcaaagattgcttagagctggaggctactttgcttgggcagcccaacctgtttataagcatgaagaggcccaacaagaggcatggaaagagatggagaacctcactgcccgactttgctgggagtttgtgaagaaagagggatacatcgctatgtggaggaaacccttaaataactcttgctacattaaccgaggtcctgaaggaaaacctccactttgtgatgctgatgataacccggatgatgtctggtatgttggtctgaaagcatgtattagtcggcttccagagaatggcgaagcaccaactcctgttcaatggcctgcacgcttaatggagccaccaaagaggcttcaaggcgtcgaaatggatgcctactcatcaaagaatgagcttttcaaagcagaaacaaaattttgggacgacataattgacggttatatccgtatctttaagtggaggaagttcaaagtccggaatgtaatggacatgagggctggatttggagggtttgcagctgctttgatccgccagaaactggattggtgggtgatgaatgttgttcctattagtgagccaaatacactacctgtaatttttgatcgggggcttcttggagtagctcatgactggtgtgaaccctttgatacataccctaggacgtacgatctacttcatgcatctggtcttttctcaaaggagcagaacaggtgtaatatctctagcatcttgctggagatggaccggatactcagaccaggtggtaaagcatatattcgtgaccggaaagaagttatacaggagatcaaagaaataacgaatgccatggggtggcgtggtactatacgtgacactgccgaaggcgcgtacgccagtaggaaggttttgatgtgcgacaagcctatggcgcgttaggcgatcaggtgaagacaagcaggggtaattttaggtacttttgcaactgaaaagagctgctgtcgggactgacatttgtgctgtagatagggtaggtcaaggactaatttgtaactatttgattgatcatccatttgtaaaatgatgatctgtgtagtttctgacatgtgccaatttcttttgttgaaacattgtcatggaaaccctacaaaagtgggggaaatacgaagagaccgttttaaactaaacaatatcagagtaaaaattaataataa

SEQ ID NO: 74819 - DNA, 2447 bp, Zea Mays
ggcgatcccatattccccttccgatcccatcccttccgcatcgtccccgaacgacgcagacggacgcaaggcacggcgccgacatctccccgtggcccgagggcccagacatgaaggccctgggcgcgcacgccgccgacctgctccgaggcccgcacctactccgcgccgccgtcttcgctttcgccgttgcgctcgccttcctcgttggctaccactggcccaacgcctccccgcgccttgtcttcttctcgtccgatgcctcctcgtcgtcgcccaggtcgtcctcccgctctccttccgtcgtgctctcccctaactctaacgtctccttcgacccatccctgatccctacccccagcaccccgcctgcttcttctactcccaatgcctggtccccgcccgcactaccaccgccgacatcggcgccgccgcctcccctcccccctcctccaccaccagcgcgcctcggcatcgtcggcgaggacggcgctatgcaggacgacttcgacatcggcaacgtcggcgccaacgacactgatctggccaccgacgagaccgcgccgcaggagcctagcgacgtgggcgccagcggtggaccacctagggtgcggattgagaggttcccggtctgccccgagagcatgagggagtacataccctgcctcgacaacgaggatgatatcaagcggctgccctcgacggagcgcggggagcggtttgagcggcactgccctgccaaggacaagggtctcagctgcctcgtgccggcgcccaacgggtacaaggcgcccatcccctggcctcggagcagagacgaggtctggtttagcaacgtgcctcacacaagattgattgatgacaaaggaggacagaattggatcaccaaggtcaaagataaattcagatttcctggaggcggaactcaattcattcatggagcaaatcaatacctagaccagatctcccagatggtaccaaatgttgcatttggatctcatactagagttgtcttggatgttggctgtggagtagcaagttttggtgcatatttactttcacgtgatgtcctgacattgtccatagctccaaaagatgttcatgaaaatcagattcagtttgctcttgaacgtggtgtgcctgcaatggcagcagcatttgcaacgcgccggttgttatatacaagccaagcgtttgatataatacattgctcacgctgccgaataaattggacccgtgatgatggtatcctgctcctggaggttaatagattgcttagagctggaggctactttgcttgggcagcccaacctgtttataagcatgaagaggcccaacaagaggcatggaaagagatggagaacctcactgcccgactttgctgggagtttgtgaagaaagagggatacatcgctatgtggaggaaacccttaaataactcttgctacattaaccgaggtcctgaaggaaaacctccactttgtgatgctgatgataacccggatgatgtatgttggtctgaaagcatgtattagtcggcttccagagaatggcgaagcaccaactcctgttcaatggcctgcacgcttaatggagccaccaaagaggcttcaaggcgtcgaaatggatgcctactcatcaaagaatgagcttttcaaagcagaaacaaaattttgggacgacataattgacggttatatccgtatctttaagtggaggaagttcaaagtccggaatgtaatggacatgagggctggatttggagggtttgcagctgctttgatccgccagaaactggattggtgggtgatgaatgttgttcctattagtgagccaaatacactacctgtaatttttgatcgggggcttcttggagtagctcatgactggtgtgaaccctttgatacataccctaggacgtacgatctacttcatgcatctggtcttttctcaaaggagcagaacaggtgtaatatctctagcatcttgctggagatggaccggatactcagaccaggtggtaaagcatatattcgtgaccggaaagaagttatacaggagatcaaagaaataacgaatgccatggggtggcgtggtactatacgtgacactgccgaaggcgcgtacgccagtaggaaggttttgatgtgcgacaagcctatggcgcgttaggcgatcaggtgaagacaagcaggggtaattttaggtacttttgcaactgaaaagagctgctgtcgggactgacatttgtgctgtagatagggtaggtcaaggactaatttgtaactatttgattgatcatccatttgtaaaatgatgatctgtgtagtttctgacatgtgccaatttcttttgttgaaacattgtcatggaaaccctacaaaagtgggggaaatacgaagagaccgttttaaactaaacaatatcagagtaaaaattaataataa

SEQ ID NO: 74820 - DNA, 2527 bp, Zea Mays
ggcgatcccatattccccttccgatcccatcccttccgcatcgtccccgaacgacgcagacggacgcaaggcacggcgccgacatctccccgtggcccgagggcccagacatgaaggccctgggcgcgcacgccgccgacctgctccgaggcccgcacctactccgcgccgccgtcttcgctttcgccgttgcgctcgccttcctcgttggctaccactggcccaacgcctccccgcgccttgtcttcttctcgtccgatgcctcctcgtcgtcgcccaggtcgtcctcccgctctccttccgtcgtgctctcccctaactctaacgtctccttcgacccatccctgatccctacccccagcaccccgcctgcttcttctactcccaatgcctggtccccgcccgcactaccaccgccgacatcggcgccgccgcctcccctcccccctcctccaccaccagcgcgcctcggcatcgtcggcgaggacggcgctatgcaggacgacttcgacatcggcaacgtcggcgccaacgacactgatctggccaccgacgagaccgcgccgcaggagcctagcgacgtgggcgccagcggtggaccacctagggtgcggattgagaggttcccggtctgccccgagagcatgagggagtacataccctgcctcgacaacgaggatgatatcaagcggctgccctcgacggagcgcggggagcggtttgagcggcactgccctgccaaggacaagggtctcagctgcctcgtgccggcgcccaacgggtacaaggcgcccatcccctggcctcggagcagagacgaggtctggtttagcaacgtgcctcacacaagattgattgatgacaaaggaggacagaattggatcaccaaggtcaaagataaattcagatttcctggaggcggaactcaattcattcatggagcaaatcaatacctagaccagatctcccaggttcgatgtcaaatattcttcaaaactgcttggaatttaatccttactctgactagagcaacctgttccctctgttcgtccagatggtaccaaatgttgcatttggatctcatactagagttgtcttggatgttggctgtggagtagcaagttttggtgcatatttactttcacgtgatgtcctgacattgtccatagctccaaaagatgttcatgaaaatcagattcagtttgctcttgaacgtggtgtgcctgcaatggcagcagcatttgcaacgcgccggttgttatatacaagccaagcgtttgatataatacattgctcacgctgccgaataaattggacccgtgatgatggtatcctgctcctggaggttaatagattgcttagagctggaggctactttgcttgggcagcccaacctgtttataagcatgaagaggcccaacaagaggcatggaaagagatggagaacctcactgcccgactttgctgggagtttgtgaagaaagagggatacatcgctatgtggaggaaacccttaaataactcttgctacattaaccgaggtcctgaaggaaaacctccactttgtgatgctgatgataacccggatgatgtctggtatgttggtctgaaagcatgtattagtcggcttccagagaatggcgaagcaccaactcctgttcaatggcctgcacgcttaatggagccaccaaagaggcttcaaggcgtcgaaatggatgcctactcatcaaagaatgagcttttcaaagcagaaacaaaattttgggacgacataattgacggttatatccgtatctttaagtggaggaagttcaaagtccggaatgtaatggacatgagggctggatttggaggctgctttgatccgccagaaactggattggtgggtgatgaatgttgttcctattagtgagccaaatacactacctgtaatttttgatcgggggcttcttggagtagctcatgactggtgtgaaccctttgatacataccctaggacgtacgatctacttcatgcatctggtcttttctcaaaggagcagaacaggtgtaatatctctagcatcttgctggagatggaccggatactcagaccaggtggtaaagcatatattcgtgaccggaaagaagttatacaggagatcaaagaaataacgaatgccatggggtggcgtggtactatacgtgacactgccgaaggcgcgtacgccagtaggaaggttttgatgtgcgacaagcctatggcgcgttaggcgatcaggtgaagacaagcaggggtaattttaggtacttttgcaactgaaaagagctgctgtcgggactgacatttgtgctgtagatagggtaggtcaaggactaatttgtaactatttgattgatcatccatttgtaaaatgatgatctgtgtagtttctgacatgtgccaatttcttttgttgaaacattgtcatggaaaccctacaaaagtgggggaaatacgaagagaccgttttaaactaaacaatatcagagtaaaaattaataataa

SEQ ID NO: 74821 - DNA, 2715 bp, Zea Mays
ggcgatcccatattccccttccgatcccatcccttccgcatcgtccccgaacgacgcagacggacgcaaggcacggcgccgacatctccccgtggcccgagggcccagacatgaaggccctgggcgcgcacgccgccgacctgctccgaggcccgcacctactccgcgccgccgtcttcgctttcgccgttgcgctcgccttcctcgttggctaccactggcccaacgcctccccgcgccttgtcttcttctcgtccgatgcctcctcgtcgtcgcccaggtcgtcctcccgctctccttccgtcgtgctctcccctaactctaacgtctccttcgacccatccctgatccctacccccagcaccccgcctgcttcttctactcccaatgcctggtccccgcccgcactaccaccgccgacatcggcgccgccgcctcccctcccccctcctccaccaccagcgcgcctcggcatcgtcggcgaggacggcgctatgcaggacgacttcgacatcggcaacgtcggcgccaacgacactgatctggccaccgacgagaccgcgccgcaggagcctagcgacgtgggcgccagcggtggaccacctagggtgcggattgagaggttcccggtctgccccgagagcatgagggagtacataccctgcctcgacaacgaggatgatatcaagcggctgccctcgacggagcgcggggagcggtttgagcggcactgccctgccaaggacaagggtctcagctgcctcgtgccggcgcccaacgggtacaaggcgcccatcccctggcctcggagcagagacgaggtctggtttagcaacgtgcctcacacaagattgattgatgacaaaggaggacagaattggatcaccaaggtcaaagataaattcagatttcctggaggcggaactcaattcattcatggagcaaatcaatacctagaccagatctcccagatggtaccaaatgttgcatttggatctcatactagagttgtcttggatgttggctgtggagtagcaagttttggtgcatatttactttcacgtgatgtcctgacattgtccatagctccaaaagatgttcatgaaaatcagattcagtttgctcttgaacgtggtgtgcctgcaatggcagcagcatttgcaacgcgccggttgttatatacaagccaagcgtttgatataatacattgctcacgctgccgaataaattggacccgtgatgatggtatcctgctcctggaggttaatagattgcttagagctggaggctactttgcttgggcagcccaacctgtttataagcatgaagaggcccaacaagaggcatggaaagagatggagaacctcactgcccgactttgctgggagtttgtgaagaaagagggatacatcgctatgtggaggaaacccttaaataactcttgctacattaaccgaggtcctgaaggaaaacctccactttgtgatgctgatgataacccggatgatgtctggtactcatttagcctgttgccataattattgaaatgcatatcaatttagtattctcttctgtaagctgggtccagcctttcttactgctgctgagttgtatttgatgagattatgtattctttatatcagatctcattgcgccatagatttctgtggatttatccgatcagcttttcatttgtcacattggctgtcatccctgtacacatatctttgctgcaaaacccttttttattactctttacattctattttatctcaggtatgttggtctgaaagcatgtattagtcggcttccagagaatggcgaagcaccaactcctgttcaatggcctgcacgcttaatggagccaccaaagaggcttcaaggcgtcgaaatggatgcctactcatcaaagaatgagcttttcaaagcagaaacaaaattttgggacgacataattgacggttatatccgtatctttaagtggaggaagttcaaagtccggaatgtaatggacatgagggctggatttggagggtttgcagctgctttgatccgccagaaactggattggtgggtgatgaatgttgttcctattagtgagccaaatacactacctgtaatttttgatcgggggcttcttggagtagctcatgactggtgtgaaccctttgatacataccctaggacgtacgatctacttcatgcatctggtcttttctcaaaggagcagaacaggtgtaatatctctagcatcttgctggagatggaccggatactcagaccaggtggtaaagcatatattcgtgaccggaaagaagttatacaggagatcaaagaaataacgaatgccatggggtggcgtggtactatacgtgacactgccgaaggcgcgtacgccagtaggaaggttttgatgtgcgacaagcctatggcgcgttaggcgatcaggtgaagacaagcaggggtaattttaggtacttttgcaactgaaaagagctgctgtcgggactgacatttgtgctgtagatagggtaggtcaaggactaatttgtaactatttgattgatcatccatttgtaaaatgatgatctgtgtagtttctgacatgtgccaatttcttttgttgaaacattgtcatggaaaccctacaaaagtgggggaaatacgaagagaccgttttaaactaaacaatatcagagtaaaaattaataataa

SEQ ID NO: 74822 - DNA, 6276 bp, Zea Mays
aataatcgtatgacatcataatatatcttttattatataatcatgaatgaataagaataacacaggattacatttgtacctttggcttgatagaaggtaaaagtacaagcgtgacgcacgagcgagtacaagtcagcgtgaacagtacgtgggtactattcatctatttataggaacagggcgtagcctgtgtaaatttacattcatgcccttcatatttactattgacttatggacaacccaacgaggactagatagtcttttcccttttatggcggttccttttttctgccattgggccgaagctcccttgcgcgtagcttcggagcaacactagccttcgtctcgaccatgtttttcacatcgtatatggttttaacccgagtccgaaggtacctgttcatatattacacttgggaaacattgttaaatcatgtttttgaggaccttcggaagacgaaggcccccaatagtagcccctcgcagtattaatttgttaagataacgaattcagactatgatatggacaaaggccttaagccaaaggtccgaaaaaacaccttccctttgctagaatagcaataatcaatgacagacggggccctccaatttgcagcacactgggcgtataaatatggactcacaccagctgcatttgatacgttgtttctgccatttgcattattttctcaatcttttagctcctgctcactagcgctcgctagattttcaagctctctgaacttcggtttaaaaggcgcatttttaccatgtctggtgaaaaaatgtcccaaaaaagaaggttgttgtggagacgaaactgactgaagaggcgaagctgtttgaggagaagaaggctgtggatccttatgttgctggatttgttgaatcgatggcaaagacaaacactaagaagattactagagagatactcgaaggtttatctgaagatactggtgctagcgatagttatgatgtggaaagtggggatgaagattctgaagatcggccctggcgaccaagccattctatcttcggaaaatcaaccattaaacagagtcatcttgagaacatgagaggacggtattttcgggacatgtctattgtgagggctggtggagacaacaacgtccctgcccttgtggaaaacgaagttgtaatttaccgaagcttcttcaaggctaggcttcggttccctttgagcaagtttgtagttgaagtgttgaaaatctaccagatcttcctccatcagattacccccgaagctataataaggatggggatttttgtctgggcagtaaggagtcaagggctagagccaagcgcgaagtgcttctgcagtatgcatgaacttctatatgagacgaaggccatgggtaaagaacagtaccacaacaacttcggttgctatggatttatcgctcgccccaacgcaagccacccggtgccaacatttcggaagagatggcccgaagcttggatggaagaatggttttatgtgaagaatgatttgaaagcgagggaagatattaaggaagtcatcatgcgacaattgaagcgtgtcagagggccttcagcactatttgttcctttattgggacaagagatttaattcaagaacatatagcctttagggtatggccgcttgtagacagctgggaaatgccgaaggagaccaccaccgactctagcgtaggtggtctggtccagctgaagtataccttcagatgcagggagaagtttgatgagccaaacaacgactggctaaagcgtatcgaagctacaagtgatgaactgcttggagcatattccaaggcggaagataatgctttgtctgcagctttcgaaggtcggggaaagaaaaagactgaacagagtttttgacgccatcggcttcgtataccccgattaccgctacccactacggggacaggggaaaaagaggaaaactgctgcttcggccaccccagttgagcctgtgccgaagggcaaaaaggtgaaggttcttacccaccggccgcattacattaaaccgaccgtggtgcctgaatttggcgtagggacctcttctgctagcaaaataaaagaaactatcccaactgcgcagagcactgaagagccgactttaatgccgaaggtgcttacagtcaagctggttgaaacgaaatttgataaggctgaagagccaaaaattgaagaaataatgaagatgccagagattttgagcccttcaacagaggcaacagtatcgaaggtacaaatgggttctgtcgtaactcctaagaggagaaggatggcaaatgttctggatgttgtgttagaaacaacaaaaaccttgagtcatactcctacaaggaaagttgccgaagcttccaagtcacaacccgaagttgatactaaggaggctgaagtcgaagctgcaataattcaggctaaaaccgaagctgggccttcagtgcctaccgagatggagcgtgctgaccctaaggacaaatcaacagagcggattgcaactgaaaaaattgaagctcctggtcccgaagcgtcgaacaaaagtattgactacattattcgtcatgcttcgggaaaggtactatcccaagaagaaatgttagaagcgcaacactatgcctaaaaattgaaatatccgaagggggcgttagtgttcaatggcagtggcgaagaagactttttgtactgtctcctggataacaaaagaaatattcgtttttcgagagataggtaaaagcatcggattcccgaagctggaagacggtctttcgattttatcgaaggacaaacttgctgatagcctagcatacaatagcataaaggtataaaaactaactctagatttgaaaaatgaggtattttatttgtcatacttattctttcctccaccttgcagggcttgattcttagtaatgcccttagggcatagaaaaatatagaggacgaaggctatacaatggccctgaacaaccttcgttcaaaggtaattgaactgagaaacgaaggtcttgaagaagacaatcttattctctctggttacaaagtaaaagaagatgaagctagcttcaaagcccaggccgaagcctaaaagattgaaattgaagaccttcggaggcaacttgccgaagctaaagaaaaatgcgcgctcgcagaagctaaccgagaaatcagcgaatattggaaaaataatttagagaaaaacattgaagaacttcgcacatccaaggaaagatgctttgaaaaatccttggaccgtgtgaagaaaataaaaatcagtttcgccaacgtgggcgcctactctactgaagaaaacttcatacgaggcgaccccgaaggcgttattgaatggataagtggggaggccaagagctttgaagaaatcttaagtgatcgcggggatgtctgtgcattttctagtgcacgggggatttcagctatcttggagaaggcgggatgtgatcacatcaagactatggcccaggccgaagctgccttctccacagacgacacgaaggatccttcagctgaagcaaccttgatgggcgaaaaattctataatgatgtctgggtgaatggtggccgagagatggctcatgaaattataaagaaaagtgaaaaagacacccatgacgccctgatagaagcaagacaagctgaagaagctgcagagcacgaaaaacgtataggtattgtttcttggcttttagcttcgacattggtttttatggcttcggactgattaactttttcctattttagctgaattatctccgccaccggaaccgttcgatcccctggccgatccagaaacgaaggaagcactggagatcattaatatggctgaatctattgttgacgaagtcgtcaatagattgctaaatgaagtttccgagaaaatcctgaaagaagactagcacttattgtaaaaacatttttaaatggtcgatgtaagagacactagaatggacattgtgctttttattgtaacgaagctgtaatatttgatgtgtgtaactttggattgaatatgtaaactattataatctatttctttacgatgcatgaaacttacatacataccgttattgagccttcggcgaaaaaacaccttcccttcttttcatgcttcgtaaagaaagaagatctgtagtttgtaaaaataaagatagccatgctttggaaagagagatccctcttttgtgtgcaggctgacgaagctgtaattcgaagcttacttcgtgtaattttgacaatattttccaaaaatcggctctgtggcagaacctccaagttatcgggcccacatgcacctgtccttgtctcaaagacctcagacggccatgcatgtgcaccagataacttaacaggatccgtccgattgccccaaggacaccggataaaccacttacaaccagaaccgcgggattaagtaacacaaatcacacacaccaatatttttgcagcggaaatcttattaccaaatattacaagttacaaaaaatttatattattttatcggagtgattacaaaagtataagtttgaaatatatgctagctcaaatgaccatcctcagtaagaagataaagacgggttatacttatataagaaggccgagcccaccggcacttaacaccatcaaaagcagcacaaagatagaacctgaaaaacaacagggaataaaaccctgagtatggaattactcagcaagacttacccgactaaagaaaagactctcaagggtatgctggatttgggaatcaaggagaggctttagcaagaatcaacttagatacttttgcagaaatagcttactaaagtgagtccttacttccaatattttaacgccaaattaaatattaatagactttgtttgcatatggtctactttcaccatatcatcaatacaacatcatttttattcatgagattcacatcctgacttaggttgcaggtcagtgatcaagtctccactctccggggatataacggcgatccgaatcgatttactcagctgaggatctctaaccacacgacatatgtagcacttaacccttgcatatgtcaaccgttcccacagatcctccacaacgtgaaccggtccgcgctacccgggagcacagtactcctccatccagcctctagccaggagggcacacgctactcccaccatctcccacgcccagtgcgcggttgtcttttcacatatggaatagccgggttcaagcttaccctgtcccatttccagggcatgtggctagttaagatagtccttgatctatcaggcctacatacgcatccaatccttaattgacccggacggaacatcatctgttcctagcccaagtctcgagttaagtacttccacccttaggattgttttgtgtttctaaggatgaaaagagcattatagggaactttacagtaagatcccaccatgctcccaatgaaaatatccgtgcaggtagagatcatccttcctcaggatcaacctgagctaggcataagtgcaaaggacaaactctatctgcctataagcagggctaagcattttttttgtaaatcatattttgatacttcaccagaagtatctataaaagggatggatttcaaggtaggcaatgcatcgaagggtttccaagcaacttctataaacctaatgcacatttcactagacttaaagtgtgcaaaaataatttaaaaacacaaggaaggggttgcatgcaccggggcttgtctggaagaaacactaggttagtgttgttagacgatgtccacttgacgatcatccttgttctgatacttgtttcgtctatccatcttccggattgtccatcaacatcatcctgcggattagcccgcgcttgggatcgacttggttcgtcttccgcatcgcgtgattaattaacgtacctgaatgaaatggattatgcacatgaatgcatatcgacaagaatatcacacacctaaatagtgctacgcgatagcggaacacctagcggcgaggcgttgtacaagttcatacggaaatactagttatcgatattcgactacgcgtaataattacgcttctttaaattaaacgaacctaacgcaaacatcatgaaacaacaaataatacatatttaatataattagcctaattttggctacacgatagtgaatcgaatatctagtgacgaggcacaaataacatttaaaagcaattaccagataccgggatattactaagtacaacgttcgcgctattttaacttaaccgaat

SEQ ID NO: 74823 - DNA, 324 bp, Zea Mays
agaagacaaggcttgaagcgtgacatgggttgaagtaataaagggatttcccccattttcgttaatggagacttaaaagtaagtggataataggactaaggtttaaaagagatacaaataaattggcccaaaacaatatcaggcataaaagaaaaattagataggatttgatttggtgagtactcctaaaatcagataattttcgtgactgtttcggacaacacggaaacgaactagatatcagatacattattctgagaccatactagtttagtcgaaatcggataaaaatttacccgatgcctaaacatagttgatttgatt

SEQ ID NO: 74824 - DNA, 2094 bp, Zea Mays
tttttttcctattccttctcctcggctcttctccctgaccttcaacgggcgaggttttttgaaagcatcctctctctcgtctcctcttcaacccccgacacccaactgaagccgtaaccgaagccgtagagagggggagccaaagcttactctttagaccttcctacttcataggatttcgggactatcctccctcgattcgtgtcatctacctcgcggtcccgcctcaactgccgcctgtcgattagccgctcggagccccaattctatacggctcttcgatctgggatccgctagattcgtaaggcggcgtttcgttcgatctgttttggggcgtgattgccgtggaggatctgtttctaattgtacctgatataaatgcctgtttcaaaaaactaccctcctagatgggctagtcagctaatatgtattttgctgtatcagtaacttctggcacctattatgttgtgttttgtatgcacaccccacccagttaatagatatactcccttttttctttatttcttttttgctaatgagttttttcattacaatgatagacgaacaactggaccgataagaagagctaagggtggctggacaccagaagaggatgaaacactgcagaaggcagttgtagctttcaagggcagaaattggaaaaaaatagctgaattctttcaggacaggactgaggttcaatgtttgcatcgttggcagaaggttcttaatccggagcttatcaaaggcccttggactcaagaggaagatgaaaaaatcattgaccttgtgggcaagtatggaccaacaaaatggtctatcatcgcgaaatcattgcctggccgcataggcaagcaatgccgagagaggtggcataatcatctgaatccagaaataaggaaagatgcttggactcctgaggaggaaagagcacttattgatgcccatcaagtgtttgggaataaatgggcagaaatagcaaaagctcttcccggaagaaggaccgataattctataaagaatcactggaacagttctttgcgaaagaagctagaagcctatagtagtgttctttcagctccgaagctgtttgttcatgatgatttcaaggataaaatgaagcccgtggctactgatagccatcttgatctgaaccaaatgccaagcgttggttcaaaagatgtccctggaagagcttattgtactattttgagcccaccttcacaggcatacaatttggactcatcaggcttgttttctttttctataccaactacgcagcctttaacttcatatgcaatgtcgtcactagttgatggttctgctgttacattggcggcacaaggtctgcaaagtgattctgtccgtgacaagggcctagaaatcgactctgtacatgagaagggtgttgaggttggctcaacgcctgatcctgctggggttgaattagaatctgcaccagccaaaagaggtgcagaattatcttcaaagattgagttgcattctatccttggtcctctttgttatcaaattccaaacatggaagatgtggtcccaatcagtaccccgctccgttctgaacataatagtgcacagaaaacatcacaacattgcatgtcacccaatggttatacttctccctctgcaacgattggaaacgtatcaagtcagctaactgttgattcaattttgaggattgctgctgacacctttccatgtactccttcaatactaaggaaaagaaaacgtgataaagcaacacctgcttcgggtaatgagttaaagacaggtggagtaaccaatgatagcttttacactcctaatcgaacgaatgggaaggatactacttctccaaggtcgtttaaaactgctgcatcttttttgtcgctgggttctgttaatgggttattgacttctgcaaggagctttgattcttcaccaccctatcagaagaaaaggtcaaaaagaatggccatcatcaaatcagttgagaaacagctagatttttcagcagatggactggatacttctggttctgagattatgaactctccttgccataattcccaaggtgcaaattctaacaggatgtag

SEQ ID NO: 74825 - DNA, 2494 bp, Zea Mays
tttttttcctattccttctcctcggctcttctccctgaccttcaacgggcgaggttttttgaaagcatcctctctctcgtctcctcttcaacccccgacacccaactgaagccgtaaccgaagccgtagagagggggagccaaagcttactctttagaccttcctacttcataggatttcgggactatcctccctcgattcgtgtcatctacctcgcggtcccgcctcaactgccgcctgtcgattagccgctcggagccccaattctatacggctcttcgatctgggatccgctagattcgtaaggcggcgtttcgttcgatctgttttggggcgtgattgccgtggaggatctgtttctaattgtacctgatataaatgcctgtttcaaaaaactaccctcctagatgggctagtcagctaatatgtattttgctgtatcagtaacttctggcacctattatgttgtgttttgtatgcacaccccacccagttaatagatatactcccttttttctttatttcttttttgctaatgagttttttcattacaatgatagacgaacaactggaccgataagaagagctaagggtggctggacaccagaagaggatgaaacactgcagaaggcagttgtagctttcaagggcagaaattggaaaaaaatagctgaattctttcaggacaggactgaggttcaatgtttgcatcgttggcagaaggttcttaatccggagcttatcaaaggcccttggactcaagaggaagatgaaaaaatcattgaccttgtgggcaagtatggaccaacaaaatggtctatcatcgcgaaatcattgcctggccgcataggcaagcaatgccgagagaggtgattatctgatcatttgcgaagttgtatgtattatacttatcaaaacatgtgcacaattgatatttcatatatttattgatggttgaagcttgtgctgatatttcatatatttattgatggttgaagcttgtgctcctgtgtgaaaaagtaagggaaaatagtttttgtggtcttcctctctttctgttaaaaccgctctccctttctcttttagctctctggaatgacttgatgtcagtactctccctttaactgtgacctttgatttataaacttatgccaggctgttccggtctcactttgtctaacctatggaccccattctaaactcaaaaaattgcaggtggcataatcatctgaatccagaaataaggaaagatgcttggactcctgaggaggaaagagcacttattgatgcccatcaagtgtttgggaataaatgggcagaaatagcaaaagctcttcccggaaggaccgataattctataaagaatcactggaacagttctttgcgaaagaagctagaagcctatagtagtgttctttcagctccgaagctgtttgttcatgatgatttcaaggataaaatgaagcccgtggctactgatagccatcttgatctgaaccaaatgccaagcgttggttcaaaagatgtccctggaagagcttattgtactattttgagcccaccttcacaggcatacaatttggactcatcaggcttgttttctttttctataccaactacgcagcctttaacttcatatgcaatgtcgtcactagttgatggttctgctgttacattggcggcacaaggtctgcaaagtgattctgtccgtgacaagggcctagaaatcgactctgtacatgagaagggtgttgaggttggctcaacgcctgatcctgctggggttgaattagaatctgcaccagccaaaagaggtgcagaattatcttcaaagattgagttgcattctatccttggtcctctttgttatcaaattccaaacatggaagatgtggtcccaatcagtaccccgctccgttctgaacataatagtgcacagaaaacatcacaacattgcatgtcacccaatggttatacttctccctctgcaacgattggaaacgtatcaagtcagctaactgttgattcaattttgaggattgctgctgacacctttccatgtactccttcaatactaaggaaaagaaaacgtgataaagcaacacctgcttcgggtaatgagttaaagacaggtggagtaaccaatgatagcttttacactcctaatcgaacgaatgggaaggatactacttctccaaggtcgtttaaaactgctgcatcttttttgtcgctgggttctgttaatgggttattgacttctgcaaggagctttgattcttcaccaccctatcagaagaaaaggtcaaaaagaatggccatcatcaaatcagttgagaaacagctagatttttcagcagatggactggatacttctggttctgagattatgaactctccttgccataattcccaaggaattgatctcaatcttatgaagccatacaggacttagaatcccgtcctaactaaccagcctcatgcaaatgtcctggtt

SEQ ID NO: 74826 - DNA, 2148 bp, Zea Mays
tttttttcctattccttctcctcggctcttctccctgaccttcaacgggcgaggttttttgaaagcatcctctctctcgtctcctcttcaacccccgacacccaactgaagccgtaaccgaagccgtagagagggggagccaaagcttactctttagaccttcctacttcataggatttcgggactatcctccctcgattcgtgtcatctacctcgcggtcccgcctcaactgccgcctgtcgattagccgctcggagccccaattctatacggctcttcgatctgggatccgctagattcgtaaggcggcgtttcgttcgatctgttttggggcgtgattgccgtggaggatctgtttctaattgtacctgatataaatgcctgtttcaaaaaactaccctcctagatgggctagtcagctaatatgtattttgctgtatcagtaacttctggcacctattatgttgtgttttgtatgcacaccccacccagttaatagatatactcccttttttctttatttcttttttgctaatgagttttttcattacaatgatagacgaacaactggaccgataagaagagctaagggtggctggacaccagaagaggatgaaacactgcagaaggcagttgtagctttcaagggcagaaattggaaaaaaatagctgaattctttcaggacaggactgaggttcaatgtttgcatcgttggcagaaggttcttaatccggagcttatcaaaggcccttggactcaagaggaagatgaaaaaatcattgaccttgtgggcaagtatggaccaacaaaatggtctatcatcgcgaaatcattgcctggccgcataggcaagcaatgccgagagaggtggcataatcatctgaatccagaaataaggaaagatgcttggactcctgaggaggaaagagcacttattgatgcccatcaagtgtttgggaataaatgggcagaaatagcaaaagctcttcccggaaggaccgataattctataaagaatcactggaacagttctttgcgaaagaagctagaagcctatagtagtgttctttcagctccgaagctgtttgttcatgatgatttcaaggataaaatgaagcccgtggctactgatagccatcttgatctgaaccaaatgccaagcgttggttcaaaagatgtccctggaagagcttattgtactattttgagcccaccttcacaggcatacaatttggactcatcaggcttgttttctttttctataccaactacgcagcctttaacttcatatgcaatgtcgtcactagttgatggttctgctgttacattggcggcacaaggtctgcaaagtgattctgtccgtgacaagggcctagaaatcgactctgtacatgagaagggtgttgaggttggctcaacgcctgatcctgctggggttgaattagaatctgcaccagccaaaagaggtgcagaattatcttcaaagattgagttgcattctatccttggtcctctttgttatcaaattccaaacatggaagatgtggtcccaatcagtaccccgctccgttctgaacataatagtgcacagaaaacatcacaacattgcatgtcacccaatggttatacttctccctctgcaacgattggaaacgtatcaagtcagctaactgttgattcaattttgaggattgctgctgacacctttccatgtactccttcaatactaaggaaaagaaaacgtgataaagcaacacctgcttcgggtaatgagttaaagacaggtggagtaaccaatgatagcttttacactcctaatcgaacgaatgggaaggatactacttctccaaggtcgtttaaaactgctgcatcttttttgtcgctgggttctgttaatgggttattgacttctgcaaggagctttgattcttcaccaccctatcagaagaaaaggtcaaaaagaatggccatcatcaaatcagttgagaaacagctagatttttcagcagatggactggatacttctggttctgagattatgaactctccttgccataattcccaaggaattgatctcaatcttatgaagccatacaggacttagaatcccgtcctaactaaccagcctcatgcaaatgtcctggtt

SEQ ID NO: 74827 - DNA, 2209 bp, Zea Mays
tttttttcctattccttctcctcggctcttctccctgaccttcaacgggcgaggttttttgaaagcatcctctctctcgtctcctcttcaacccccgacacccaactgaagccgtaaccgaagccgtagagagggggagccaaagcttactctttagaccttcctacttcataggatttcgggactatcctccctcgattcgtgtcatctacctcgcggtcccgcctcaactgccgcctgtcgattagccgctcggagccccaattctatacggctcttcgatctgggatccgctagattcgtaaggcggcgtttcgttcgatctgttttggggcgtgattgccgtggaggatctgtttctaattgtacctgatataaatgcctgtttcaaaaaactaccctcctagatgggctagtcagctaatatgtattttgctgtatcagtaacttctggcacctattatgttgtgttttgtatgcacaccccacccagttaatagatatactcccttttttctttatttcttttttgctaatgagttttttcattacaatgatagacgaacaactggaccgataagaagagctaagggtggctggacaccagaagaggatgaaacactgcagaaggcagttgtagctttcaagggcagaaattggaaaaaaatagctgaattctttcaggacaggactgaggttcaatgtttgcatcgttggcagaaggttcttaatccggagcttatcaaaggcccttggactcaagaggaagatgaaaaaatcattgaccttgtgggcaagtatggaccaacaaaatggtctatcatcgcgaaatcattgcctggccgcataggcaagcaatgccgagagaggtggcataatcatctgaatccagaaataaggaaagatgcttggactcctgaggaggaaagagcacttattgatgcccatcaagtgtttgggaataaatgggcagaaatagcaaaagctcttcccggaaggaccgataattctataaagaatcactggaacagttctttgcgaaagaagctagaagcctatagtagtgttctttcagctccgaagctgtttgttcatgatgatttcaaggataaaatgaagcccgtggctactgatagccatcttgatctgaaccaaatgccaagcgttggttcaaaagatgtccctggaagagcttattgtactattttgagcccaccttcacaggcatacaatttggactcatcaggcttgttttctttttctataccaactacgcagcctttaacttcatatgcaatgtcgtcactagttgatggttctgctgttacattggcggcacaaggtctgcaaagtgattctgtccgtgacaagggcctagaaatcgactctgtacatgagaagggtgttgaggttggctcaacgcctgatcctgctggggttgaattagaatctgcaccagccaaaagaggtgcagaattatcttcaaagattgagttgcattctatccttggtcctctttgttatcaaattccaaacatggaagatgtggtcccaatcagtaccccgctccgttctgaacataatagtgcacagaaaacatcacaacattgcatgtcacccaatggttatacttctccctctgcaacgattggaaacgtatcaagtcagctaactgttgattcaattttgaggattgctgctgacacctttccatgtactccttcaatactaaggaaaagaaaacgtgataaagcaacacctgcttcgggtaatgagttaaagacaggtggagtaaccaatgatagcttttacactcctaatcgaacgaatgggaaggatactacttctccaaggtcgtttaaaactgctgcatcttttttgtcgctgggttctgttaatgggttattgacttctgcaaggagctttgattcttcaccaccctatcagaagaaaaggtcaaaaagaatggccatcatcaaatcagttgagaaacagctagatttttcagcagatggactggatacttctggttctgagattatgaactctccttgccataattcccaaggtgcaaattctaacaggatgtagcaactgatttgattgcaatctaattccacaatgtgcaggaattgatctcaatcttatgaagccatacaggacttagaatcccgtcctaactaaccagcctcatgcaaatgtcctggtt

SEQ ID NO: 74828 - DNA, 1695 bp, Zea Mays
agaaaacctcaagcaacgaaaccgtaaacctccgaagaggaaaggtgagggcgagaaaagaccaaaatattcccctctcatcaggcaaccgcaacccccgtccctcttccgtccgtcgtcatctacctcactacctgctcctcactccccgctccactggcgagatggggagaggcttgggcgccgctcccgtctcgccgcgcctcgctagtctcggggcagctgcgctggcgctgctcgtggcggcggcgctgccttccccagcagctggggctgggctcaacgcgacggcggtgctctcggcgttccccaacttcgccgacttcgcgcggctgctggcatccactcccgtggccagcgagctggccgggaggtcgtccctgacgctcctggccgtgccgaacgccaacctgccgcagtcaccctcggctttcgtagccggcgccgacatcgccgacgtgctgaggtaccacgtcctgctggagtacctctccccgtccgacctcgcccgcctccctccctccgggaagctcgtgacgacgctgttccagaccacgggccgcgcgccctccgacttcggcgccgtcaacctcaccgtggggcccaactccaccgtcgtggtccgctcgccggcgccgtccccgggatcgagcgccacggtcctcggcgccgtgaccgcggtcccgtacaatctcagcgtgctcgcggtgggtggccttatcgtaccctccggattcgacctcgcggcctccgagagccgcccgccaccgccggtgaacatcacccgggttctcaccgacgcgcgtgggttctacgtggcggcctccatgctgcaggcttccggtgtagcgagcgagtttgaggccgacgagcgcggtgctggcatcaccgtcttcgtccccaccgacgacgcctttgccggcctccccgccaccgaccgcctccagtcactacccgctgagcgcaaggccgtcgtgctccgcttccatgtgctgcactcttactacccgctgggctccctcgagtccatcgtgaaccctgtccaacccactctcgccacagagcacaccgaggctggccacttcaccctaaacataacccgcgtcaatggctccattgccattgacacgggcatcgtgcaggcatccatcacccgcacagtgttcgaccagaatcctgtggcggtctttgccgtctccaaggttctactgcccaaggaaatgttcagccggggcgattctggcagcaccgccatggtaccaccttcggttgcgatggcgcccggcgacgccgggaccgagcagacaccacagacgaggctctcatccccgcctgatctccacggggaagatagcgagtcgtcagctgctttggcgacagcaaaggggacttcttggtggtgtgtaggactcatgtatctgcatctattactatctctggaactgtttgttgcatttgcttctatgtcctgcacactcatgggtcttatcagaaagggctgtcgtactatagcttgctcttgagaccaccattgtgatctaccgcgtgcactgcactcgtcaactattggtacagccaactgttctgctataactgatctccattagtgctggatatggaactggcatttaccactttgttttctagtatttacaacatctgaatctgatcatttccccatgccactgttacaag

SEQ ID NO: 74829 - DNA, 1602 bp, Zea Mays
gaaaacctcaagcaacgaaaccgtaaacctccgaagaggaaaggtgagggcgagaaaagaccaaaatattcccctctcatcaggcaaccgcaacccccgtccctcttccgtccgtcgtcatctacctcactacctgctcctcactccccgctccactggcgagatggggagaggcttgggcgccgctcccgtctcgccgcgcctcgctagtctcggggcagctgcgctggcgctgctcgtggcggcggcgctgccttccccagcagctggggctgggctcaacgcgacggcggtgctctcggcgttccccaacttcgccgacttcgcgcggctgctggcatccactcccgtggccagcgagctggccgggaggtcgtccctgacgctcctggccgtgccgaacgccaacctgccgcagtcaccctcggctttcgtagccggcgccgacatcgccgacgtgctgaggtaccacgtcctgctggagtacctctccccgtccgacctcgcccgcctccctccctccgggaagctcgtgacgacgctgttccagaccacgggccgcgcgccctccgacttcggcgccgtcaacctcaccgtggggcccaactccaccgtcgtggtccgctcgccggcgccgtccccgggatcgagcgccacggtcctcggcgccgtgaccgcggtcccgtacaatctcagcgtgctcgcggtgggtggccttatcgtaccctccggattcgacctcgcggcctccgagagccgcccgccaccgccggtgaacatcacccgggttctcaccgacgcgcgtgggttctacgtggcggcctccatgctgcaggcttccggtgtagcgagcgagtttgaggccgacgagcgcggtgctggcatcaccgtcttcgtccccaccgacgacgcctttgccggcctccccgccaccgaccgcctccagtcactacccgctgagcgcaaggccgtcgtgctccgcttccatgtgctgcactcttactacccgctgggctccctcgagtccatcgtgaaccctgtccaacccactctcgccacagagcacaccgaggctggccacttcaccctaaacataacccgcgtcaatggctccattgccattgacacgggcatcgtgcaggcatccatcacccgcacagtgttcgaccagaatcctgtggcggtctttgccgtctccaaggttctactgcccaaggaaatgttcagccggggcgattctggcagcaccgccatggtaccaccttcggttgcgatggcgcccggcgacgccgggaccgagcagacaccacagacgaggctctcatccccgcctgatctccacggggaagatagcgagtcgtcagctgctttggcgacagcaaaggggacttcttggtggtgtgtaggactcatgtatctgcatctattactatctctgatggctggcagcaatcagtaattcttctgttgatccgtgtgtagcgccataagtgatagtttgtgtagaagagtgggagccaacagcttttgtgcgtatggagtacaacagttcggtccttgtagttgccaactctggtcctggtcgcgtgtcctcaaccgttt

SEQ ID NO: 74830 - DNA, 1566 bp, Zea Mays
ctcaagcaacgaaaccgtaaacctccgaagaggaaaggtgagggcgagaaaagaccaaaatattcccctctcatcaggcaaccgcaacccccgtccctcttccgtccgtcgtcatctacctcactacctgctcctcactccccgctccactggcgagatggggagaggcttgggcgccgctcccgtctcgccgcgcctcgctagtctcggggcagctgcgctggcgctgctcgtggcggcggcgctgccttccccagcagctggggctgggctcaacgcgacggcggtgctctcggcgttccccaacttcgccgacttcgcgcggctgctggcatccactcccgtggccagcgagctggccgggaggtcgtccctgacgctcctggccgtgccgaacgccaacctgccgcagtcaccctcggctttcgtagccggcgccgacatcgccgacgtgctgaggtaccacgtcctgctggagtacctctccccgtccgacctcgcccgcctccctccctccgggaagctcgtgacgacgctgttccagaccacgggccgcgcgccctccgacttcggcgccgtcaacctcaccgtggggcccaactccaccgtcgtggtccgctcgccggcgccgtccccgggatcgagcgccacggtcctcggcgccgtgaccgcggtcccgtacaatctcagcgtgctcgcggcttccggtgtagcgagcgagtttgaggccgacgagcgcggtgctggcatcaccgtcttcgtccccaccgacgacgcctttgccggcctccccgccaccgaccgcctccagtcactacccgctgagcgcaaggccgtcgtgctccgcttccatgtgctgcactcttactacccgctgggctccctcgagtccatcgtgaaccctgtccaacccactctcgccacagagcacaccgaggctggccacttcaccctaaacataacccgcgtcaatggctccattgccattgacacgggcatcgtgcaggcatccatcacccgcacagtgttcgaccagaatcctgtggcggtctttgccgtctccaaggttctactgcccaaggaaatgttcagccggggcgattctggcagcaccgccatggtaccaccttcggttgcgatggcgcccggcgacgccgggaccgagcagacaccacagacgaggctctcatccccgcctgatctccacggggaagatagcgagtcgtcagctgctttggcgacagcaaaggggacttcttggtggtgtgtaggactcatgtatctgcatctattactatctctggtatgagattctggtcgtgcttgttgctttcttgcttccttgtgctcagtttttgtattacttactgtctagaacgtctacaccgggagggagggattggggagagaatttcgtagatttaaagtagcaaaaaaaattagttgcttcacctgattattctaatttctttccattttgtcatgtggcaaagggaaataatgtcatgtgtacaaatctatgcagtccttttgctctacaatgaatagtattttctgttttggcca

SEQ ID NO: 74831 - DNA, 1472 bp, Zea Mays
ccccagagccggcaggcaggcagacgcggagaggtatcgagccatggacatggagatcccacagcagcaagccgcccacggccaggacgagagcgggccggcggcgccgccgctgtccccggcctccgccgcggcggccgcgcggtggaacccgaccaaggagcaggtggccgtgctggaggggctgtacgagcacggcctgcgcagccccagcgcggagcagatacagcagatcgcggacaggctgcgggagcacgggcacgggcacggcgccatcgagggcaagagcgtcttctactggttccagaaccacagggcccgcctgcgccagcagaggcagaagcaggaaagcttcgcctacttcaccaggctcctccgccggcccccgccgctgcccgtgctctccatgccccccgcgccaccgtaccgtcacggccgtgtcccgtccccggccacgatcacgatgccggcgccgccgccgccgacgcccgctgcatgctacaacagcggcggatcgcgtgtgatgtacatgaatccattctacatgactgtgccacagctgccccctgcaaatgctgctgcctactactacccgcagcagcagcagcagcagcaggtgacagtcatgtaccagcagtacccaaggatggaggtcggccaggacaagacgacgacgcccccggccgccacgttccagcaggccgcagcagcaccgcgcggtgccgccagcaccaccccaccgcaggtgctgcactccccgtccccgcccgccattaataacggcgcccgcgggccagcggatcagcgcgtcggccgccccagccgcgaccgcgacctcgagacgctgcagctgttcccgctccaacccaccttcgctcagctgcggcgcgacaaggggaacgccgccgctggcagcagcgcctcctccctgacgtcgaccgcagtggcggcgtccgcttccgtcgtctccgaggacgccgagaacctggagagcgccgagtccaacggcggcgaggcgcccgcgctgccgttctatgacttcttcggcctccagtccgccgcaggccgctgatgagatcaggcggagcgagctagctcgagtggagtgatgatgcgagccgagaaccagacgctcgtgcggtctccagtcgatggacccgagacggcgagacccgttggccgttgccttccgttgggctatgctatgggtgtgcttcatctatcaactcgatccaagcctatgccgattgccgaacaagactgcatgcgtttctgtggcaacaatgtagtggttgaccgtttctttgcatgttcagttctaccgatgcttgctagtagtgatcgccagagtaaggttgctgtgactgtgaacattccttccatagttctatttgcctgttgaagaaaccaaacgtactgtgcaactaactgcatgctccgatcgaccccgtaaatatttgtggtgggctaac

SEQ ID NO: 74832 - DNA, 1444 bp, Zea Mays
ctaaaattgtgatcggatatttcggattcgaacaattgggagtttaaataattcggtttcaaggttttggtattggttattttgcccagataggctatccagtcggtagcagtcagcagagcagagaacgcaggcagaggcagagcggcagcccgcagagcaggcaccataccagtcaaccaccgcttcgttctcctcccacaccgctcgccttcgccttcccatcttctatcatccccgagctccagttctccacacctcacgtctataaataataaataaggcgcccgcggtgcccatcaattcgtgtcaccgcgtcccgagagcgcaaatcattccgcgcgacgcaaaaaccctagcccagccaccgacccctctcatggcaaccaccaccacccaggcgagcctcctcctccagaagcagctaagagatctcgcgaagcacccggtggatgggttctctgctgggctggtcgacgacagcaatgtcttcgagtggcaggtcaccatcatcggaccgcctgacaccctatatgatggagggtacttcaatgcaataatgagcttcccacaaaattacccaaacagcccgccatcagtcagatttacctctgaaatgtggcatccaaatgtctatcctgatgggcgggtttgtatctctattcttcatccacctggtgaagatccaaacggttatgagctcgcaagtgagcgatggacacctgtgcacacagtagaaagcatagttctgagcattatatcaatgctctctagtccaaatgatgagtctccagcaaacattgaggcagctcctcctaggctcccagccgccgcacgccagctcttgcgacgtcgcgagagcgagctcgcgtgacgcgccacgacgccagcagctgcccgctggccgccgagccctgcctccacctcgccgtcgtccatctccggggctctccctccacctcaccgagtcgtcgtccttcacagcagaaggaatggagggaacagagggaggatttcaagaaaaaggttaggcgcatcgtgcggaaatcacaggaaatgttctgaaggaaatgggagtcctggcgaagttaaccatgccatctcaggctgcaggattttgctgccaacctcaaagtgctcatctgacaccagcgtcttgtgtattttccatttatcgtctgttcattggtgacaattgcctccagaaatgcattgggacgtggtcggcttgaaggttctgtttgtgtcgtgtggcttgcgctctactaatgtttggcaaacctgaagtggtaccggttatcgtaaatttggtggtgaacctggcataagcaggcaccattcatgtcatctagccgttttgaaaacatatcaggccttgttcgtttcttatcaaaatcaattggttggaggaaattaaggctttatttagatactctcatattca

SEQ ID NO: 74833 - DNA, 1090 bp, Zea Mays
agcagtcagcagagcagagaacgcaggcagaggcagagcggcagcccgcagagcaggcaccataccagtcaaccaccgcttcgttctcctcccacaccgctcgccttcgccttcccatcttctatcatccccgagctccagttctccacacctcacgtctataaataataaataaggcgcccgcggtgcccatcaattcgtgtcaccgcgtcccgagagcgcaaatcattccgcgcgacgcaaaaaccctagcccagccaccgacccctctcatggcaaccaccaccacccaggcgagcctcctcctccagaagcagctaagagatctcgcgaagcacccggtggatgggttctctgctgggctggtcgacgacagcaatgtcttcgagtggcaggtcaccatcatcggaccgcctgacaccctatatgatggagggtacttcaatgcaataatgagcttcccacaaaattacccaaacagcccgccatcagtcagatttacctctgaaatgtggcatccaaatgtctatcctgatgggcgggtttgtatctctattcttcatccacctggtgaagatccaaacggttatgagctcgcaagtgagcgatggacacctgtgcacacagtagaaagcatagttctgagcattatatcaatgctctctagtccaaatgatgagtctccagcaaacattgaggcagctaaggaatggagggaacagagggaggatttcaagaaaaaggttaggcgcatcgtgcggaaatcacaggaaatgttctgaaggaaatgggagtcctggcgaagttaaccatgccatctcaggctgcaggattttgctgccaacctcaaaaaatgcattgggacgtggtcggcttgaaggttctgtttgtgtcgtgtggcttgcgctctactaatgtttggcaaacctgaagtggtaccggttatcgtaaatttggtggtgaacctggcataagcaggcaccattcatgtcatctagccgttttgaaaacatatcaggccttgttcgtttcttatcaaaatcaattggttggaggaaattaaggctttatttagatactctcatattca

SEQ ID NO: 74834 - DNA, 496 bp, Zea Mays
ccttctattgttaaaatcaggaacaagtgccagccctgaaaggaatggagggaacagagggaggatttcaagaaaaaggttaggcgcatcgtgcggaaatcacaggaaatgttctgaaggaaatgggagtcctggcgaagttaaccatgccatctcaggctgcaggattttgctgccaacctcaaagtgctcatctgacaccagcgtcttgtgtattttccatttatcgtctgttcattggtgacaattgcctccagaaatgcattgggacgtggtcggcttgaaggttctgtttgtgtcgtgtggcttgcgctctactaatgtttggcaaacctgaagtggtaccggttatcgtaaatttggtggtgaacctggcataagcaggcaccattcatgtcatctagccgttttgaaaacatatcaggccttgttcgtttcttatcaaaatcaattggttggaggaaattaaggctttatttagatactctcatattca

SEQ ID NO: 74835 - DNA, 936 bp, Zea Mays
atcgggtttcgggttacgggtttttgcccagcctactggcgccatgccatcccgttcgcatttcggctcccgcatccttccgcaaggaaaccaacccaggtccgcggcatcacgcgtccccacgccgaatcgcctccgcgcgctgaaatcccagccgtcccgcgcttccaacgcttcagataccgacatctcagcgatccgcgccgccacccgttccaccaatcacgtcacgcctcgcctttctataaaatcccaccgcatccccattcatagcacatagtcgaaagctacgagcactcgccgccactcaccagcaaattcccaagccgccccttcccccatctctttcgcgccccatttgatcgattcctgatggcgcccaaggccgagaagaagcccgcggagaagaagccggcggaggagaaggccgagaagaagccaagggcggagaagcgcgtgccgagcaaggagggcggcgagaagaagggaaagaagaaggcgaagaagagcgtcgagacgtacaagatctacatcttcaaggtgctcaagcaggtgcacccggacattggcatctcgtccaaggccatgtccatcatgaactccttcatcaacgacatcttcgagaagctcgccgccgaggcagccaagctcgcccgctacaacaagaagcccaccatcacctcccgggagatccagacctcggtgcgcctcgtcctccccggcgagctcgccaagcacgccgtctccgaagggaccaaggcggttaccaagtttacatcctcttagggtgccgccgccgccgcacgttgctaaattttctcatatttaggactgtgctaggttgttcgtgcaacaatgtagaatttgttataattgctgaatgaatcagttacccctgttgaagttttctaatatattaatcttgctagtaaaaca

SEQ ID NO: 74836 - DNA, 3050 bp, Zea Mays
ctttttttttttcctccagttgcctttcacaggctccatccacagtttcacatttcggttagtgtacaccaagccacacacagtgacacgtcgctacggttgcagtgcagctggtgcgtcctagcacgatttcaatgcctgcattgcagtgtgcgctgcctgcgcctcttttgcaccttcctttccttgtgtcgcactcgcgccatttaaacgctactacgagctcactagctggtagtactccagaaacgacacctcgccaactagtccagtccagtgccaaagagcgcggcagccgttttggcaagcatggcggtggtggtggcgggcagcagggcgagagcggagcaggcgaggcggcagtggcgggagcaggagcccagaagccccgagatggccgcgccaccgccaaggtcgaccatgccgcggccggcgagggcggcggcggtcgtctactacctggccaggaacgggcacctcgagcacccgcacttcatggaggtcgcgctttcctgccccgacggcctccacctccgagatgtgatggatcggctcgacgcgctgagaggcaaagggatggcgcgcatgtactcgtgggcgtccaagaggagctaccggaacggcttcgtgtggcacgacctggcggaggacgattacatccacccggtggtcgcccgggagtacgtgctcaagggcaccgagcgcctgcacccggcgctgctcgacgcggcggccgcgtcctcctcgtcctccgccggctcgcaggagacgcccaccacgtcgtcctccgccaggtgggaggcgcaccggatgacgatgaagggcgcgtgcggcggggctgaccttggcgagtacgtggcggcgtacatgggcgaggagcgcggcgcggacgccgcgacgcagaccgaggacgacggccgcggccgccagaggcgcgtccagtcccccgccgcgcaggaggagctgagcagggcggagacgtcgccgccgacggcgtcgacgagccccgaggcgctggccaaggcggacgggcgcgccgtgctggagggcgccgtcagcggaagcggccgggccagggcgtcctccgtgctgatgcagctcatctcgtgcgggtccgtatccgtgcgggacgcgcgcgcctccccggtgatgccgcgcgcgcaccaccaccaccgcccaccccggccgccggccgtggaggcaccgtcgtaccgccgcgccaagctcgtggtggaggacaaggagtacttcagcgggagcatcgtggagaccgcgacgaagcgctcgccggccgacggtgtgacgtcccgggacgacctggccgttctccggcggtcggcgtcgtacaacgcggaaagcagcaggatgataaagctggagctggcgaaggaggccggggacatgcacggccgctgcatcccgcggaaggcccaagcgcaaggacgacgacggatacctggtcatctcctgcagcgcgcaggggaataacaagggatgacgcggggccgtcttggttcgttggtagctagcgcatggccatcatcatgcggcgcggcgacgagcttaggctagctagctggtcccccggcggccggcgagaacggcgacctggcgagcgtgcatgtgtgcctttctttcttgcgtcgggaacagtaagtagatgagtgtccaccactgctactccagtttggtgtcgtctgctttctttagatgctctgatagcgattggtgaaatgcctgtgattttacgtgtgagctagcaccttcatgtcgatacgtgttactgcgtgtctgcctcgtgctcgttcgtggtctgagctgtttagtgcctactgcctagtcatcatctcattctctctttttgtgctactgggtttcaaaaggctattcttcacgtgttcacggactgtaccgtacaggcgtgcgtgatgagcccgcccaggccgtgctgctgcgtgaatccgtgaccgtgatggatgtagtgcaatctgcaatggtagcacggcgccgacgcgttatgctatcattacttacctcccgtcctcagattcctcccagcagtccccagttctttgatacgtagaatctggatgctcgattgcgtcagttcattcccctctgatctgaggtgaggttcttgatcgagtgtaaaaataaaataaaaaatgaagcctgaccagacagttcggtccctactattactgcttcaccttacaatttgtctgcctccaaaccagcacggtccccaacgatgggatcagctccctcctcctgaacctgaagcctgatccaatttctctcacaccagtctctttccagactgatgttagcgactactgtacagtgtttttttttagcttgcaaaggtggcaatctcggggaagatgtggcaaattgagtgacgagttgagaccgtcaccaacgcctgagcctcgaggaagcacggcgtggcggcatgctgtgccattcaaacaaagagcttatggttccatgttccagcttgcaacaagttcctacggcaaaactcagggttagctaatgccagtagcagtagttgggccggaacagattccctgaaacctgcaacggcccacttttcaggtggtttgggcatttgggctctcttcaagtctggacgaactatcacatcacatcagttgaggaactagtacaactaccttctcaactctggctcagtggtcagtggcggagagtcggagacagtggggcaagacccatacctacaatttctatagactttttttttttgcaatcgatctgcaccctttttttgtctaaacaaatttcattcgcatggattgttgcacagagggaccatttcccttaattttttgtacgccatctcaaattttaatacgaggataacgccgatcaattgctcgctatacaattcacgtaagttttccgtggtgaatggcagctacttctgtaatatatctacctaacatatgaatccggcttgtgaagctttaaaagcttacgacatatgaatccggcaggcggcagctacttcatatgttttggttccc

SEQ ID NO: 74837 - DNA, 3062 bp, Zea Mays
ctttttttttttcctccagttgcctttcacaggctccatccacagtttcacatttcggttagtgtacaccaagccacacacagtgacacgtcgctacggttgcagtgcagctggtgcgtcctagcacgatttcaatgcctgcattgcagtgtgcgctgcctgcgcctcttttgcaccttcctttccttgtgtcgcactcgcgccatttaaacgctactacgagctcactagctggtagtactccagaaacgacacctcgccaactagtccagtccagtgccaaagagcgcggcagccgttttggcaagcatggcggtggtggtggcgggcagcagggcgagagcggagcaggcgaggcggcagtggcgggagcaggagcccagaagccccgagatggccgcgccaccgccaaggtcgaccatgccgcggccggcgagggcggcggcggtcgtctactacctggccaggaacgggcacctcgagcacccgcacttcatggaggtcgcgctttcctgccccgacggcctccacctccgagatgtgatggatcggctcgacgcgctgagaggcaaagggatggcgcgcatgtactcgtgggcgtccaagaggagctaccggaacggcttcgtgtggcacgacctggcggaggacgattacatccacccggtggtcgcccgggagtacgtgctcaagggcaccgagcgcctgcacccggcgctgctcgacgcggcggccgcgtcctcctcgtcctccgccggctcgcaggagacgcccaccacgtcgtcctccgccaggtgggaggcgcaccggatgacgatgaagggcgcgtgcggcggggctgaccttggcgagtacgtggcggcgtacatgggcgaggagcgcggcgcggacgccgcgacgcagaccgaggacgacggccgcggccgccagaggcgcgtccagtcccccgccgcgcaggaggagctgagcagggcggagacgtcgccgccgacggcgtcgacgagccccgaggcgctggccaaggcggacgggcgcgccgtgctggagggcgccgtcagcggaagcggccgggccagggcgtcctccgtgctgatgcagctcatctcgtgcgggtccgtatccgtgcgggacgcgcgcgcctccccggtgatgccgcgcgcgcaccaccaccaccgcccaccccggccgccggccgtggaggcaccgtcgtaccgccgcgccaagctcgtggtggaggacaaggagtacttcagcgggagcatcgtggagaccgcgacgaagcgctcgccggccgacggtgtgacgtcccgggacgacctggccgttctccggcggtcggcgtcgtacaacgcggaaagacgacatggcagcagcaggatgataaagctggagctggcgaaggaggccggggacatgcacggccgctgcatcccgcggaaggcccaagcgcaaggacgacgacggatacctggtcatctcctgcagcgcgcaggggaataacaagggatgacgcggggccgtcttggttcgttggtagctagcgcatggccatcatcatgcggcgcggcgacgagcttaggctagctagctggtcccccggcggccggcgagaacggcgacctggcgagcgtgcatgtgtgcctttctttcttgcgtcgggaacagtaagtagatgagtgtccaccactgctactccagtttggtgtcgtctgctttctttagatgctctgatagcgattggtgaaatgcctgtgattttacgtgtgagctagcaccttcatgtcgatacgtgttactgcgtgtctgcctcgtgctcgttcgtggtctgagctgtttagtgcctactgcctagtcatcatctcattctctctttttgtgctactgggtttcaaaaggctattcttcacgtgttcacggactgtaccgtacaggcgtgcgtgatgagcccgcccaggccgtgctgctgcgtgaatccgtgaccgtgatggatgtagtgcaatctgcaatggtagcacggcgccgacgcgttatgctatcattacttacctcccgtcctcagattcctcccagcagtccccagttctttgatacgtagaatctggatgctcgattgcgtcagttcattcccctctgatctgaggtgaggttcttgatcgagtgtaaaaataaaataaaaaatgaagcctgaccagacagttcggtccctactattactgcttcaccttacaatttgtctgcctccaaaccagcacggtccccaacgatgggatcagctccctcctcctgaacctgaagcctgatccaatttctctcacaccagtctctttccagactgatgttagcgactactgtacagtgtttttttttagcttgcaaaggtggcaatctcggggaagatgtggcaaattgagtgacgagttgagaccgtcaccaacgcctgagcctcgaggaagcacggcgtggcggcatgctgtgccattcaaacaaagagcttatggttccatgttccagcttgcaacaagttcctacggcaaaactcagggttagctaatgccagtagcagtagttgggccggaacagattccctgaaacctgcaacggcccacttttcaggtggtttgggcatttgggctctcttcaagtctggacgaactatcacatcacatcagttgaggaactagtacaactaccttctcaactctggctcagtggtcagtggcggagagtcggagacagtggggcaagacccatacctacaatttctatagactttttttttttgcaatcgatctgcaccctttttttgtctaaacaaatttcattcgcatggattgttgcacagagggaccatttcccttaattttttgtacgccatctcaaattttaatacgaggataacgccgatcaattgctcgctatacaattcacgtaagttttccgtggtgaatggcagctacttctgtaatatatctacctaacatatgaatccggcttgtgaagctttaaaagcttacgacatatgaatccggcaggcggcagctacttcatatgttttggttccc

SEQ ID NO: 74838 - DNA, 3157 bp, Zea Mays
ctttttttttttcctccagttgcctttcacaggctccatccacagtttcacatttcggttagtgtacaccaagccacacacagtgacacgtcgctacggttgcagtgcagctggtgcgtcctagcacgatttcaatgcctgcattgcagtgtgcgctgcctgcgcctcttttgcaccttcctttccttgtgtcgcactcgcgccatttaaacgctactacgagctcactagctggtagtactccagaaacgacacctcgccaactagtccagtccagtgccaaagagcgcggcagccgttttggcaagcatggcggtggtggtggcgggcagcagggcgagagcggagcaggcgaggcggcagtggcgggagcaggagcccagaagccccgagatggccgcgccaccgccaaggtcgaccatgccgcggccggcgagggcggcggcggtcgtctactacctggccaggaacgggcacctcgagcacccgcacttcatggaggtcgcgctttcctgccccgacggcctccacctccgagatgtgatggatcggctcgacgcgctgagaggcaaagggatggcgcgcatgtactcgtgggcgtccaagaggagctaccggaacggcttcgtgtggcacgacctggcggaggacgattacatccacccggtggtcgcccgggagtacgtgctcaagggcaccgagcgcctgcacccggcgctgctcgacgcggcggccgcgtcctcctcgtcctccgccggctcgcaggagacgcccaccacgtcgtcctccgccaggtgggaggcgcaccggatgacgatgaagggcgcgtgcggcggggctgaccttggcgagtacgtggcggcgtacatgggcgaggagcgcggcgcggacgccgcgacgcagaccgaggacgacggccgcggccgccagaggcgcgtccagtcccccgccgcgcaggaggagctgagcagggcggagacgtcgccgccgacggcgtcgacgagccccgaggcgctggccaaggcggacgggcgcgccgtgctggagggcgccgtcagcggaagcggccgggccagggcgtcctccgtgctgatgcagctcatctcgtgcgggtccgtatccgtgcgggacgcgcgcgcctccccggtgatgccgcgcgcgcaccaccaccaccgcccaccccggccgccggccgtggaggcaccgtcgtaccgccgcgccaagctcgtggtggaggacaaggagtacttcagcgggagcatcgtggagaccgcgacgaagcgctcgccggccgacggtgtgacgtcccgggacgacctggccgttctccggcggtcggcgtcgtacaacgcggaaaggctttgtcagcagcaggacctttgctttgaagcagtggtccagacgccgcctgcgctagctgcgcctaatctgatccgtgctgaatgctgagcagacgacatggcagcagcaggatgataaagctggagctggcgaaggaggccggggacatgcacggccgctgcatcccgcggaaggcccaagcgcaaggacgacgacggatacctggtcatctcctgcagcgcgcaggggaataacaagggatgacgcggggccgtcttggttcgttggtagctagcgcatggccatcatcatgcggcgcggcgacgagcttaggctagctagctggtcccccggcggccggcgagaacggcgacctggcgagcgtgcatgtgtgcctttctttcttgcgtcgggaacagtaagtagatgagtgtccaccactgctactccagtttggtgtcgtctgctttctttagatgctctgatagcgattggtgaaatgcctgtgattttacgtgtgagctagcaccttcatgtcgatacgtgttactgcgtgtctgcctcgtgctcgttcgtggtctgagctgtttagtgcctactgcctagtcatcatctcattctctctttttgtgctactgggtttcaaaaggctattcttcacgtgttcacggactgtaccgtacaggcgtgcgtgatgagcccgcccaggccgtgctgctgcgtgaatccgtgaccgtgatggatgtagtgcaatctgcaatggtagcacggcgccgacgcgttatgctatcattacttacctcccgtcctcagattcctcccagcagtccccagttctttgatacgtagaatctggatgctcgattgcgtcagttcattcccctctgatctgaggtgaggttcttgatcgagtgtaaaaataaaataaaaaatgaagcctgaccagacagttcggtccctactattactgcttcaccttacaatttgtctgcctccaaaccagcacggtccccaacgatgggatcagctccctcctcctgaacctgaagcctgatccaatttctctcacaccagtctctttccagactgatgttagcgactactgtacagtgtttttttttagcttgcaaaggtggcaatctcggggaagatgtggcaaattgagtgacgagttgagaccgtcaccaacgcctgagcctcgaggaagcacggcgtggcggcatgctgtgccattcaaacaaagagcttatggttccatgttccagcttgcaacaagttcctacggcaaaactcagggttagctaatgccagtagcagtagttgggccggaacagattccctgaaacctgcaacggcccacttttcaggtggtttgggcatttgggctctcttcaagtctggacgaactatcacatcacatcagttgaggaactagtacaactaccttctcaactctggctcagtggtcagtggcggagagtcggagacagtggggcaagacccatacctacaatttctatagactttttttttttgcaatcgatctgcaccctttttttgtctaaacaaatttcattcgcatggattgttgcacagagggaccatttcccttaattttttgtacgccatctcaaattttaatacgaggataacgccgatcaattgctcgctatacaattcacgtaagttttccgtggtgaatggcagctacttctgtaatatatctacctaacatatgaatccggcttgtgaagctttaaaagcttacgacatatgaatccggcaggcggcagctacttcatatgttttggttccc

SEQ ID NO: 74839 - DNA, 4361 bp, Zea Mays
ctttttttttttcctccagttgcctttcacaggctccatccacagtttcacatttcggttagtgtacaccaagccacacacagtgacacgtcgctacggttgcagtgcagctggtgcgtcctagcacgatttcaatgcctgcattgcagtgtgcgctgcctgcgcctcttttgcaccttcctttccttgtgtcgcactcgcgccatttaaacgctactacgagctcactagctggtagtactccagaaacgacacctcgccaactagtccagtccagtgccaaagagcgcggcagccgttttggcaagcatggcggtggtggtggcgggcagcagggcgagagcggagcaggcgaggcggcagtggcgggagcaggagcccagaagccccgagatggccgcgccaccgccaaggtcgaccatgccgcggccggcgagggcggcggcggtcgtctactacctggccaggaacgggcacctcgagcacccgcacttcatggaggtcgcgctttcctgccccgacggcctccacctccgagatgtgatggatcggctcgacgcgctgagaggcaaagggatggcgcgcatgtactcgtgggcgtccaagaggagctaccggaacggcttcgtgtggcacgacctggcggaggacgattacatccacccggtggtcgcccgggagtacgtgctcaagggcaccgagcgcctgcacccggcgctgctcgacgcggcggccgcgtcctcctcgtcctccgccggctcgcaggagacgcccaccacgtcgtcctccgccaggtgggaggcgcaccggatgacgatgaagggcgcgtgcggcggggctgaccttggcgagtacgtggcggcgtacatgggcgaggagcgcggcgcggacgccgcgacgcagaccgaggacgacggccgcggccgccagaggcgcgtccagtcccccgccgcgcaggaggagctgagcagggcggagacgtcgccgccgacggcgtcgacgagccccgaggcgctggccaaggcggacgggcgcgccgtgctggagggcgccgtcagcggaagcggccgggccagggcgtcctccgtgctgatgcagctcatctcgtgcgggtccgtatccgtgcgggacgcgcgcgcctccccggtgatgccgcgcgcgcaccaccaccaccgcccaccccggccgccggccgtggaggcaccgtcgtaccgccgcgccaagctcgtggtggaggacaaggagtacttcagcgggagcatcgtggagaccgcgacgaagcgctcgccggccgacggtgtgacgtcccgggacgacctggccgttctccggcggtcggcgtcgtacaacgcggaaaggtaaaggaacaaaacaacccgtccctctcgcaatcattgacgcgagcggcaggcgccggaaactgacccgtcgcttacgcgggacgccctctgtcgctcgctctcgctcctagtatgccagcaggaaggatgagctgctgccactgttacattgagccaggctgtcctagtcgggagttaaaggctctggctcgcccgtggccgcagctgaacccaccacgccattgccgtacgcgcaagatacgccatacgctacgccctccatctccataaatagaagtaggtctcgcggagctgtcgcgcaccagacgtcactgattagagatgtcaatggggacccgatacccgccaacccgtggggaatttccctattaggatacgagtatgggacaaaaattgtacccatgggtatggatatgggacaaaatctacacccattggataaacgggtatgggtttgggaagcaataatccgaacccgattactcatgggtatttcatacgtgtacacctgttgtgtttgtatgaatgagttgaggccgagccgaccatcaagcctagcacggcagcgcaccaggcccaggtcctagcccaataaggcaacatggcaagtcatggttcatggatgagtgtttgctgatgtggtgatgtctgaaatctagattatttgtgctacctgttagtacctagttatctcttaattggggatggggacccattggggacccgaaacccgaatgaggatgggtatcggatgagttttgcacctatgatgggtatggggatgggtatggggatggatcaaacatgatggggatgggtatgggatgctataacccggtggggaattccccattgacatctctatcactgatcgcggccgccggccggggaggggacgggttagataatttcgtcagtttaggaacggccggggcttcaattcttggccgggacccgttccgtgcgagctgggcaggctggggagcgccaaatccccgagccgatttttggcgcgcctacactctttttttttccagaaagactactactccctccgtttcttaatatatgttgtccgttagtacaaatttgaactattgggcgacaaataaagtgaaaccgagggagtacgtactcataaactggtcagttgtttgaaaagagtaacctgatgattgacgtgagcctgtaataacagcaggctttgtcagcagcaggacctttgctttgaagcagtggtccagacgccgcctgcgctagctgcgcctaatctgatccgtgctgaatgctgagcagacgacatggcagcagcaggatgataaagctggagctggcgaaggaggccggggacatgcacggccgctgcatcccgcggaaggcccaagcgcaaggacgacgacggatacctggtcatctcctgcagcgcgcaggggaataacaagggatgacgcggggccgtcttggttcgttggtagctagcgcatggccatcatcatgcggcgcggcgacgagcttaggctagctagctggtcccccggcggccggcgagaacggcgacctggcgagcgtgcatgtgtgcctttctttcttgcgtcgggaacagtaagtagatgagtgtccaccactgctactccagtttggtgtcgtctgctttctttagatgctctgatagcgattggtgaaatgcctgtgattttacgtgtgagctagcaccttcatgtcgatacgtgttactgcgtgtctgcctcgtgctcgttcgtggtctgagctgtttagtgcctactgcctagtcatcatctcattctctctttttgtgctactgggtttcaaaaggctattcttcacgtgttcacggactgtaccgtacaggcgtgcgtgatgagcccgcccaggccgtgctgctgcgtgaatccgtgaccgtgatggatgtagtgcaatctgcaatggtagcacggcgccgacgcgttatgctatcattacttacctcccgtcctcagattcctcccagcagtccccagttctttgatacgtagaatctggatgctcgattgcgtcagttcattcccctctgatctgaggtgaggttcttgatcgagtgtaaaaataaaataaaaaatgaagcctgaccagacagttcggtccctactattactgcttcaccttacaatttgtctgcctccaaaccagcacggtccccaacgatgggatcagctccctcctcctgaacctgaagcctgatccaatttctctcacaccagtctctttccagactgatgttagcgactactgtacagtgtttttttttagcttgcaaaggtggcaatctcggggaagatgtggcaaattgagtgacgagttgagaccgtcaccaacgcctgagcctcgaggaagcacggcgtggcggcatgctgtgccattcaaacaaagagcttatggttccatgttccagcttgcaacaagttcctacggcaaaactcagggttagctaatgccagtagcagtagttgggccggaacagattccctgaaacctgcaacggcccacttttcaggtggtttgggcatttgggctctcttcaagtctggacgaactatcacatcacatcagttgaggaactagtacaactaccttctcaactctggctcagtggtcagtggcggagagtcggagacagtggggcaagacccatacctacaatttctatagactttttttttttgcaatcgatctgcaccctttttttgtctaaacaaatttcattcgcatggattgttgcacagagggaccatttcccttaattttttgtacgccatctcaaattttaatacgaggataacgccgatcaattgctcgctatacaattcacgtaagttttccgtggtgaatggcagctacttctgtaatatatctacctaacatatgaatccggcttgtgaagctttaaaagcttacgacatatgaatccggcaggcggcagctacttcatatgttttggttccc

SEQ ID NO: 74840 - DNA, 766 bp, Zea Mays
aactccctctgatcctacatctgcctgccctcttcgccacctaaaccaaaaatcctttcaggcaccacttaaacacgctccaaccagacgcaaaaacacacacgcacggccccggccgggcccgaagatgcacgcgcaatctcgcactcgcatcctcaagcaagcctgcgccgccgctctcgcgctcctgctcgcggtgacgagcacggcagccagcgcccgtccggcacgccgcggttcctcgccgtcgccgccgtcccgcagctccgcccaaacgatcacgctgtacaccaccggcaccggcgtcgcgtcgcccaaacccacagctccttccacgcggcgcccggtcttcacggacgaggggccaatcggcagccgctggctgcgcgccttgacgaggccggacgcgctccggcctgccgcggtcaccgtggtcgacgagcggctccgcggcagcaaggagttcgggctgcctctggatgggaggctgcagggcgtcctcgtcaccggcgtggctgacaacggcagccatatggtggccgtgaaggcctcgttcgccggcgacggcgcgggcgacagcatcagcttcttcggcgtccgccgcgacgaccaggaggagtctcacgtcgcggtcgtcggagggacggggcggtacagtggcgcctccggctttgccgttgtcagagctgctggtggtgtaccagaaacgggtgggaataatgtcagcctgagcagagtgctgagtttcagtgtgcatctcaagtag

SEQ ID NO: 74841 - DNA, 870 bp, Zea Mays
gccagacccaacatattcaaagttcccatgacatttgtcttgtacaaagtgttaagaagtccaaattttagacaaaagaaactcaaaacatttagggcttgttcggttattttcaatccatacggattggaggggattgatacggattggagggaattttgacttactagggattgaaaccccttcaatccccctcaatccatatggattggggtataaccgaacaagcccttatatggatattgaatggacacaggctgcaaaaattgcagacaacctttcaactcatatacgtgcatataacagaagtgatatactgagaaacagaaataactatttcaagaatctacagcaaaacatcctttaccaatttacctctaactgtattcaattaaaccagaacaagcaaatgatctttatctaaacggatctttagccatattcgcttaacttttttggctgctttaagaaagaaaaaaacagtttgagaacataggtgctgcattctgggtgctcgcatctagggtgtgaccagcagatcgtgcatatagccttgaaaaaaaatattttatactgtagactgcactaagtacagtttaaaatataagataagtaagattgctgggatagcctaccaaaatattatcccaattttgctcaatttcatatctgacactaaccagcccgccacccacccaaaaaaaaaatgaaaacaggtgaacaagtcgctttcaatgtaagcaaaatcaaccgatgagatccagtcgtgaaggatatgatcgtcttgattgggttatacttgtaatgaacgggcgacgcggggcatgcgaggtggtagatccggtcgacctcgaggaggattggttcgac

SEQ ID NO: 74842 - DNA, 1588 bp, Zea Mays
ggcattgccctgactcccaaaacccagaagaaaagggaaaagtctccaccccgaccccgtccgtccggctagatctcgactccgctccgcttccccccatctcccacctagatctcgccgcgatgggcctcgccgctgccgcccgcgcggtccttctcctcctcgccgtcgccggggtcctcctccgtccggcggcggcggagatcaagcaggagtccttcaaggacgactcccgcggttccattctcttcgagaagttcggcttcggcccccacggcatggtgtcaatctccgtcaccggcgccaaggcctcctccgcgctcgctaagcccgatccggcacagctcggcttcttccttctctccgacgagtcgctcttcgaggccatctacgatcagccggcacccacggatctgaaccccaacccggagtcctccccgacctgcgtcctctccagcccctacgtgaagccgctcttcaccttcgcagagctcgatgacaagggtttccacaaccagactttccccatcacccatcccgacgagtacagcctctttttcgccaactgcgcgccggagaccagcgtcaccatggaggtccgcaccgacatgtacaacaccaacctggacggcaccaaggactacctctccgtcggcatggcctccgtcccggcgatctacgccttcttcgccgtctgctatgtcgtgttcctggccggttggctctacgtcaccctctaccgcaaccgcctctccgcgcagcgcatccaccacctcatgtcgggcctgctcgttgcgcggatgctctactgcatctcggcggccgaggaccagcactacatccgcaccgccgggacaccgcacgggacaaggagaagaaagtgctcatgttggtgatccctcttcaggttgcagctaacattgctgctgctgtagttggcgagaccggaccattcttgcagggatgggtgacatggaaccagatcttcttgtttgttgatgtcgcttgctgttgtgccgtgctcttcccagttgtgtggtcgatgcgttcgctgcgggagtcatccaagacagacggcaaggcggccagaacccttgccaagctcatgctcttccgccagttctatgttgtcgtgattggatatctgtacttcaccaggatcattgtgtatgctctcaggacaattactaactacaagtacagatgggtgagcgttgcagccgaggaggtgtccaccatggcattctacatgttcatgttctacatgttcaggccagctgagaggaaccagtactttgcacttgacgaggatgacgaggaagccgcagagatggtgctccgtgagcaggagtttgagctctagacggacacatggatgtccaatgacgtgggaatacagccatctcccattcattttctcctcgatgtgctgttgatcatactatacagattcagggtttagctaatgtttgtttatgtgttttggaactggggatgtcattgataagcattgcgttgccatgtcttgtgaagccttgtcattgctggaagcaggttctgaatttcatatggttgttgacacttctgc

SEQ ID NO: 74843 - DNA, 1404 bp, Zea Mays
caaaggagaaggcgcgttcccaccttccaaagcaacgtgtgtgaagactggctatataaaccacgtccgcattgcacgctcccatccatccagctcgcgaccagagcagcgacagcgagagagagaagcaacggagagaggggccagctcaagaggaaggaagcaagcaagaaggaaacaaggaaggaagcaagcaagcaatcggagcgatggagcacgggtacccctgcaacggctgcggcaaggagaagcggccgccgctcaagaggggccagctcaagctgcagatcgccaggaccctgctcggcagcctcgcggcgccggtcgccaagaaccgggaccgcggcttcgggagatagataggccgtgccgtggtagcagtagtagagtagtagttagctgaggacatgcgtcggccgactggtggactgtgccgtctgtgcttttgttcttcctcttcttcttttaagaaagagcgtgttgccgtcaggttttgctctgttctttctccttccgcaggcctcttgctcaccttcttcagccgcctctcttggttggctggctcgtactagaacggaaacgccaggcagcttaagagccctgttcctcctgaatgaagcaacgcacgcacgtagagcgagaaagcaacacaaccgtccggaaacatcttgtgtttttctatgtagtatcctcttgaacaaaaggagacgccaccagagcattcgattcctgccctggggcgacatttacgcctttatttggcatgacaatttggcctgatttctatttgccatgagggcataagctaggctaatccctccccaactaacactgatgcttcgagtgacccctcccccaactaactctggacaggtgcgcgggtggtgatgagtgtcgcgagtgcgagaagacaagtgacgcaggtcccactacccagcccactagcaacaacagagagatgagagaaccacatgcatggctcaaaacaagtccgcagcttaatttattccccgaccgtaggaaccacatgcatgacccaattccctcccatcaacacgcattcagatgaaaacgaacgtgcccaaaggatggagagaaaccaaacaacactaccgaactagttgtgcgaagataattcactttgaactcagctgtttatgatatatattatgtataaattggtgtatttgagactatcccttgttagttggtaattgtactacgtggttcgtcttttctatttatacatgtgtagaatctcttggtgtagtcttcttagcttctagaaaaaactagctgctaaaggtcatagccgactgtttaagcatgggagcaatataggttatcattatttggctaatgatttggcggataatttatgaaccttggctgattcgttcgtcc

SEQ ID NO: 74844 - DNA, 1013 bp, Zea Mays
ggcagtcttaagcttggtggttgtagtggcgcaagtataatgcgttattatcctccaccagagaggacccataggccatatgcatgtaggcatgtagctgcaagtctctctctctctacaccctatacttagtagcggagatcatgctgtccctgtcgctgcctaagtggttggaggactgactagttagtgccagacccagactagagacgggcaagccagcagccaattcgtccgtgttgttgttgctgttgtcgtcgtccactatttagttgctttgcgcgcgtgcagagagcgagctacctaccctatagagtgtacatagcaagctccgccgccgtcgccattcctagacacaccttagctcgctctcgcccatgtccgtgacaacaagggagccggagctatagctgacacccgctttcgtcctttgtcctttcgcggcattcctcttggccttggatggaggggtgcccgtgcctctgagctccggcctccgggaattaataaagcaagataggaggatatcgccatgcaggcggcggccaaggccaagacaaggctgcaacgttcatccgtgctgcgttgtttgggctagggcgctgggctgtgggcgttcggctctcaccctttctgctctctctgctctcacatctatgctgtctgctctctctgcctgcgaacaatagaagtattaccacttactagcagtccagcaatttgttttgctttttaaatgatgaatgtgagtgacagtaatgactgatgaggcgaacgaggaagatggagaagagaatcctcctacatttcatgatgagtttgacgatggttattgagatgggagtgttatctactactatctattgctagttatgttgaactttaagtctattatgttggtttatattaaacttgtactcctatttgctactataatattattatcactatctatttgagactgtattctatttttattgcctacttttatatattactaaggtgtcgtcttg

SEQ ID NO: 74845 - DNA, 3276 bp, Zea Mays
cagagaggacccataggccatatgcatgtaggcatgtagctgcaagtctctctctctctacaccctatacttagtagcggagatcatgctgtccctgtcgctgcctaagtggttggaggactgactagttagtgccagacccagactagagacgggcaagccagcagccaattcgtccgtgttgttgttgctgttgtcgtcgtccactatttagttgctttgcgcgcgtgcagagagcgagctacctaccctatagagtgtacatagcaagctccgccgccgtcgccattcctagacacaccttagctcgctctcgcccatgtccgtgacaacaagggagccggagctatagctgacacccgctttcgtcctttgtcctttcgcggcattcctcttggccttggatggaggggtgcccgtgcctctgagctccggcctccgggaattaataaagcaagataggaggatatcgccatgcaggcggcggccaaggccaagacaagcatgcacgagctgacgagctaatcgcctactctgtgactgtacacgcgctcacgaaagcgcagaagcgaggcatgttctctctgctcagcagtggtcgcaaagcaacagaggctcacagacagctgcagcgacggtttgagaattgagacggagttatgcgaccgggcggctctaaactacgtaccgtattgctttcctcctcatcagcatctatctacccacgtctcccatttattttttacctttttcatggagcgagccgacgaggaggaagcgaccaagttttcaaatcacagccgcatgtgatgtgaccatgggggtgtccgtgtccctcccgttcttgagctcggagccaaggaggacaggcaggtccacttgtttgcctaacccgcatctgtccgggcggcctttttgatccccgcccctccgccccaccccatctcactcacactctgcccggccttttgatcccctccacgcccgtgctcgcctacgcggcggagattatgttaagctaatgctcctatcccagttcggcctcggagttgctcttgctcctcccctccacttcctgtcggcctcttgcgctttccggcctcggattctttgtgtgcccaccattgcatctagctgcggcttctctccttcgctctgcatctgagtcgagcactcgagctggagcatcgatccgcctcgtccttccagacgcggcttcagctagaatccatcgctctttttttagttcggtttccatttcccatcagagcttccaaccggttctactcgatttggatttttggagctggagtctcccagagcaaaacttcccctccccttccctcctcctccccccttgcatttgacatgaggaggagaagagacgctgcaatctcccccatgttataaggctaaggcatgctgtcgttgaacaaaatgcatttcctcaagttatattccagcaccagcagcaacagcaacagcttcaggaatggctcctcggaacaccccgcccggacgtcctcccagggcagcaacaaggccgggcggacggcgaggatggccgagtctcccaccggcctcagccccaaggtggaccgccgcacggcggtgagcgccgagagagagaaaaggaggccaccgacgacgaagctgtcggagctggagtcccagctgtcgcagctgcaagaggagctcaagaaggccagggagcaactacactcctctgaactctccaggaagcgggccctgcaggaggccgacgacgccaaggcgcaggcgcgcgactccaaggcgcagctcgccgagctctcgtcggccgaggagacccgactcctggagctgcgacgtctatcgcaggagcgcgaccgctcgtggcagtcggaactggaggccatgcagaagcagcacgccgcggactcgaccgctctggccgcggcgatgggcgaggtgcaccgcctccgcgttcagctcgccgccgcggcgcgcgccgaccgccggcaggacgtggtggaggcgttggccactatcgacgagctcagggcgaagctcgaggcgagcgaggaggccgaggcgcaggcgcgcgccatgcacgaggagtgcaagcagcagctggaggcgagccgggccaccatcgattcgctgctcaccgacgggtccaagctgatggactcgttcagcctcgtggtgaaggagctcgaggagtcgcgtgccaaggtcaaggccctcgaggacgagatcgcggagacgtcgtcgagggccgcaggcgaccactgcagttgctcgggctcggagtcagaggcctccgagctgagggcggagctagaggccgcggaggccaggtaccaagaagagaagatccttagcactgtcgagacgcagtgcgcgtacgagctcatggaccagataaagacagagtccgacctgcggcacggcaagctcgcggcggcgctcgagggcgccaagtccgaggtcatcttcctcaaggcgagtctgttcgacaaggaatccgagctacgtagtgccctggacgcgatcaagaagctacaagcggagacgagagcagacggctcggccgacgcgctgaagcagcagctgcagtgcgcgctgcacgagaacgggcagctgaagcaggagttgcaccagtacgagtccgagaagggctccgcgaccgcgaggacggcggaggccgacgcgtcggaagcggcgaagaagggtgagatggaaaccgagctgcgccgcctgcgggtacaggccgagcagtggcggaaggccgcggagacagccatggcgctgctgacggttggcaagggcgggaacggcaagttcgtggagcggagcgagtcgtgggagggcgttaagtacgcgggcctctgcgaggaattggacgacgacgcggctgtcaggaagaacggcaacgtgctcaggaggatcagcggcatgtggaagaaatgagtgcgatcgggcagctgagcggcggacgcggcgagggctgtactgatctgtagccttgggtctctctggtgtaattgttttttttaaaaggaggatgaccctatggttttagaaaaagaaaggtaacaaatataatacatgagttgccagtgacaaaagagcacaaaccagtactgacagatttaagctagcaacaaaagaacacagactactatacactctgaaactatgataaactctgaaactatgataaacttaaatctccaggacatctgatggcaccagcgtagacagatgaaaattcttcatctagcgaagaac

SEQ ID NO: 74846 - DNA, 1102 bp, Zea Mays
cagagaggacccataggccatatgcatgtaggcatgtagctgcaagtctctctctctctacaccctatacttagtagcggagatcatgctgtccctgtcgctgcctaagtggttggaggactgactagttagtgccagacccagactagagacgggcaagccagcagccaattcgtccgtgttgttgttgctgttgtcgtcgtccactatttagttgctttgcgcgcgtgcagagagcgagctacctaccctatagagtgtacatagcaagctccgccgccgtcgccattcctagacacaccttagctcgctctcgcccatgtccgtgacaacaagggagccggagctatagctgacacccgctttcgtcctttgtcctttcgcggcattcctcttggccttggatggaggggtgcccgtgcctctgagctccggcctccgggaattaataaagcaagataggaggatatcgccatgcaggcggcggccaaggccaagacaaggaatggctcctcggaacaccccgcccggacgtcctcccagggcagcaacaaggccgggcggacggcgaggatggccgagtctcccaccggcctcagccccaaggtggaccgccgcacggcggtgagcgccgagagagaggactgcaggctgcaacgttcatccgtgctgcgttgtttgggctagggcgctgggctgtgggcgttcggctctcaccctttctgctctctctgctctcacatctatgctgtctgctctctctgcctgcgaacaatagaagtattaccacttactagcagtccagcaatttgttttgctttttaaatgatgaatgtgagtgacagtaatgactgatgaggcgaacgaggaagatggagaagagaatcctcctacatttcatgatgagtttgacgatggttattgagatgggagtgttatctactactatctattgctagttatgttgaactttaagtctattatgttggtttatattaaacttgtactcctatttgctactataatattattatcactatctatttgagactgtattctatttttattgcctacttttatatattactaaggtgtcgtcttg

SEQ ID NO: 74847 - DNA, 2761 bp, Zea Mays
gaggacccataggccatatgcatgtaggcatgtagctgcaagtctctctctctctacaccctatacttagtagcggagatcatgctgtccctgtcgctgcctaagtggttggaggactgactagttagtgccagacccagactagagacgggcaagccagcagccaattcgtccgtgttgttgttgctgttgtcgtcgtccactatttagttgctttgcgcgcgtgcagagagcgagctacctaccctatagagtgtacatagcaagctccgccgccgtcgccattcctagacacaccttagctcgctctcgcccatgtccgtgacaacaagggagccggagctatagctgacacccgctttcgtcctttgtcctttcgcggcattcctcttggccttggatggaggggtgcccgtgcctctgagctccggcctccgggaattaataaagcaagataggaggatatcgccatgcaggcggcggccaaggccaagacaagcaaactgtcagttaggctgaaacagacaagtgtagccaagctcccaaatcaaatggtccaggtccagggtatcgaatggccagcaaacccttggaataattgaagctggtcctcgtgttgccacccaactgatggattaagatggcggtaccagctctgctaccaccagtgtcgctgcaaccaacggcaaaacaggcgtgtctgatagaactgatgacgcaaactcttgtttgggaccgggaccaggaaccgtaattgacaccggacaaaaaccctgaaaataggaaggctatcagtcatatatcccatcatgctagtcattttctcatacagaaactagaattcggtagcaagacaagattatcgccgacctttcaacaactgtatgctttttttctatctagatactggagatgagctagaaagtttctcatgaccactgcactgcattggttaagctcgccagcgtctcccaatcgaaaaaatgtcactgtgcaaatcaaatcaccagaagtttttcaaacggagcttgagaagtagtacagtacagtactaatattgacatcagtgatctcgtcggcattaatttgtccttgtgtgcaatgaaatcaccagaaaaggaggccaccgacgacgaagctgtcggagctggagtcccagctgtcgcagctgcaagaggagctcaagaaggccagggagcaactacactcctctgaactctccaggaagcgggccctgcaggaggccgacgacgccaaggcgcaggcgcgcgactccaaggcgcagctcgccgagctctcgtcggccgaggagacccgactcctggagctgcgacgtctatcgcaggagcgcgaccgctcgtggcagtcggaactggaggccatgcagaagcagcacgccgcggactcgaccgctctggccgcggcgatgggcgaggtgcaccgcctccgcgttcagctcgccgccgcggcgcgcgccgaccgccggcaggacgtggtggaggcgttggccactatcgacgagctcagggcgaagctcgaggcgagcgaggaggccgaggcgcaggcgcgcgccatgcacgaggagtgcaagcagcagctggaggcgagccgggccaccatcgattcgctgctcaccgacgggtccaagctgatggactcgttcagcctcgtggtgaaggagctcgaggagtcgcgtgccaaggtcaaggccctcgaggacgagatcgcggagacgtcgtcgagggccgcaggcgaccactgcagttgctcgggctcggagtcagaggcctccgagctgagggcggagctagaggccgcggaggccaggtaccaagaagagaagatccttagcactgtcgagacgcagtgcgcgtacgagctcatggaccagataaagacagagtccgacctgcggcacggcaagctcgcggcggcgctcgagggcgccaagtccgaggtcatcttcctcaaggcgagtctgttcgacaaggaatccgagctacgtagtgccctggacgcgatcaagaagctacaagcggagacgagagcagacggctcggccgacgcgctgaagcagcagctgcagtgcgcgctgcacgagaacgggcagctgaagcaggagttgcaccagtacgagtccgagaagggctccgcgaccgcgaggacggcggaggccgacgcgtcggaagcggcgaagaagggtgagatggaaaccgagctgcgccgcctgcgggtacaggccgagcagtggcggaaggccgcggagacagccatggcgctgctgacggttggcaagggcgggaacggcaagttcgtggagcggagcgagtcgtgggagggcgttaagtacgcgggcctctgcgaggaattggacgacgacgcggctgtcaggaagaacggcaacgtgctcaggaggatcagcggcatgtggaagaaatgagtgcgatcgggcagctgagcggcggacgcggcgagggctgtactgatctgtagccttgggtctctctggtgtaattgttttttttaaaaggaggatgaccctatggttttagaaaaagaaaggtaacaaatataatacatgagttgccagtgacaaaagagcacaaaccagtactgacagatttaagctagcaacaaaagaacacagactactatacactctgaaactatgataaactctgaaactatgataaacttaaatctccaggacatctgatggcaccagcgtagacagatgaaaattcttcatctagcgaagaac

SEQ ID NO: 74848 - DNA, 3052 bp, Zea Mays
cgttcttgagctcggagccaaggaggacaggcaggtccacttgtttgcctaacccgcatctgtccgggcggcctttttgatccccgcccctccgccccaccccatctcactcacactctgcccggccttttgatcccctccacgcccgtgctcgcctacgcggcggagattatgttaagctaatgctcctatcccagttcggcctcggagttgctcttgctcctcccctccacttcctgtcggcctcttgcgctttccggcctcggattctttgtgtgcccaccattgcatctagctgcggcttctctccttcgctctgcatctgagtcgagcactcgagctggagcatcgatccgcctcgtccttccagacgcggcttcagctagaatccatcgctctttttttagttcggtttccatttcccatcagagcttccaaccggttctactcgatttggatttttggagctggagtctcccagagcaaaacttcccctccccttccctcctcctccccccttgcatttgacatgaggaggagaagagacgctgcaatctcccccatgttataaggctaaggcatgctgtcgttgaacaaaatgcatttcctcaagttatattccagcaccagcagcaacagcaacagcttcaggaatggctcctcggaacaccccgcccggacgtcctcccagggcagcaacaaggccgggcggacggcgaggatggccgagtctcccaccggcctcagccccaaggtggaccgccgcacggcggtgagcgccgagagagagcaaactgtcagttaggctgaaacagacaagtgtagccaagctcccaaatcaaatggtccaggtccagggtatcgaatggccagcaaacccttggaataattgaagctggtcctcgtgttgccacccaactgatggattaagatggcggtaccagctctgctaccaccagtgtcgctgcaaccaacggcaaaacaggcgtgtctgatagaactgatgacgcaaactcttgtttgggaccgggaccaggaaccgtaattgacaccggacaaaaaccctgaaaataggaaggctatcagtcatatatcccatcatgctagtcattttctcatacagaaactagaattcggtagcaagacaagattatcgccgacctttcaacaactgtatgctttttttctatctagatactggagatgagctagaaagtttctcatgaccactgcactgcattggttaagctcgccagcgtctcccaatcgaaaaaatgtcactgtgcaaatcaaatcaccagaagtttttcaaacggagcttgagaagtagtacagtacagtactaatattgacatcagtgatctcgtcggcattaatttgtccttgtgtgcaatgaaatcaccagaaaaggaggccaccgacgacgaagctgtcggagctggagtcccagctgtcgcagctgcaagaggagctcaagaaggccagggagcaactacactcctctgaactctccaggaagcgggccctgcaggaggccgacgacgccaaggcgcaggcgcgcgactccaaggcgcagctcgccgagctctcgtcggccgaggagacccgactcctggagctgcgacgtctatcgcaggagcgcgaccgctcgtggcagtcggaactggaggccatgcagaagcagcacgccgcggactcgaccgctctggccgcggcgatgggcgaggtgcaccgcctccgcgttcagctcgccgccgcggcgcgcgccgaccgccggcaggacgtggtggaggcgttggccactatcgacgagctcagggcgaagctcgaggcgagcgaggaggccgaggcgcaggcgcgcgccatgcacgaggagtgcaagcagcagctggaggcgagccgggccaccatcgattcgctgctcaccgacgggtccaagctgatggactcgttcagcctcgtggtgaaggagctcgaggagtcgcgtgccaaggtcaaggccctcgaggacgagatcgcggagacgtcgtcgagggccgcaggcgaccactgcagttgctcgggctcggagtcagaggcctccgagctgagggcggagctagaggccgcggaggccaggtaccaagaagagaagatccttagcactgtcgagacgcagtgcgcgtacgagctcatggaccagataaagacagagtccgacctgcggcacggcaagctcgcggcggcgctcgagggcgccaagtccgaggtcatcttcctcaaggcgagtctgttcgacaaggaatccgagctacgtagtgccctggacgcgatcaagaagctacaagcggagacgagagcagacggctcggccgacgcgctgaagcagcagctgcagtgcgcgctgcacgagaacgggcagctgaagcaggagttgcaccagtacgagtccgagaagggctccgcgaccgcgaggacggcggaggccgacgcgtcggaagcggcgaagaagggtgagatggaaaccgagctgcgccgcctgcgggtacaggccgagcagtggcggaaggccgcggagacagccatggcgctgctgacggttggcaagggcgggaacggcaagttcgtggagcggagcgagtcgtgggagggcgttaagtacgcgggcctctgcgaggaattggacgacgacgcggctgtcaggaagaacggcaacgtgctcaggaggatcagcggcatgtggaagaaatgagtgcgatcgggcagctgagcggcggacgcggcgagggctgtactgatctgtagccttgggtctctctggtgtaattgttttttttaaaaggaggatgaccctatggttttagaaaaagaaaggtaacaaatataatacatgagttgccagtgacaaaagagcacaaaccagtactgacagatttaagctagcaacaaaagaacacagactactatacactctgaaactatgataaactctgaaactatgataaacttaaatctccaggacatctgatggcaccagcgtagacagatgaaaattcttcatctagcgaagaac

SEQ ID NO: 74849 - DNA, 1111 bp, Zea Mays
cccaccccatctcactcacactctgcccggccttttgatcccctccacgcccgtgctcgcctacgcggcggagattatgttaagctaatgctcctatcccagttcggcctcggagttgctcttgctcctcccctccacttcctgtcggcctcttgcgctttccggcctcggattctttgtgtgcccaccattgcatctagctgcggcttctctccttcgctctgcatctgagtcgagcactcgagctggagcatcgatccgcctcgtccttccagacgcggcttcagctagaatccatcgctctttttttagttcggtttccatttcccatcagagcttccaaccggttctactcgatttggatttttggagctggagtctcccagagcaaaacttcccctccccttccctcctcctccccccttgcatttgacatgaggaggagaagagacgctgcaatctcccccatgttataaggctaaggcatgctgtcgttgaacaaaatgcatttcctcaagttatattccagcaccagcagcaacagcaacagcttcaggaatggctcctcggaacaccccgcccggacgtcctcccagggcagcaacaaggccgggcggacggcgaggatggccgagtctcccaccggcctcagccccaaggtggaccgccgcacggcggtgagcgccgagagagagccttggttgtccagagcctatgatccttgcaccgaaagatatgcaagtatttagaggtgcagatggcattgcatgcaaatacaactggaattcattacccttggcaaacatgcagcaatgttattgggtcctactgggcagattccccaagatctatgcttccaatctaccaagaactgatagcagctggtatcaagatctgggttttcagcagcaacacagatgatgtaattcctgtaactgcgacaaggtactcgatagatgctctcaagctcccaacggctggaggttggaaccaagtatacaaaggacaaacccttgtaaccatagcaggcgcaggacatgaagtgccgctgcaccggcctcgacaagctttgattatgttcagacacttcttgcagaataaaccaatgcca

SEQ ID NO: 74850 - DNA, 1660 bp, Zea Mays
atgttttcatcgcagcaaagagaaattgagaatcaacacagactgaacatcaagcctgtactagaaatagagaaatgcggaaaaaaaaaaagaaatactgaaattgcaaaaaaaaaaaaaactgaaagctgcgcgcgtacgataattgccactcgcggcaactctcctgtccagctgtactaaccctgacaggtggggactacagaaactacacctatcaccaataccctattccgctagggtcacgcgcccacaaaaacaccacgtacacgggcgcggcgcggagaccgaccaccacctcttcctccggttgcctccgccctcgggcctcgccttcgctccatcgtccccgtctccatcctccaggaccggcaaccccacgtagcgcgacagctcgtcgccgtagtccatggcggctacggaggtgtactcgccgaccacggcggcggcagcgcagcagcagcgggggaaggcggcatcgcaggcgtggcgagcggtggtagggtggatcggcttcttcctccaagtcctgcttcagatcctccggggcacgccctcctgcgcacagctcctctccttcgttggtttccgctatccgctcctctccggacctgcggcctcggagccgttgccggaggtggccttcatgccgctccactccgagatccctgctgacgcggcgcctgccccgaaacctgcgtctgagcccctgggccgcctcacgtgcttgacttggatgagactttagtttctgcatatgaatcatctagtcttcctgccattgtgcgcacacaagctgttgaagcaggattacattgctttgatatggaatgtatatcgtctgataaggatgttgaaggcaaacaaaaggtgaatcatgtgactgtttttgagcgccctggtttgcatgagttcttgcggaaaactagtgaatttgcagatcttatcctttttacagcaggtttagaaggttatgctagacctttagttgaccgaatagatgttcacaatagattcagaattcgtctctatcgcccatcaactgttaccacggaatatagagaacatgtgaaagatcttactcgcgtgtcaaaagattttggcaggattgtcattgtcgacaacaatccgttcagtttcattcttcagcctttgaatggaataccttgtgttccattttcagctggacaacattctgatgatcagctcatgacggttatatttccactcctgaagcatctttccctccagaaagacgtcagacccgtattgcgtgaaagatttcatatgccagaatggttccaaaaccatgggatcccccaaattagtcaggctgtgtaagttttgctgccgcacaatggaattgttttgatgaaggctggagtgcctactatgctataagccccttaagggagagcacttgtacattattatcaatattcacttagggttcttgataaaaccgagtcgctgttcatatggagttgtcacacccgaagataagaagattgtaatctagcatgacctcagatttaaatctgtgtagtggagcattttatatcaattaattgttgtatatcagcctctgttgtaaaattttattgttgacaagatagtctaatgaatagttcgtgatccatggatgtctagtttacacctc

SEQ ID NO: 74851 - DNA, 1634 bp, Zea Mays
atgttttcatcgcagcaaagagaaattgagaatcaacacagactgaacatcaagcctgtactagaaatagagaaatgcggaaaaaaaaaaagaaatactgaaattgcaaaaaaaaaaaaaactgaaagctgcgcgcgtacgataattgccactcgcggcaactctcctgtccagctgtactaaccctgacaggtggggactacagaaactacacctatcaccaataccctattccgctagggtcacgcgcccacaaaaacaccacgtacacgggcgcggcgcggagaccgaccaccacctcttcctccggttgcctccgccctcgggcctcgccttcgctccatcgtccccgtctccatcctccaggaccggcaaccccacgtagcgcgacagctcgtcgccgtagtccatggcggctacggaggtgtactcgccgaccacggcggcggcagcgcagcagcagcgggggaaggcggcatcgcaggcgtggcgagcggtggtagggtggatcggcttcttcctccaagtcctgcttcagatcctccggggcacgccctcctgcgcacagctcctctccttcgttggtttccgctatccgctcctctccggacctgcggcctcggagccgttgccggaggtggccttcatgccgctccactccgagatccctgctgacgcggcgcctgccccgaaacctgcgtctgagcccctgggccgcctcacggtagtgcttgacttggatgagactttagtttctgcatatgaatcatctagtcttcctgccattgtgcgcacacaagctgttgaagcaggattacattgctttgatatggaatgtatatcgtctgataaggatgttgaaggcaaacaaaaggtgaatcatgtgactgtttttgagcgccctggtttgcatgagttcttgcggaaaactagtgaatttgcagatcttatcctttttacagcaggtttagaaggttatgctagacctttagttgaccgaatagatgttcacaatagattcagaattcgtctctatcgcccatcaactgttaccacggaatatagagaacatgtgaaagatcttactcgcgtgtcaaaagattttggcaggattgtcattgtcgacaacaatccgttcagtttcattcttcagcctttgaatggaataccttgtgttccattttcagctggacaacattctgatgatcagcatctttccctccagaaagacgtcagacccgtattgcgtgaaagatttcatatgccagaatggttccaaaaccatgggatcccccaaattagtcaggctgtgtaagttttgctgccgcacaatggaattgttttgatgaaggctggagtgcctactatgctataagccccttaagggagagcacttgtacattattatcaatattcacttagggttcttgataaaaccgagtcgctgttcatatggagttgtcacacccgaagataagaagattgtaatctagcatgacctcagatttaaatctgtgtagtggagcattttatatcaattaattgttgtatatcagcctctgttgtaaaattttattgttgacaagatagtctaatgaatagttcgtgatccatggatgtctagtttacacctc

SEQ ID NO: 74852 - DNA, 1939 bp, Zea Mays
aaagtacttgcttgcctcacacaagtagttccatcgtctgtgtagctaggtctggtgatggatggcgacacccagtagggctgttgaatccgtatgggctatggtcgccgaggcactcgcagtcggacgtgtcttcatcggagatggagtttggtacagcgcgccagtacgacaccaccgacctcttcttccaggaggactggctctacgacgatcacctcttccctagcaagctggacgatgaggacgacgaacgcgaggaggaggacaagtttgtactggatgctcacggtggtgcctcagcgcagacagagataggcaagctcggtgcaggccataaccaccgtcatgaacacatcggtggtgaccgatgtgagggttgcgctgaggtgtacacatgctcatcgccactctgcggttgctgtggagggggactcaagaatgacgggcttcatgtggccaggagctcaagctctactgtgtatgggagataccagatcatggatgaccggacagagacaatggatgattgtgcgcaggatgggtttcaattgaagcagagtggagatattatgtttgaatgtggtatgcagagggatcctggacgaggagatgatgattcagacctgagtgttgtggagaaggagcttcaaatgctcagttcatttgatactgatgctgttacgaatcacggtgtacatgatttcacggacaacggtgacctcaatggcatctgtgacaaaaatccgaaaatcagcattgataaagaatatctgaaaggtcataggatacagccattccctgaaattggtgatcctgatgaagcatatgagtttcgaaatgtaggatcattaaatgcagatgttcaacattctactgctcttgaagctgaggaagatgcggagacaaatattgatcttgctctctctgattttcacagagaatatgaggtatttgaattgagaattatccaccgcaagaacaggactggctttgaagaaaacaaagattttcccattgtgctaaattcggttgttgctggaaggtattgtatcactgaatatctaggctcagctgcattcagcaaggttgtgcaagcacatgatcttcagacaggaatggatgtttgccttaaaataattaaaaatgataaggatttcttcgaccagagcttggatgagataaaacttctgaagttcgtgaacaaatatgatccactagacgagcaccatgtgttgcgcctttatgactacttctaccatcaggaacacctttttattgttactgaactattgcgagcaaatctatatgagtttcagaaatataatcaggaatcgggtggtgaggtatattttactttgcctaggatacaggttatagctcggcaatgtttagaggccttggtttacttgcaccatttaaggatcattcattgtgacttaaagccagaaaatattcttatcaagagctacagtagatgtgaaattaaagtcattgatctgggaagtagttgcttcttgacagacaacttatgcctctatgtccaatctcgttcttatcgagctcctgaggtcattcttggcctaccttacgatcagaggattgacatttggtctcttggttgcatcatttctgaactgtacactggtgaagtattatttcctaacgagcctgtgtccatgatgcttgctcaaatgattggcataatcggcccagttgacatggaaatgctagaattgggacaggagacacagaagtatttcactgatgattatgacctttttaccaaaaatgagatagtaaggctaaatgaatattctttaattgcaaaatctatattgcacgagctgcttctgattgtttccttcgccttcataaaattcattagctaccagttgcctctcggaagttatttatttcctacggtttgttataaaag

SEQ ID NO: 74853 - DNA, 2152 bp, Zea Mays
ggaaaacgcaacagctgcgatccgtgcgcctgtgcactgcagtaccagtacaatcctctctctccctctctcctctgacttcgctgcctccctcctcgtccgtctcgcccggtcgtctcacccaaagactcctcccgcttcgcttccaagttcacgcaccccaccccaccccaccccaatggcgacgcagccgcttccgcttacagcaccacgccgcgtgccgcgcgcctgagcgagagcccgcaagagcacccacacgccacaccagccgcgcgcctacgcggcgcatggcggcgccggggctggaccaggtcatggcgttcctcaccgaccacggcttcgccggcgcggcctccgcgctccgtgacgacgtccttgcgcgcaccgccgccggggacgaaggtcacgacgctgcattaggtccccgtctccccccgctccggatgcccgccgccggtaccggctccggctctggcgctggctctggcacgccggcgcccgcgagccccggctccagctccggttcggcgtcctcgtcagctttcgtcagcatgcgctccacgccctcagggctgttgaatccgtatgggctatggtcgccgaggcactcgcagtcggacgtgtcttcatcggagatggagtttggtacagcgcgccagtacgacaccaccgacctcttcttccaggaggactggctctacgacgatcacctcttccctagcaagctggacgatgaggacgacgaacgcgaggaggaggacaagtttgtactggatgctcacggtggtgcctcagcgcagacagagataggcaagctcggtgcaggccataaccaccgtcatgaacacatcggtggtgaccgatgtgagggttgcgctgaggtgtacacatgctcatcgccactctgcggttgctgtggagggggactcaagaatgacgggcttcatgtggccaggagctcaagctctactgtgtatgggagataccagatcatggatgaccggacagagacaatggatgattgtgcgcaggatgggtttcaattgaagcagagtggagatattatgtttgaatgtggtatgcagagggatcctggacgaggagatgatgattcagacctgagtgttgtggagaaggagcttcaaatgctcagttcatttgatactgatgctgttacgaatcacggtgtacatgatttcacggacaacggtgacctcaatggcatctgtgacaaaaatccgaaaatcagcattgataaagaatatctgaaaggtcataggatacagccattccctgaaattggtgatcctgatgaagcatatgagtttcgaaatgtaggatcattaaatgcagatgttcaacattctactgctcttgaagctgaggaagatgcggagacaaatattgatcttgctctctctgattttcacagagaatatgaggtatttgaattgagaattatccaccgcaagaacaggactggctttgaagaaaacaaagattttcccattgtgctaaattcggttgttgctggaaggtattgtatcactgaatatctaggctcagctgcattcagcaaggttgtgcaagcacatgatcttcagacaggaatggatgtttgccttaaaataattaaaaatgataaggatttcttcgaccagagcttggatgagataaaacttctgaagttcgtgaacaaatatgatccactagacgagcaccatgtgttgcgcctttatgactacttctaccatcaggaacacctttttattgttactgaactattgcgagcaaatctatatgagtttcagaaatataatcaggaatcgggtggtgaggtatattttactttgcctaggatacaggtattatttcctaacgagcctgtgtccatgatgcttgctcaaatgattggcataatcggcccagttgacatggaaatgctagaattgggacaggagacacagaagtatttcactgatgattatgacctttttaccaaaaatgagatagtaaggctaaatgaatattctttaattgcaaaatctatattgcacgagctgcttctgattgtttccttcgccttcataaaattcattagctaccagttgcctctcggaagttatttatttcctacggtttgttataaaag

SEQ ID NO: 74854 - DNA, 2639 bp, Zea Mays
ctctctctccctctctcctctgacttcgctgcctccctcctcgtccgtctcgcccggtcgtctcacccaaagactcctcccgcttcgcttccaagttcacgcaccccaccccaccccaccccaatggcgacgcagccgcttccgcttacagcaccacgccgcgtgccgcgcgcctgagcgagagcccgcaagagcacccacacgccacaccagccgcgcgcctacgcggcgcatggcggcgccggggctggaccaggtcatggcgttcctcaccgaccacggcttcgccggcgcggcctccgcgctccgtgacgacgtccttgcgcgcaccgccgccggggacgaaggtcacgacgctgcattaggtccccgtctccccccgctccggatgcccgccgccggtaccggctccggctctggcgctggctctggcacgccggcgcccgcgagccccggctccagctccggttcggcgtcctcgtcagctttcgtcagcatgcgctccacgccctcagggctgttgaatccgtatgggctatggtcgccgaggcactcgcagtcggacgtgtcttcatcggagatggagtttggtacagcgcgccagtacgacaccaccgacctcttcttccaggaggactggctctacgacgatcacctcttccctagcaagctggacgatgaggacgacgaacgcgaggaggaggacaagtttgtactggatgctcacggtggtgcctcagcgcagacagagataggcaagctcggtgcaggccataaccaccgtcatgaacacatcggtggtgaccgatgtgagggttgcgctgaggtgtacacatgctcatcgccactctgcggttgctgtggagggggactcaagaatgacgggcttcatgtggccaggagctcaagctctactgtgtatgggagataccagatcatggatgaccggacagagacaatggatgattgtgcgcaggatgggtttcaattgaagcagagtggagatattatgtttgaatgtggtatgcagagggatcctggacgaggagatgatgattcagacctgagtgttgtggagaaggagcttcaaatgctcagttcatttgatactgatgctgttacgaatcacggtgtacatgatttcacggacaacggtgacctcaatggcatctgtgacaaaaatccgaaaatcagcattgataaagaatatctgaaaggtcataggatacagccattccctgaaattggtgatcctgatgaagcatatgagtttcgaaatgtaggatcattaaatgcagatgttcaacattctactgctcttgaagctgaggaagatgcggagacaaatattgatcttgctctctctgattttcacagagaatatgaggtatttgaattgagaattatccaccgcaagaacaggactggctttgaagaaaacaaagattttcccattgtgctaaattcggttgttgctggaaggtattgtatcactgaatatctaggctcagctgcattcagcaaggttgtgcaagcacatgatcttcagacaggaatggatgtttgccttaaaataattaaaaatgataaggatttcttcgaccagagcttggatgagataaaacttctgaagttcgtgaacaaatatgatccactagacgagcaccatgtgttgcgcctttatgactacttctaccatcaggaacacctttttattgttactgaactattgcgagcaaatctatatgagtttcagaaatataatcaggaatcgggtggtgaggtatattttactttgcctaggatacaggttatagctcggcaatgtttagaggccttggtttacttgcaccatttaaggatcattcattgtgacttaaagccagaaaatattcttatcaagagctacagtagatgtgaaattaaagtcattgatctgggaagtagttgcttcttgacagacaacttatgcctctatgtccaatctcgttcttatcgagctcctgaggtcattcttggcctaccttacgatcagaggattgacatttggtctcttggttgcatcatttctgaactgtacactggtgaagtaagtatgttttatttacttgaaatgcttggcggcctgtaggattgcaacaaacttgtcttagtattattttggcaaaattttgaggcctcttttcttatattattgcaataccaataaataactccaaccagaattagaaaataatcttttttatttatgttgtaagcacgtgtgagctggagaggtgtggcatactggcattggatgtctgggtgcttcttttccttggaattatagcttctgtcatttacatgtaacaggtattatttcctaacgagcctgtgtccatgatgcttgctcaaatgattggcataatcggcccagttgacatggaaatgctagaattgggacaggagacacagaagtatttcactgatgattatgacctttttaccaaaaatgagatagtaaggctaaatgaatattctttaattgcaaaatctatattgcacgagctgcttctgattgtttccttcgccttcataaaattcattagctaccagttgcctctcggaagttatttatttcctacggtttgttataaaag

SEQ ID NO: 74855 - DNA, 2053 bp, Zea Mays
gtcacacagtctcgatctgtgcgccgatatgccagtggctatggctttggggccgattcggcgctggagagctgttaaacctctccggctccgccactttcgtttccgtttctgcgcttggtttggtgccgaattttctgcacattttaccaattctgaacgaaaactccctttctgttttgccgactgtagggctgttgaatccgtatgggctatggtcgccgaggcactcgcagtcggacgtgtcttcatcggagatggagtttggtacagcgcgccagtacgacaccaccgacctcttcttccaggaggactggctctacgacgatcacctcttccctagcaagctggacgatgaggacgacgaacgcgaggaggaggacaagtttgtactggatgctcacggtggtgcctcagcgcagacagagataggcaagctcggtgcaggccataaccaccgtcatgaacacatcggtggtgaccgatgtgagggttgcgctgaggtgtacacatgctcatcgccactctgcggttgctgtggagggggactcaagaatgacgggcttcatgtggccaggagctcaagctctactgtgtatgggagataccagatcatggatgaccggacagagacaatggatgattgtgcgcaggatgggtttcaattgaagcagagtggagatattatgtttgaatgtggtatgcagagggatcctggacgaggagatgatgattcagacctgagtgttgtggagaaggagcttcaaatgctcagttcatttgatactgatgctgttacgaatcacggtgtacatgatttcacggacaacggtgacctcaatggcatctgtgacaaaaatccgaaaatcagcattgataaagaatatctgaaaggtcataggatacagccattccctgaaattggtgatcctgatgaagcatatgagtttcgaaatgtaggatcattaaatgcagatgttcaacattctactgctcttgaagctgaggaagatgcggagacaaatattgatcttgctctctctgattttcacagagaatatgaggtatttgaattgagaattatccaccgcaagaacaggactggctttgaagaaaacaaagattttcccattgtgctaaattcggttgttgctggaaggtattgtatcactgaatatctaggctcagctgcattcagcaaggttgtgcaagcacatgatcttcagacaggaatggatgtttgccttaaaataattaaaaatgataaggatttcttcgaccagagcttggatgagataaaacttctgaagttcgtgaacaaatatgatccactagacgagcaccatgtgttgcgcctttatgactacttctaccatcaggaacacctttttattgttactgaactattgcgagcaaatctatatgagtttcagaaatataatcaggaatcgggtggtgaggtatattttactttgcctaggatacaggttatagctcggcaatgtttagaggccttggtttacttgcaccatttaaggatcattcattgtgacttaaagccagaaaatattcttatcaagagctacagtagatgtgaaattaaagtcattgatctgggaagtagttgcttcttgacagacaacttatgcctctatgtccaatctcgttcttatcgagctcctgaggtcattcttggcctaccttacgatcagaggattgacatttggtctcttggttgcatcatttctgaactgtacactggtgaagtattatttcctaacgagcctgtgtccatgatgcttgctcaaatgattggcataatcggcccagttgacatggaaatgctagaattgggacaggagacacagaagtatttcactgatgattatgacctttttaccaaaaatgagatagtaaggctaaatgaatattctttaattgcaaaatctatattgcacgagctgcttctgattgtttccttcgccttcataaaattcattagctaccagttgcctctcggaagttatttatttcctacggtttgttataaaag

SEQ ID NO: 74856 - DNA, 1988 bp, Zea Mays
gcaaagccaccagaagcccagcatcggccttcccgtgtcaccctcactcagcccggcccgactcgtcaaggattcctatcttcctatggtcgtcgtcgtcgtcgtcgtcggagacgtcctcgagtccccctcccctcccctcccccccggccccgccgaagaggagcagcgcagccgcgatggaccgcgtccagctcgtgctcctcggcctccccatcctcctcttctgctccgacgtcgttaccctcttcgcgcctctcccgccgccgggccccgggcccgacaggggcccccacgcttttcagcccggcgccgaatcctcctccgccgccgacgcttccgcacatgtggagccacaggtggacggaactggctccggcaccaccgtcgacttcaagttctgcgcctcctgctcgtacaggggaactgcaatgaccatgaaacggatgctggaaacctcctttcctgggatccatgttgtcttggaaaattatcctccgccgttccccaaacgcgctctcagtaaagctgtaccccttcttcagttcggcgcgatggcaacattaatggccggtgatcagatcttccccaggtttggaatggtcccgcctccttggtactactcactccgcgctaatagatttgggaccatggcgtcaatctggctgtttggcaatttcgcccattcatttctacagagttctggtgcctttgaagtttattgcaacgggcaactggtaggttcctgtgaacacctagttttgctgcaatgttgttctcaagtacttttacttttgtttgcaacattatatttttttcgaaatcatttcatttcttgccgaatgttttctgggcactgaagctccctgagttatctgatttacttcattgagctattcgtatttcctctttgatagaagctagtaacattttggaaccctaggtaaactagtttcttttcctggatctctgaactgaaatgtggaggtcaggtcacgtttatgcatacaattcttcatatggtggtagaattatcaattgttggtcgcgaagctttggaaaaagagcaagttattctagaacagtatgagagagcagggtttgttatgtttgcttgtatggcatctgtgcttttctttctcttggtggagtcaaagtactaatatgtccaaattcataattactgaagtgcgtattagttgtacttatgctgcatagtactgtggcaatagccaaacaatgagactgaaagtggtactgtaaatgcaacaaaccaagtaggggaaattgtggtaatagtagacaactatgcagggcaggccgttccaaaatgacaagtggtcggtgtttgtaaaagtagcctgggatctaggtctttccttcatatggaactgcaagcttcaaacatcttgttttcttatatatgcagtccatatggatcattcattcaaatggtaaatatgatgagcaatcatagttctttgaagtgaaactatagttttactctttttcatatacattgtttgaaccattcctgcatttcccttttccgtaactgaatttcttatgcagccgacctggatgtgccttgcttatgctagcaattttctccacttttcaggttttctccaaactgtctgagcagaggtttcctagtgaacttgagctacaggagctcattggcagtaggataccggattctcagattgtagaaaatctggaaaaagatctggtcctagaaaaagatctggtcttagatgatgttgatgccgatgatgccatgagagactagcttcgcctgtttgtttgttactaaatagacagaacttgagagtttcacaacttaattgtcaaaaacatattgccttataatttgcactttattttcctcaattatgtacatatttataccatagttatgtaatatctattgaagtcgtcaagtcagaactttcacagattgcaatagctcattaaaaaggggcaaa

SEQ ID NO: 74857 - DNA, 965 bp, Zea Mays
cagcatcggccttcccgtgtcaccctcactcagcccggcccgactcgtcaaggattcctatcttcctatggtcgtcgtcgtcgtcgtcgtcggagacgtcctcgagtccccctcccctcccctcccccccggccccgccgaagaggagcagcgcagccgcgatggaccgcgtccagctcgtgctcctcggcctccccatcctcctcttctgctccgacgtcgttaccctcttcgcgcctctcccgccgccgggccccgggcccgacaggggcccccacgcttttcagcccggcgccgaatcctcctccgccgccgacgcttccgcacatgtggagccacaggtggacggaactggctccggcaccaccgtcgacttcaagttctgcgcctcctgctcgtacaggggaactgcaatgaccatgaaacggatgctggaaacctcctttcctgggatccatgttgtcttggaaaattatcctccgccgttccccaaacgcgctctcagtaaagctgtaccccttcttcagttcggcgcgatggcaacattaatggccggtgatcagatcttccccaggtttggaatggtcccgcctccttggttttctccaaactgtctgagcagaggtttcctagtgaacttgagctacaggagctcattggcagtaggataccggattctcagattgtagaaaatctggaaaaagatctggtcctagaaaaagatctggtcttagatgatgttgatgccgatgatgccatgagagactagcttcgcctgtttgtttgttactaaatagacagaacttgagagtttcacaacttaattgtcaaaaacatattgccttataatttgcactttattttcctcaattatgtacatatttataccatagttatgtaatatctattgaagtcgtcaagtcagaactttcacagattgcaatagctcattaaaaaggggcaaa

SEQ ID NO: 74858 - DNA, 941 bp, Zea Mays
cagcatcggccttcccgtgtcaccctcactcagcccggcccgactcgtcaaggattcctatcttcctatggtcgtcgtcgtcgtcgtcgtcggagacgtcctcgagtccccctcccctcccctcccccccggccccgccgaagaggagcagcgcagccgcgatggaccgcgtccagctcgtgctcctcggcctccccatcctcctcttctgctccgacgtcgttaccctcttcgcgcctctcccgccgccgggccccgggcccgacaggggcccccacgcttttcagcccggcgccgaatcctcctccgccgccgacgcttccgcacatgtggagccacaggtggacggaactggctccggcaccaccgtcgacttcaagttctgcgcctcctgctcgtacaggggaactgcaatgaccatgaaacggatgctggaaacctcctttcctgggatccatgttgtcttggaaaattatcctccgccgttccccaaacgcgctctcagtaaagctgtaccccttcttcagttcggcgcgatggcaacattaatggccggtgatcagatcttccccaggttttctccaaactgtctgagcagaggtttcctagtgaacttgagctacaggagctcattggcagtaggataccggattctcagattgtagaaaatctggaaaaagatctggtcctagaaaaagatctggtcttagatgatgttgatgccgatgatgccatgagagactagcttcgcctgtttgtttgttactaaatagacagaacttgagagtttcacaacttaattgtcaaaaacatattgccttataatttgcactttattttcctcaattatgtacatatttataccatagttatgtaatatctattgaagtcgtcaagtcagaactttcacagattgcaatagctcattaaaaaggggcaaa

SEQ ID NO: 74859 - DNA, 874 bp, Zea Mays
ggctgaagtcaaagggctgcctgtattttaaaatgtgcctttttgtgtgcagaaactcagcaggaagcttgttcatataagcgttgggctggtattcatgctcttttggcctctttttagcaccaggggttaacattataaggatgcttctactggggctgggacttatgaaaaacgaggctatggttaaatcaatgagccgctctggagattacagggaacttctcaagggcccactgtattatgctgctactataacttttgccacgtctcttttatggagaacctcaccagttgctatagcacttatatgcaacttatgtgctggggatggtatagccgatgttgttgggagacgcctaggtaaagaaaagcttccatacaatcccaacaaatcatatgctggaagcatagcaatggcggtggctggttttctggcctcagttgggtatatgcattacttccacactttcggttttattgaggaaacatggtacatggctttaagcttcctcgtggtctctgtagctgcagcactcgttgaatcgcaccccatcagcacagaacttgatgacaatttgactgttcctttgacatcattcctagttggtagcctcatcttttgatgtttaggcgcaaggacgtatgagatgtttctccgtcatgctgtaatcttctgatgtttaggctcaaggacatatgagatgtttctccgtcatgctgtattttatgtaaaacgtttctaaaatactactataattgtgagaatctgtacctagagtttggagaatatgttcggtttgtttatcataatacaagagtgtgtttggttagggagttgactggaatgaagcagttccattccggttcctgg

SEQ ID NO: 74860 - DNA, 904 bp, Zea Mays
ggctgaagtcaaagggctgcctgtattttaaaatgtgcctttttgtgtgcagaaactcagcaggaagcttgttcatataagcgttgggctggtattcatgctcttttggcctctttttagctctggatggtatactcctttccttgctgcgctagcaccaggggttaacattataaggatgcttctactggggctgggacttatgaaaaacgaggctatggttaaatcaatgagccgctctggagattacagggaacttctcaagggcccactgtattatgctgctactataacttttgccacgtctcttttatggagaacctcaccagttgctatagcacttatatgcaacttatgtgctggggatggtatagccgatgttgttgggagacgcctaggtaaagaaaagcttccatacaatcccaacaaatcatatgctggaagcatagcaatggcggtggctggttttctggcctcagtatatgcattacttccacactttcggttttattgaggaaacatggtacatggctttaagcttcctcgtggtctctgtagctgcagcactcgttgaatcgcaccccatcagcacagaacttgatgacaatttgactgttcctttgacatcattcctagttggtagcctcatcttttgatgtttaggcgcaaggacgtatgagatgtttctccgtcatgctgtaatcttctgatgtttaggctcaaggacatatgagatgtttctccgtcatgctgtattttatgtaaaacgtttctaaaatactactataattgtgagaatctgtacctagagtttggagaatatgttcggtttgtttatcataatacaagagtgtgtttggttagggagttgactggaatgaagcagttccattccggttcctgg

SEQ ID NO: 74861 - DNA, 1633 bp, Zea Mays
cagccactcaacgacccccggttccccggtctcggactctcggtctcgcacgctccctccccatccccaattcggtttcgctccgccccggctgccgcacccatggcctcctcctcctcgctcttctcgccgtgcgccctcaccgccaagctcgggatagggcacgcgtcctatggctccggacgccgcgccaacttgcgccggcgcggccgcctctcggttgtggccgtacagacgggcccgcagaagccgtctccgtcgtcgtcccaggccgccgcggcggaggatgaggcggatgcgctgcagaagcttctgaagagggagtacaagtacgggttcgtatccgacttcgagtccttctccatccccaaggggctgtcggaggccaccgtccgccgcatctcggagcttaaggcggagccggcgtggatgctggacttccgcctcgccgcctaccgccgcttcctcaccatggtcgagcccacctggagcgacaacgagtacgcgcccgtggacctgcagtccatttgctactactccgcgcccaaaaccaagcccaagctcaatagcctcgacgaggtcgacccggagctgctcaagaccttcgaccgcctcggcatcccgctcaccgagcagaagcgcctctccaacgtcgccgttgacgccgtcatcgactccacctccatcgccaccacccaccgcgaagcgctcatggccaagggcgtcatcttctgctccatctccgaggccatccgcgagtacccggaccttatcaggcgttacctgggcagcgtcgtaccgccaggcgacaactactatgccgctctcaactcagcggtgttcagcgacgggtccttctgcttcgtgcccaaagacacagtctgccccatggaaatctcgacctacttcaggatcaacgacaaggagaccggtcagtttgagaggactctgattgtggccgatgagagaagcacagttagctatttggaaggctgcactgcaccagcttacgactcgaatcagctccatgctgcggttgtggagcttgtgtgtgaggagggggcagagatcaagtactccacggtgcagaattggtactctggtgatgaggagggcaaaggaggcatttataactttgtgacaaagaggggacggtgcaaagggcatggttcgaagatctcatggacacaggttgagactggatctgctattacatggaagtacccaagcgtcgagctcatcggggacgatagtgttggagaattctactcggttgcgcttacaaaggattgccaacaagcagacacagggacaaaaatgatccacaaggggaagaattcacgcagccggatcatatccaagggcatatctgcagggaagtcaaggaattgctaccgcggcttggtcctgatgaaccctagtgcggagaatgcttataattcttcacagtgtgactcattgctgatcggggataatgcggctgcgaacacctatcccaccattcagcacgaagccgacggtggcgcaaccggaccccacttgagatcgacgctccgctgggatctcctcgtgcagcggtgcaggtgccatcgattcctcccagcacggtcaacatccctttacgattccttac

SEQ ID NO: 74862 - DNA, 2128 bp, Zea Mays
ggtcctttcacgagggcacagtagtgtgcccggtggctgcttgttcttccgaatgggacgcgtgcgggcctgccgcctgctcgcccgtagacgtagccctgctccatcattccccaatggtccctttgtttatcatgcactcgagggccacaagggatccagccatctccccgtccagggaatccgcacggactatgtgcagagctgtggtcatcaaggtaccggtaccgggggacgccgctgcatgatgtgtcctgccgactgccgagtgctcacgcctcacgccatatatcgcagtggcacagaagatcaacattcctttctcgcccatccatccagcagcgtgacgtgaaaagcgtcgtcctaggtagatagccacaccattccattgccccggcccccgggcactcctctccttccatactatactctcgcgcggcgagctcctcgagctcgctccccgttccaagctagctagaaaatggccgcggcggaagcagcctcctccgcgccggcgcccgagcatctcctggaggtggaggacgacgaggtgatgatcgacttcaagcccaacgccaagtgccgcgccgacctccgcctccgctccctgcacccgtccctccccgtcgccttcaaggtccagacctcctccccgctcaagttcctcgtcagcccgccgcgcggcgccgtgccgccgctctcctcggcgtccctgcgcgtcgtgctccgcccgcagccgcacgcgccgccgtccttcccgcgctcccgcgccgaccgcttcctcgtcctgtcctcgctctccgcggcgcgcctcgactccgtgggaagcagcaacgacggcggcggcggcgggggcggagtcagggccgtccgcctccgcgtgttcttcggcgggccgtaccttctccgcctcgccgcggacgccggagacgccgcggccgtgcgcctcatcctgcgccggcagccgcacctgctgccgttcctggagcaccagcaggccgccgcggcgcccgacgccggcgagcagcagtgggcgccgctgcacgcggcggccgccaggggggactgcggggagctgaggcggctggggcccgaggcgctggccgcgcgtgaccgcgaggggaggacggtcctgcacgcggtcgccgcggccggcgaggccgaggcggtggcggtgctggtggacatgggcgccgacacgtcggcggtcgacgcgcgcgggaggactccgctggacgtcgcgcgcgacaagggataccaagaagtggtggacgtcctggaacggtgggagctggtgatgacggcggcgaggcgaggcgacctcgggagcctcgagtccctgctcagcaagcgcgccggcgtccgcgggcgcgaccagtacggcctcacggcgctgcacctggccgcgatcaagggacacggcgacgcgatcgcgctgctcgccgggccgggatgcatggacgtcgagtgcgaggacgtggaagggcacaggccgctccacctcgccgtcgagggaggccacgcggaggccgtggagctgctgctcgacatgggcgccgacgccaacgcccggaccaggcgcggcgccacgccgctccagatggcggaggccatggggtacgaggccatcgctcagctcctgtgcgcgagaggtgcggaggtggccgccgcgtcggcgttgtgcgccgcgtcgtcgtcttcatcgtccatatcgataaattacttcaaggaccagttagtcagacgattttccaagaaacgaaaaccctaccaaagaaacattttcatggagtttgtaacaaaaacccagaggatgacgtggagggagtcagagagacaaggactacatacatgcatgcctgatcaagcgcagaagaaaactatccccatccaagttcctcaactcttctctgtatctggaggtgtctgtcaagcgaccttcatccagaggagtgcttgctccagcaggatgggcccagaagcccagaacagcctggagataggagtaggacacaaatttcctacaatccgtgactaggcatacgacaaggttgacggaccaggagaggagataggacgcacgtgctgcccaggtccacacatttcgtcagataagagctatcagaac

SEQ ID NO: 74863 - DNA, 1696 bp, Zea Mays
gtgaaaagcgtcgtcctaggtagatagccacaccattccattgccccggcccccgggcactcctctccttccatactatactctcgcgcggcgagctcctcgagctcgctccccgttccaagctagctagaaaatggccgcggcggaagcagcctcctccgcgccggcgcccgagcatctcctggaggtggaggacgacgaggtgatgatcgacttcaagcccaacgccaagtgccgcgccgacctccgcctccgctccctgcacccgtccctccccgtcgccttcaaggtccagacctcctccccgctcaagttcctcgtcagcccgccgcgcggcgccgtgccgccgctctcctcggcgtccctgcgcgtcgtgctccgcccgcagccgcacgcgccgccgtccttcccgcgctcccgcgccgaccgcttcctcgtcctgtcctcgctctccgcggcgcgcctcgactccgtgggaagcagcaacgacggcggcggcggcgggggcggagtcagggccgtccgcctccgcgtgttcttcggcgggccgtaccttctccgcctcgccgcggacgccggagacgccgcggccgtgcgcctcatcctgcgccggcagccgcacctgctgccgttcctggagcaccagcaggccgccgcggcgcccgacgccggcgagcagcagtgggcgccgctgcacgcggcggccgccaggggggactgcggggagctgaggcggctggggcccgaggcgctggccgcgcgtgaccgcgaggggaggacggtcctgcacgcggtcgccgcggccggcgaggccgaggcggtggcggtgctggtggacatgggcgccgacacgtcggcggtcgacgcgcgcgggaggactccgctggacgtcgcgcgcgacaagggatactgtaacggcggaggtgttgtcaatttttgcccagtgcagcaagaagtggtggacgtcctggaacggtgggagctggtgatgacggcggcgaggcgaggcgacctcgggagcctcgagtccctgctcagcaagcgcgccggcgtccgcgggcgcgaccagtacggcctcacggcgctgcacctggccgcgatcaagggacacggcgacgcgatcgcgctgctcgccgggccgggatgcatggacgtcgagtgcgaggacgtggaagggcacaggccgctccacctcgccgtcgagggaggccacgcggaggccgtggagctgctgctcgacatgggcgccgacgccaacgcccggaccaggcgcggcgccacgccgctccagatggcggaggccatggggtacgaggccatcgctcagctcctgtgcgcgagaggtgcggaggtggccgccgcgtcggcgttgtgcgccgcgtcgtcgtcttcatcgtccatatcgtgcgcctgatttgctgccggttatcggttgggagagactgttggacggacacgaaggcttgtttgtttccgctgctgctcctgctgtgcgtgagccgagagatgcctacagccgccgtggctggctttaaagtaagaagaagcgaacccgtccgaaattgtactgtactgtatagtggtttgttctgctttgttgggagagtagctcattgttgagacggtcgattgctatacgcggcgtgctggtggaaaaaaaacattcgctatgcaattgcagtgctttacatgttcc

SEQ ID NO: 74864 - DNA, 5003 bp, Zea Mays
tgccattcacggttttgccttcgcttttgctttacgcgtacgcgcggcgaatcacggcgttcaccttccatccggactccgctccgcccgcgggttccccgccaaatctaatttctcgacccaaccctaacttccgcgacgtcgtggcgcctgccgaccgcctcgcggagacgggagacccaacgcggcctcttcgtgccggcgcggcccgacaagagcatcgtcgaggggcagatcatgcagcggcacgactttgtgaaccagcggtgcgccacgctccagcgctacctccgccgcctcgccgtcgtcggccatagccccgttctccacgcctccctcaccgccaccgggcccaacggcatacccacttccgacggtgggtctcctaggtggagccctccgatgagtgctgccacgtgcatggctgctgccgctccaatgacgcctacggagagtgggagtctgggcgagacttttttcgggtgttcaacgacctgaagcagacagtggcaaatgggttggtggcggtagcggtaagaccgcctccagtggaggaggagattgacacaaagtaccttgtgcacaaggccaagcttgaggacctggagaaacatctggtgacagcatctcagcaggtctcttgaaaatgtcattcgtcaaactggctaagtttgaaaaggagcaagctgcatgtagctcagaaaagacaagctgctggcatcagtaattttgccagtgctgttgttagagttaacagatcacaggcaaaactaaatgctgaaattctaaaacatctgatctatatttcttgcatactcgggcaggaaaacttgaatctgtatcatcgagaggaatggatcaggagagatcaaggtatcaaaaatagaagaattgaaagaaacagtgagagccatggaagatgcaaaaacacatgtacttgaagaattgggactaatcacggtagttcattcaaacttatgaaacaaagaaagtgtacatcatgtgttacaattaaaaactgcaatattgttattactcaaaacagacccacaagcataattctctatttggaaggaccaataatatggatacaaaaaacatgtctagattattcagtttgcagtacgttcgggatataatgtttagattttgtaacatgacgcctaacactagctaatagtccatctgtcccaaaatagaattcgttttagactaaacatacattaatgcaataacctatgaatatagtttgtttgtatgtttatattcattatcatttattcgaatatggatgagaaaaaagaggactaaaaagaactatattttgagacggagggagtattatatatttggataatccgctgaagcagtcaggttaaagctatttgttatagttgtttgtgctacagaattctcatcagccaacacttcttttgaccatgtccagttaacattattccaagttaagctcgcagaagctggatgagcaggatagcagctgacatgttgctaagcaaccaagagtccagattgtctgtttctgactattgtgatgtttgagctgtggtgaaagtatcaagaattttataatagatgcattgtcaatgaattttctgtttatgtattgaccttaacattttcaaacacaacctgctgcaactcaaatgctaggttatgctatcctgttgacaagatttaagctgtgccctcggttttgctggtgtcctcatttttacccttagtcgtgttttttgctcggttttgtctttctgttctatagcactggaaggacaaaactgagaaaaaacacgactaaggataaaaataaggacaccagcaaaaccgagggcaccatcttaaaaaacacgactaatgcaggaaaacaacatgaatgaaattaaaagatttaacaaggaaagacgccaggatttgttggagatgctgaaaggctttgtatccgatcaggccacatactcggaccattttgctagcatatggacaaaggtagcagaagaaacaaaaggatatgcaaaaagcagcagttgaagtacgatgttcatatacagggacacatttctatggacttttctgggaattggtatctccagcaatggatcgaatcttgcacgagctacaggcgtacaaagtactaaaaagaaagagctggcttctcccgaggctttgagcgcatctgaaatttcactgctagaatgtggcacgaaagaagtacagaatgtggacgacagcagtaaccaatcaaatgacttgacatagtcatcgcgcagtggcctaaatttgttgtgtccatacgaaacgcagagcagcttccttccatggcacgccatacactaatacaaccgtataggcatataaaatgagatgacttcttagagccagattgaagcttcgccaacgctttttacaccataaagctgaagagcgcccagcattgaagattttctgagttgttatgatcacagccatttttacaccatcatgggggtgaataccgtttgtgcattcagagaggagacggtcgaagaattctttgaaacctgcacagcattttacacgtgaagtttgatccaaagcattactggagattgtcatacggtcgggaaggatcaggattgtcgctggtgatacacaccttgtgcgcacttgaatccagagtgcattcaagagacggtctgatgtttcctgtggtactggtgctaccaaacgggctaactgtttgcacctttgcctttccaacgctggtgcagactagaggaatgtgggaagaatccatcgcagagatatttgttttgtgttagaatcatcaggtcgctatatctatgctcaaaagcctgaaaacaagaaggacaagctcctaacgaacgggcatctatcacctcgtgcacaggttctacctgttccttcaaatacagcgcagggatccatcaggctgtcacgctcgtgcaaccaaggcaccgccatacgggcttctgtggccctgtgccgctgcctcacgaatccagttcccgactctcatcaaccatcccacatgaacctaaagatgctacctcacactttggaccactgaaaaagacatccaaaagcccaacagtaaaaacagatgtgatgtgacagaaccagagatccgggcaccgtgcgctaccgaagtgccagacgtatcaaatgatcaaatggaggctatccgcagcagatgtctataactatatattacattatctatataataaaatttgaaatagaggatgagatagtgaacgtgataagatagctgctggaaacaactttatcgctccagcggaaaatgggaacaactatgcataaggccattctcagtagaagttttattagggctagtttggtgacaaagtaatcgaggagaattgtagagaattgtggggggagagggatgaattgatttgtcccttaatcctctcaatccccttttatcaaaccagcccttaaaatttttatggcattaattaatatgtcgcatgcgtaggatttttatggcatgggactacatttaatataaaataggtgaaattagtttcatcactatgaaactatgccaacatgtttccaagacattggaaagcgtacgaaaccactactaagagtgatttattttatctatttctattgattatttagatgcaacatttatgtcacgtgttagcctataaaattgtcataaaactcttcattgaaagaacatatttcattcttcatttcatcttactcttgttgatatggtaacattagaaatggtgaaaccaaactatcgctgagaatggcctattgtatcttattttttttgctacccaaagtaatgaaaatattgctttctgtatgccttgtttgggacgacttcacttcaaaaattgcaacttctgtttttcaacttcaccataaaacagcttcaatatattgttaaggtggatttcaagagtttttagcttgcacatggactccagcttctataatataattaatttgtgtgagtttcaataattacctttgatgattagtggactatgatgagttggggagagagacatggataagtagatcgtgtaaccaatggggtggtgggtaattttgtgtagcttcatgaggatgtatgaaaacaatgtttttaatgcaccatttgagaagctgcaaaaaaatcttgaaactaccctctagtttcatttttttaaaagctacaagtagtaaattcatgaagtgaagccctcccaaacccctcccaaacaggcccttacaagtatctcaagtttaataaatatttcaacacacaatataaatagatattattagactgattatgatatatatttatatatttaacatattaaatctactttaacaaaaaatgacaagttaagaattctgtctttatttgtatggagcaaatagataatataccataatttttattagtcagttgcccatatgttactacgatttctatattcagaatatttataatatttattctttgttgcacacaaatggttgtgagcccaaatgattacaatctaggcgtgggaggggcgggacggttcgaacaccagcaccggagatgacgcacgaagggagaaactcttacttaagctcttgtttagacacgagtattcacctcaatccacatgtattgagatagattagagtaaaacttaaactaatttatacctgaaactatttcaatgtatatgaattgaaggtgaatacgagagtattcaaataaggtctaaatacagtagagatatacactccgaatctatcacaccatttttgaccataggccaaaggccactagctagttgctagtttagaaacttaaatccttttgagatcccttcttctttttcagtgtgagaaatacctccagaaatacctctccgtatgtgcctcctctttcttccaaattagccctcgaggggcagagacgggtcaaaactccactgtgagcacaagtagtatag

SEQ ID NO: 74865 - DNA, 5100 bp, Zea Mays
cacggttttgccttcgcttttgctttacgcgtacgcgcggcgaatcacggcgttcaccttccatccggactccgctccgcccgcgggttccccgccaaatctaatttctcgacccaaccctaacttccgcgacgtcgtggcgcctgccgaccgcctcgcggagacgggagacccaacgcggcctcttcgtgccggcgcggcccgacaagagcatcgtcgaggggcagatcatgcagcggcacgactttgtgaaccagcggtgcgccacgctccagcgctacctccgccgcctcgccgtcgtcggccatagccccgttctccacgcctccctcaccgccaccgggcccaacggcatacccacttccgacggtgggtctcctaggtggagccctccgatgagtgctgccacgtgcatggctgctgccgctccaatgacgcctacggagagtgggagtctgggcgagacttttttcgggtgttcaacgacctgaagcagacagtggcaaatgggttggtggcggtagcggtaagaccgcctccagtggaggaggagattgacacaaagtaccttgtgcacaaggccaagcttgaggacctggagaaacatctggtgacagcatctcagcaggtctcttgaaaatgtcattcgtcaaactggctaagtttgaaaaggagcaagctgcatgtagctcagaaaagacaagctgctggcatcagtaattttgccagtgctgttgttagagttaacagatcacaggcaaaactaaatgctgaaattctaaaacatctgcagatctatatttcttgcatactcgggcaggaaaacttgaatctgtatcatcgagaggaatggatcaggagagatcaaggtatcaaaaatagaagaattgaaagaaacagtgagagccatggaagatgcaaaaacacatgtacttgaagaattgggactaatcacggtagttcattcaaacttatgaaacaaagaaagtgtacatcatgtgttacaattaaaaactgcaatattgttattactcaaaacagacccacaagcataattctctatttggaaggaccaataatatggatacaaaaaacatgtctagattattcagtttgcagtacgttcgggatataatgtttagattttgtaacatgacgcctaacactagctaatagtccatctgtcccaaaatagaattcgttttagactaaacatacattaatgcaataacctatgaatatagtttgtttgtatgtttatattcattatcatttattcgaatatggatgagaaaaaagaggactaaaaagaactatattttgagacggagggagtattatatatttggataatccgctgaagcagtcaggttaaagctatttgttatagttgtttgtgctacagaattctcatcagccaacacttcttttgaccatgtccagttaacattattccaagttaagctcgcagaagctggatgagcaggatagcagctgacatgttgctaagcaaccaagagtccagattgtctgtttctgactattgtgatgtttgagctgtggtgaaagtatcaagaattttataatagatgcattgtcaatgaattttctgtttatgtattgaccttaacattttcaaacacaacctgctgcaactcaaatgctaggttatgctatcctgttgacaagatttaagctgtgccctcggttttgctggtgtcctcatttttacccttagtcgtgttttttgctcggttttgtctttctgttctatagcactggaaggacaaaactgagaaaaaacacgactaaggataaaaataaggacaccagcaaaaccgagggcaccatcttaaaaaacacgactaatgcaggaaaacaacatgaatgaaattaaaagatttaacaaggaaagacgccaggatttgttggagatgctgaaaggctttgtatccgatcaggccacatactcggaccattttgctagcatatggacaaaggtagcagaagaaacaaaaggatatgcaaaaagcagcagttgaagtacgatgttcatatacaggtgaatttgagctgttattgtgcagcgtgaaaatagctacaccattgagaatcatgcgaccggcgtatagactgacaggaccacactctccattaccgaagggacacatttctatggacttttctgggaattggtatctccagcaatggatcgaatcttgcacgagctacaggcgtacaaagtactaaaaagaaagagctggcttctcccgaggctttgagcgcatctgaaatttcactgctagaatgtggcacgaaagaagtacagaatgtggacgacagcagtaaccaatcaaatgacttgacatagtcatcgcgcagtggcctaaatttgttgtgtccatacgaaacgcagagcagcttccttccatggcacgccatacactaatacaaccgtataggcatataaaatgagatgacttcttagagccagattgaagcttcgccaacgctttttacaccataaagctgaagagcgcccagcattgaagattttctgagttgttatgatcacagccatttttacaccatcatgggggtgaataccgtttgtgcattcagagaggagacggtcgaagaattctttgaaacctgcacagcattttacacgtgaagtttgatccaaagcattactggagattgtcatacggtcgggaaggatcaggattgtcgctggtgatacacaccttgtgcgcacttgaatccagagtgcattcaagagacggtctgatgtttcctgtggtactggtgctaccaaacgggctaactgtttgcacctttgcctttccaacgctggtgcagactagaggaatgtgggaagaatccatcgcagagatatttgttttgtgttagaatcatcaggtcgctatatctatgctcaaaagcctgaaaacaagaaggacaagctcctaacgaacgggcatctatcacctcgtgcacaggttctacctgttccttcaaatacagcgcagggatccatcaggctgtcacgctcgtgcaaccaaggcaccgccatacgggcttctgtggccctgtgccgctgcctcacgaatccagttcccgactctcatcaaccatcccacatgaacctaaagatgctacctcacactttggaccactgaaaaagacatccaaaagcccaacagtaaaaacagatgtgatgtgacagaaccagagatccgggcaccgtgcgctaccgaagtgccagacgtatcaaatgatcaaatggaggctatccgcagcagatgtctataactatatattacattatctatataataaaatttgaaatagaggatgagatagtgaacgtgataagatagctgctggaaacaactttatcgctccagcggaaaatgggaacaactatgcataaggccattctcagtagaagttttattagggctagtttggtgacaaagtaatcgaggagaattgtagagaattgtggggggagagggatgaattgatttgtcccttaatcctctcaatccccttttatcaaaccagcccttaaaatttttatggcattaattaatatgtcgcatgcgtaggatttttatggcatgggactacatttaatataaaataggtgaaattagtttcatcactatgaaactatgccaacatgtttccaagacattggaaagcgtacgaaaccactactaagagtgatttattttatctatttctattgattatttagatgcaacatttatgtcacgtgttagcctataaaattgtcataaaactcttcattgaaagaacatatttcattcttcatttcatcttactcttgttgatatggtaacattagaaatggtgaaaccaaactatcgctgagaatggcctattgtatcttattttttttgctacccaaagtaatgaaaatattgctttctgtatgccttgtttgggacgacttcacttcaaaaattgcaacttctgtttttcaacttcaccataaaacagcttcaatatattgttaaggtggatttcaagagtttttagcttgcacatggactccagcttctataatataattaatttgtgtgagtttcaataattacctttgatgattagtggactatgatgagttggggagagagacatggataagtagatcgtgtaaccaatggggtggtgggtaattttgtgtagcttcatgaggatgtatgaaaacaatgtttttaatgcaccatttgagaagctgcaaaaaaatcttgaaactaccctctagtttcatttttttaaaagctacaagtagtaaattcatgaagtgaagccctcccaaacccctcccaaacaggcccttacaagtatctcaagtttaataaatatttcaacacacaatataaatagatattattagactgattatgatatatatttatatatttaacatattaaatctactttaacaaaaaatgacaagttaagaattctgtctttatttgtatggagcaaatagataatataccataatttttattagtcagttgcccatatgttactacgatttctatattcagaatatttataatatttattctttgttgcacacaaatggttgtgagcccaaatgattacaatctaggcgtgggaggggcgggacggttcgaacaccagcaccggagatgacgcacgaagggagaaactcttacttaagctcttgtttagacacgagtattcacctcaatccacatgtattgagatagattagagtaaaacttaaactaatttatacctgaaactatttcaatgtatatgaattgaaggtgaatacgagagtattcaaataaggtctaaatacagtagagatatacactccgaatctatcacaccatttttgaccataggccaaaggccactagctagttgctagtttagaaacttaaatccttttgagatcccttcttctttttcagtgtgagaaatacctccagaaatacctctccgtatgtgcctcctctttcttccaaattagccctcgaggggcagagacgggtcaaaactccactgtgagcacaagtagtatag

SEQ ID NO: 74866 - DNA, 5199 bp, Zea Mays
cgcgcggcgaatcacggcgttcaccttccatccggactccgctccgcccgcgggttccccgccaaatctaatttctcgacccaaccctaacttccgcgacgtcgtggcgcctgccgaccgcctcgcggagacgggagacccaacgcggcctcttcgtgccggcgcggcccgacaagagcatcgtcgaggggcagatcatgcagcggcacgactttgtgaaccagcggtgcgccacgctccagcgctacctccgccgcctcgccgtcgtcggccatagccccgttctccacgcctccctcaccgccaccgggcccaacggcatacccacttccgacggtgggtctcctaggtggagccctccgatgagtgctgccacgtgcatggctgctgccgctccaatgacgcctacggagagtgggagtctgggcgagacttttttcgggtgttcaacgacctgaagcagacagtggcaaatgggttggtggcggtagcggtaagaccgcctccagtggaggaggagattgacacaaagtaccttgtgcacaaggccaagcttgaggacctggagaaacatctggtgacagcatctcagcaggtctcttgaaaatgtcattcgtcaaactggctaagtttgaaaaggagcaagctgcatgtagctcagaaaagacaagctgctggcatcagtaattttgccagtgctgttgttagagttaacagatcacaggcaaaactaaatgctgaaattctaaaacatctggtaagtggagtgacttgagcgaatgaatatttgcttggtcatatacttttaggattattggtttaccccttttattttgatatgttctgtgcttttgcaaggcattatccatgagtacatggactcatggagacaatggcttctgttcataatgcttttactgatcgttccaatgctttgctgcatgtgcaaaatttgtcagcagatctatatttcttgcatactcgggcaggaaaacttgaatctgtatcatcgagaggaatggatcaggagagatcaaggtatcaaaaatagaagaattgaaagaaacagtgagagccatggaagatgcaaaaacacatgtacttgaagaattgggactaatcacggtagttcattcaaacttatgaaacaaagaaagtgtacatcatgtgttacaattaaaaactgcaatattgttattactcaaaacagacccacaagcataattctctatttggaaggaccaataatatggatacaaaaaacatgtctagattattcagtttgcagtacgttcgggatataatgtttagattttgtaacatgacgcctaacactagctaatagtccatctgtcccaaaatagaattcgttttagactaaacatacattaatgcaataacctatgaatatagtttgtttgtatgtttatattcattatcatttattcgaatatggatgagaaaaaagaggactaaaaagaactatattttgagacggagggagtattatatatttggataatccgctgaagcagtcaggttaaagctatttgttatagttgtttgtgctacagaattctcatcagccaacacttcttttgaccatgtccagttaacattattccaagttaagctcgcagaagctggatgagcaggatagcagctgacatgttgctaagcaaccaagagtccagattgtctgtttctgactattgtgatgtttgagctgtggtgaaagtatcaagaattttataatagatgcattgtcaatgaattttctgtttatgtattgaccttaacattttcaaacacaacctgctgcaactcaaatgctaggttatgctatcctgttgacaagatttaagctgtgccctcggttttgctggtgtcctcatttttacccttagtcgtgttttttgctcggttttgtctttctgttctatagcactggaaggacaaaactgagaaaaaacacgactaaggataaaaataaggacaccagcaaaaccgagggcaccatcttaaaaaacacgactaatgcaggaaaacaacatgaatgaaattaaaagatttaacaaggaaagacgccaggatttgttggagatgctgaaaggctttgtatccgatcaggccacatactcggaccattttgctagcatatggacaaaggtagcagaagaaacaaaaggatatgcaaaaagcagcagttgaagtacgatgttcatatacagactgacaggaccacactctccattaccgaagggacacatttctatggacttttctgggaattggtatctccagcaatggatcgaatcttgcacgagctacaggcgtacaaagtactaaaaagaaagagctggcttctcccgaggctttgagcgcatctgaaatttcactgctagaatgtggcacgaaagaagtacagaatgtggacgacagcagtaaccaatcaaatgacttgacatagtcatcgcgcagtggcctaaatttgttgtgtccatacgaaacgcagagcagcttccttccatggcacgccatacactaatacaaccgtataggcatataaaatgagatgacttcttagagccagattgaagcttcgccaacgctttttacaccataaagctgaagagcgcccagcattgaagattttctgagttgttatgatcacagccatttttacaccatcatgggggtgaataccgtttgtgcattcagagaggagacggtcgaagaattctttgaaacctgcacagcattttacacgtgaagtttgatccaaagcattactggagattgtcatacggtcgggaaggatcaggattgtcgctggtgatacacaccttgtgcgcacttgaatccagagtgcattcaagagacggtctgatgtttcctgtggtactggtgctaccaaacgggctaactgtttgcacctttgcctttccaacgctggtgcagactagaggaatgtgggaagaatccatcgcagagatatttgttttgtgttagaatcatcaggtcgctatatctatgctcaaaagcctgaaaacaagaaggacaagctcctaacgaacgggcatctatcacctcgtgcacaggttctacctgttccttcaaatacagcgcagggatccatcaggctgtcacgctcgtgcaaccaaggcaccgccatacgggcttctgtggccctgtgccgctgcctcacgaatccagttcccgactctcatcaaccatcccacatgaacctaaagatgctacctcacactttggaccactgaaaaagacatccaaaagcccaacagtaaaaacagatgtgatgtgacagaaccagagatccgggcaccgtgcgctaccgaagtgccagacgtatcaaatgatcaaatggaggctatccgcagcagatgtctataactatatattacattatctatataataaaatttgaaatagaggatgagatagtgaacgtgataagatagctgctggaaacaactttatcgctccagcggaaaatgggaacaactatgcataaggccattctcagtagaagttttattagggctagtttggtgacaaagtaatcgaggagaattgtagagaattgtggggggagagggatgaattgatttgtcccttaatcctctcaatccccttttatcaaaccagcccttaaaatttttatggcattaattaatatgtcgcatgcgtaggatttttatggcatgggactacatttaatataaaataggtgaaattagtttcatcactatgaaactatgccaacatgtttccaagacattggaaagcgtacgaaaccactactaagagtgatttattttatctatttctattgattatttagatgcaacatttatgtcacgtgttagcctataaaattgtcataaaactcttcattgaaagaacatatttcattcttcatttcatcttactcttgttgatatggtaacattagaaatggtgaaaccaaactatcgctgagaatggcctattgtatcttattttttttgctacccaaagtaatgaaaatattgctttctgtatgccttgtttgggacgacttcacttcaaaaattgcaacttctgtttttcaacttcaccataaaacagcttcaatatattgttaaggtggatttcaagagtttttagcttgcacatggactccagcttctataatataattaatttgtgtgagtttcaataattacctttgatgattagtggactatgatgagttggggagagagacatggataagtagatcgtgtaaccaatggggtggtgggtaattttgtgtagcttcatgaggatgtatgaaaacaatgtttttaatgcaccatttgagaagctgcaaaaaaatcttgaaactaccctctagtttcatttttttaaaagctacaagtagtaaattcatgaagtgaagccctcccaaacccctcccaaacaggcccttacaagtatctcaagtttaataaatatttcaacacacaatataaatagatattattagactgattatgatatatatttatatatttaacatattaaatctactttaacaaaaaatgacaagttaagaattctgtctttatttgtatggagcaaatagataatataccataatttttattagtcagttgcccatatgttactacgatttctatattcagaatatttataatatttattctttgttgcacacaaatggttgtgagcccaaatgattacaatctaggcgtgggaggggcgggacggttcgaacaccagcaccggagatgacgcacgaagggagaaactcttacttaagctcttgtttagacacgagtattcacctcaatccacatgtattgagatagattagagtaaaacttaaactaatttatacctgaaactatttcaatgtatatgaattgaaggtgaatacgagagtattcaaataaggtctaaatacagtagagatatacactccgaatctatcacaccatttttgaccataggccaaaggccactagctagttgctagtttagaaacttaaatccttttgagatcccttcttctttttcagtgtgagaaatacctccagaaatacctctccgtatgtgcctcctctttcttccaaattagccctcgaggggcagagacgggtcaaaactccactgtgagcacaagtagtatag

SEQ ID NO: 74867 - DNA, 4967 bp, Zea Mays
cgcgcggcgaatcacggcgttcaccttccatccggactccgctccgcccgcgggttccccgccaaatctaatttctcgacccaaccctaacttccgcgacgtcgtggcgcctgccgaccgcctcgcggagacgggagacccaacgcggcctcttcgtgccggcgcggcccgacaagagcatcgtcgaggggcagatcatgcagcggcacgactttgtgaaccagcggtgcgccacgctccagcgctacctccgccgcctcgccgtcgtcggccatagccccgttctccacgcctccctcaccgccaccgggcccaacggcatacccacttccgacggtgggtctcctaggtggagccctccgatgagtgctgccacgtgcatggctgctgccgctccaatgacgcctacggagagtgggagtctgggcgagacttttttcgggtgttcaacgacctgaagcagacagtggcaaatgggttggtggcggtagcggtaagaccgcctccagtggaggaggagattgacacaaagtaccttgtgcacaaggccaagcttgaggacctggagaaacatctggtgacagcatctcagcaggtctcttgaaaatgtcattcgtcaaactggctaagtttgaaaaggagcaagctgcatgtagctcagaaaagacaagctgctggcatcagtaattttgccagtgctgttgttagagttaacagatcacaggcaaaactaaatgctgaaattctaaaacatctggaaaacttgaatctgtatcatcgagaggaatggatcaggagagatcaaggtatcaaaaatagaagaattgaaagaaacagtgagagccatggaagatgcaaaaacacatgtacttgaagaattgggactaatcacggtagttcattcaaacttatgaaacaaagaaagtgtacatcatgtgttacaattaaaaactgcaatattgttattactcaaaacagacccacaagcataattctctatttggaaggaccaataatatggatacaaaaaacatgtctagattattcagtttgcagtacgttcgggatataatgtttagattttgtaacatgacgcctaacactagctaatagtccatctgtcccaaaatagaattcgttttagactaaacatacattaatgcaataacctatgaatatagtttgtttgtatgtttatattcattatcatttattcgaatatggatgagaaaaaagaggactaaaaagaactatattttgagacggagggagtattatatatttggataatccgctgaagcagtcaggttaaagctatttgttatagttgtttgtgctacagaattctcatcagccaacacttcttttgaccatgtccagttaacattattccaagttaagctcgcagaagctggatgagcaggatagcagctgacatgttgctaagcaaccaagagtccagattgtctgtttctgactattgtgatgtttgagctgtggtgaaagtatcaagaattttataatagatgcattgtcaatgaattttctgtttatgtattgaccttaacattttcaaacacaacctgctgcaactcaaatgctaggttatgctatcctgttgacaagatttaagctgtgccctcggttttgctggtgtcctcatttttacccttagtcgtgttttttgctcggttttgtctttctgttctatagcactggaaggacaaaactgagaaaaaacacgactaaggataaaaataaggacaccagcaaaaccgagggcaccatcttaaaaaacacgactaatgcaggaaaacaacatgaatgaaattaaaagatttaacaaggaaagacgccaggatttgttggagatgctgaaaggctttgtatccgatcaggccacatactcggaccattttgctagcatatggacaaaggtagcagaagaaacaaaaggatatgcaaaaagcagcagttgaagtacgatgttcatatacagactgacaggaccacactctccattaccgaagggacacatttctatggacttttctgggaattggtatctccagcaatggatcgaatcttgcacgagctacaggcgtacaaagtactaaaaagaaagagctggcttctcccgaggctttgagcgcatctgaaatttcactgctagaatgtggcacgaaagaagtacagaatgtggacgacagcagtaaccaatcaaatgacttgacatagtcatcgcgcagtggcctaaatttgttgtgtccatacgaaacgcagagcagcttccttccatggcacgccatacactaatacaaccgtataggcatataaaatgagatgacttcttagagccagattgaagcttcgccaacgctttttacaccataaagctgaagagcgcccagcattgaagattttctgagttgttatgatcacagccatttttacaccatcatgggggtgaataccgtttgtgcattcagagaggagacggtcgaagaattctttgaaacctgcacagcattttacacgtgaagtttgatccaaagcattactggagattgtcatacggtcgggaaggatcaggattgtcgctggtgatacacaccttgtgcgcacttgaatccagagtgcattcaagagacggtctgatgtttcctgtggtactggtgctaccaaacgggctaactgtttgcacctttgcctttccaacgctggtgcagactagaggaatgtgggaagaatccatcgcagagatatttgttttgtgttagaatcatcaggtcgctatatctatgctcaaaagcctgaaaacaagaaggacaagctcctaacgaacgggcatctatcacctcgtgcacaggttctacctgttccttcaaatacagcgcagggatccatcaggctgtcacgctcgtgcaaccaaggcaccgccatacgggcttctgtggccctgtgccgctgcctcacgaatccagttcccgactctcatcaaccatcccacatgaacctaaagatgctacctcacactttggaccactgaaaaagacatccaaaagcccaacagtaaaaacagatgtgatgtgacagaaccagagatccgggcaccgtgcgctaccgaagtgccagacgtatcaaatgatcaaatggaggctatccgcagcagatgtctataactatatattacattatctatataataaaatttgaaatagaggatgagatagtgaacgtgataagatagctgctggaaacaactttatcgctccagcggaaaatgggaacaactatgcataaggccattctcagtagaagttttattagggctagtttggtgacaaagtaatcgaggagaattgtagagaattgtggggggagagggatgaattgatttgtcccttaatcctctcaatccccttttatcaaaccagcccttaaaatttttatggcattaattaatatgtcgcatgcgtaggatttttatggcatgggactacatttaatataaaataggtgaaattagtttcatcactatgaaactatgccaacatgtttccaagacattggaaagcgtacgaaaccactactaagagtgatttattttatctatttctattgattatttagatgcaacatttatgtcacgtgttagcctataaaattgtcataaaactcttcattgaaagaacatatttcattcttcatttcatcttactcttgttgatatggtaacattagaaatggtgaaaccaaactatcgctgagaatggcctattgtatcttattttttttgctacccaaagtaatgaaaatattgctttctgtatgccttgtttgggacgacttcacttcaaaaattgcaacttctgtttttcaacttcaccataaaacagcttcaatatattgttaaggtggatttcaagagtttttagcttgcacatggactccagcttctataatataattaatttgtgtgagtttcaataattacctttgatgattagtggactatgatgagttggggagagagacatggataagtagatcgtgtaaccaatggggtggtgggtaattttgtgtagcttcatgaggatgtatgaaaacaatgtttttaatgcaccatttgagaagctgcaaaaaaatcttgaaactaccctctagtttcatttttttaaaagctacaagtagtaaattcatgaagtgaagccctcccaaacccctcccaaacaggcccttacaagtatctcaagtttaataaatatttcaacacacaatataaatagatattattagactgattatgatatatatttatatatttaacatattaaatctactttaacaaaaaatgacaagttaagaattctgtctttatttgtatggagcaaatagataatataccataatttttattagtcagttgcccatatgttactacgatttctatattcagaatatttataatatttattctttgttgcacacaaatggttgtgagcccaaatgattacaatctaggcgtgggaggggcgggacggttcgaacaccagcaccggagatgacgcacgaagggagaaactcttacttaagctcttgtttagacacgagtattcacctcaatccacatgtattgagatagattagagtaaaacttaaactaatttatacctgaaactatttcaatgtatatgaattgaaggtgaatacgagagtattcaaataaggtctaaatacagtagagatatacactccgaatctatcacaccatttttgaccataggccaaaggccactagctagttgctagtttagaaacttaaatccttttgagatcccttcttctttttcagtgtgagaaatacctccagaaatacctctccgtatgtgcctcctctttcttccaaattagccctcgaggggcagagacgggtcaaaactccactgtgagcacaagtagtatag

SEQ ID NO: 74868 - DNA, 4902 bp, Zea Mays
cgcgcggcgaatcacggcgttcaccttccatccggactccgctccgcccgcgggttccccgccaaatctaatttctcgacccaaccctaacttccgcgacgtcgtggcgcctgccgaccgcctcgcggagacgggagacccaacgcggcctcttcgtgccggcgcggcccgacaagagcatcgtcgaggggcagatcatgcagcggcacgactttgtgaaccagcggtgcgccacgctccagcgctacctccgccgcctcgccgtcgtcggccatagccccgttctccacgcctccctcaccgccaccgggcccaacggcatacccacttccgacggtgggtctcctaggtggagccctccgatgagtgctgccacgtgcatggctgctgccgctccaatgacgcctacggagagtgggagtctgggcgagacttttttcgggtgttcaacgacctgaagcagacagtggcaaatgggttggtggcggtagcggtaagaccgcctccagtggaggaggagattgacacaaagtaccttgtgcacaaggccaagcttgaggacctggagaaacatctggtgacagcatctcagcagatctatatttcttgcatactcgggcaggaaaacttgaatctgtatcatcgagaggaatggatcaggagagatcaaggtatcaaaaatagaagaattgaaagaaacagtgagagccatggaagatgcaaaaacacatgtacttgaagaattgggactaatcacggtagttcattcaaacttatgaaacaaagaaagtgtacatcatgtgttacaattaaaaactgcaatattgttattactcaaaacagacccacaagcataattctctatttggaaggaccaataatatggatacaaaaaacatgtctagattattcagtttgcagtacgttcgggatataatgtttagattttgtaacatgacgcctaacactagctaatagtccatctgtcccaaaatagaattcgttttagactaaacatacattaatgcaataacctatgaatatagtttgtttgtatgtttatattcattatcatttattcgaatatggatgagaaaaaagaggactaaaaagaactatattttgagacggagggagtattatatatttggataatccgctgaagcagtcaggttaaagctatttgttatagttgtttgtgctacagaattctcatcagccaacacttcttttgaccatgtccagttaacattattccaagttaagctcgcagaagctggatgagcaggatagcagctgacatgttgctaagcaaccaagagtccagattgtctgtttctgactattgtgatgtttgagctgtggtgaaagtatcaagaattttataatagatgcattgtcaatgaattttctgtttatgtattgaccttaacattttcaaacacaacctgctgcaactcaaatgctaggttatgctatcctgttgacaagatttaagctgtgccctcggttttgctggtgtcctcatttttacccttagtcgtgttttttgctcggttttgtctttctgttctatagcactggaaggacaaaactgagaaaaaacacgactaaggataaaaataaggacaccagcaaaaccgagggcaccatcttaaaaaacacgactaatgcaggaaaacaacatgaatgaaattaaaagatttaacaaggaaagacgccaggatttgttggagatgctgaaaggctttgtatccgatcaggccacatactcggaccattttgctagcatatggacaaaggtagcagaagaaacaaaaggatatgcaaaaagcagcagttgaagtacgatgttcatatacaggtgaatttgagctgttattgtgcagcgtgaaaatagctacaccattgagaatcatgcgaccggcgtatagactgacaggaccacactctccattaccgaagggacacatttctatggacttttctgggaattggtatctccagcaatggatcgaatcttgcacgagctacaggcgtacaaagtactaaaaagaaagagctggcttctcccgaggctttgagcgcatctgaaatttcactgctagaatgtggcacgaaagaagtacagaatgtggacgacagcagtaaccaatcaaatgacttgacatagtcatcgcgcagtggcctaaatttgttgtgtccatacgaaacgcagagcagcttccttccatggcacgccatacactaatacaaccgtataggcatataaaatgagatgacttcttagagccagattgaagcttcgccaacgctttttacaccataaagctgaagagcgcccagcattgaagattttctgagttgttatgatcacagccatttttacaccatcatgggggtgaataccgtttgtgcattcagagaggagacggtcgaagaattctttgaaacctgcacagcattttacacgtgaagtttgatccaaagcattactggagattgtcatacggtcgggaaggatcaggattgtcgctggtgatacacaccttgtgcgcacttgaatccagagtgcattcaagagacggtctgatgtttcctgtggtactggtgctaccaaacgggctaactgtttgcacctttgcctttccaacgctggtgcagactagaggaatgtgggaagaatccatcgcagagatatttgttttgtgttagaatcatcaggtcgctatatctatgctcaaaagcctgaaaacaagaaggacaagctcctaacgaacgggcatctatcacctcgtgcacaggttctacctgttccttcaaatacagcgcagggatccatcaggctgtcacgctcgtgcaaccaaggcaccgccatacgggcttctgtggccctgtgccgctgcctcacgaatccagttcccgactctcatcaaccatcccacatgaacctaaagatgctacctcacactttggaccactgaaaaagacatccaaaagcccaacagtaaaaacagatgtgatgtgacagaaccagagatccgggcaccgtgcgctaccgaagtgccagacgtatcaaatgatcaaatggaggctatccgcagcagatgtctataactatatattacattatctatataataaaatttgaaatagaggatgagatagtgaacgtgataagatagctgctggaaacaactttatcgctccagcggaaaatgggaacaactatgcataaggccattctcagtagaagttttattagggctagtttggtgacaaagtaatcgaggagaattgtagagaattgtggggggagagggatgaattgatttgtcccttaatcctctcaatccccttttatcaaaccagcccttaaaatttttatggcattaattaatatgtcgcatgcgtaggatttttatggcatgggactacatttaatataaaataggtgaaattagtttcatcactatgaaactatgccaacatgtttccaagacattggaaagcgtacgaaaccactactaagagtgatttattttatctatttctattgattatttagatgcaacatttatgtcacgtgttagcctataaaattgtcataaaactcttcattgaaagaacatatttcattcttcatttcatcttactcttgttgatatggtaacattagaaatggtgaaaccaaactatcgctgagaatggcctattgtatcttattttttttgctacccaaagtaatgaaaatattgctttctgtatgccttgtttgggacgacttcacttcaaaaattgcaacttctgtttttcaacttcaccataaaacagcttcaatatattgttaaggtggatttcaagagtttttagcttgcacatggactccagcttctataatataattaatttgtgtgagtttcaataattacctttgatgattagtggactatgatgagttggggagagagacatggataagtagatcgtgtaaccaatggggtggtgggtaattttgtgtagcttcatgaggatgtatgaaaacaatgtttttaatgcaccatttgagaagctgcaaaaaaatcttgaaactaccctctagtttcatttttttaaaagctacaagtagtaaattcatgaagtgaagccctcccaaacccctcccaaacaggcccttacaagtatctcaagtttaataaatatttcaacacacaatataaatagatattattagactgattatgatatatatttatatatttaacatattaaatctactttaacaaaaaatgacaagttaagaattctgtctttatttgtatggagcaaatagataatataccataatttttattagtcagttgcccatatgttactacgatttctatattcagaatatttataatatttattctttgttgcacacaaatggttgtgagcccaaatgattacaatctaggcgtgggaggggcgggacggttcgaacaccagcaccggagatgacgcacgaagggagaaactcttacttaagctcttgtttagacacgagtattcacctcaatccacatgtattgagatagattagagtaaaacttaaactaatttatacctgaaactatttcaatgtatatgaattgaaggtgaatacgagagtattcaaataaggtctaaatacagtagagatatacactccgaatctatcacaccatttttgaccataggccaaaggccactagctagttgctagtttagaaacttaaatccttttgagatcccttcttctttttcagtgtgagaaatacctccagaaatacctctccgtatgtgcctcctctttcttccaaattagccctcgaggggcagagacgggtcaaaactccactgtgagcacaagtagtatag

SEQ ID NO: 74869 - DNA, 2821 bp, Zea Mays
cgcgcggcgaatcacggcgttcaccttccatccggactccgctccgcccgcgggttccccgccaaatctaatttctcgacccaaccctaacttccgcgacgtcgtggcgcctgccgaccgcctcgcggagacgggagacccaacgcggcctcttcgtgccggcgcggcccgacaagagcatcgtcgaggggcagatcatgcagcggcacgactttgtgaaccagcggtgcgccacgctccagcgctacctccgccgcctcgccgtcgtcggccatagccccgttctccacgcctccctcaccgccaccgggcccaacggcatacccacttccgacggtgggtctcctaggtggagccctccgatgagtgctgccacgtgcatggctgctgccgctccaatgacgcctacggagagtgggagtctgggcgagacttttttcgggtgttcaacgacctgaagcagacagtggcaaatgggttggtggcggtagcggtaagaccgcctccagtggaggaggagattgacacaaagtaccttgtgcacaaggccaagcttgaggacctggagaaacatctggtgacagcatctcagcaggtctcttgaaaatgtcattcgtcaaactggctaagtttgaaaaggagcaagctgcatgtagctcagaaaagacaagctgctggcatcagtaattttgccagtgctgttgttagagttaacagatcacaggcaaaactaaatgctgaaattctaaaacatctggtaagtggagtgacttgagcgaatgaatatttgcttggtcatatacttttaggattattggtttaccccttttattttgatatgttctgtgcttttgcaaggcattatccatgagtacatggactcatggagacaatggcttctgttcataatgcttttactgatcgttccaatgctttgctgcatgtgcaaaatttgtcagcagatctatatttcttgcatactcgggcaggaaaacttgaatctgtatcatcgagaggaatggatcaggagagatcaaggtatcaaaaatagaagaattgaaagaaacagtgagagccatggaagatgcaaaaacacatgtacttgaagaattgggactaatcacggtagttcattcaaacttatgaaacaaagaaagtgtacatcatgtgttacaattaaaaactgcaatattgttattactcaaaacagacccacaagcataattctctatttggaaggaccaataatatggatacaaaaaacatgtctagattattcagtttgcagtacgttcgggatataatgtttagattttgtaacatgacgcctaacactagctaatagtccatctgtcccaaaatagaattcgttttagactaaacatacattaatgcaataacctatgaatatagtttgtttgtatgtttatattcattatcatttattcgaatatggatgagaaaaaagaggactaaaaagaactatattttgagacggagggagtattatatatttggataatccgctgaagcagtcaggttaaagctatttgttatagttgtttgtgctacagaattctcatcagccaacacttcttttgaccatgtccagttaacattattccaagttaagctcgcagaagctggatgagcaggatagcagctgacatgttgctaagcaaccaagagtccagattgtctgtttctgactattgtgatgtttgagctgtggtgaaagtatcaagaattttataatagatgcattgtcaatgaattttctgtttatgtattgaccttaacattttcaaacacaacctgctgcaactcaaatgctaggttatgctatcctgttgacaagatttaagctgtgccctcggttttgctggtgtcctcatttttacccttagtcgtgttttttgctcggttttgtctttctgttctatagcactggaaggacaaaactgagaaaaaacacgactaaggataaaaataaggacaccagcaaaaccgagggcaccatcttaaaaaacacgactaatgcaggaaaacaacatgaatgaaattaaaagatttaacaaggaaagacgccaggatttgttggagatgctgaaaggctttgtatccgatcaggccacatactcggaccattttgctagcatatggacaaaggtagcagaagaaacaaaaggatatgcaaaaagcagcagttgaagtacgatgttcatatacaggtactcctatctgatattctgacgaagacggcggggcggtcggtggccgtacggtggcggttggatgcgcctccgagtccgagcccgcacgaagcttcgtggcagcttccagttcctcctcactgtcatgggatgggcgcatggcagcaccctctccatttgtccagtacagctatttggagctgccgcgtgcacgtggagacggcgcaccgctcgcggtgggtcgatctgtcagtgttgctcacgcgcatcgcctgcccgacgtcgcgtgtactatactatttatgatatgtagtaggcaggcatgtagcatggcaggcaagtgacgaccgacccagtcatggcctcgcgccgcgtttaaggtttgcacgcggcgattgcttatctggattccccggccgccaactgcgctgcacgttgatagcagatcagcagcctctatcgaaacctaggatttatagtcaagacgatccatcgatctggattgtgagcactcctcaaaaaaaaattatagaacggtacatatatgattatagatcgaacgcgctttttgatacattgatcaacatgattttgtatctctgtcgtcc

SEQ ID NO: 74870 - DNA, 3326 bp, Zea Mays
gcagattttgtgttattgcatgtattgcatgcttgtgtgtgtccatgtgtgttgaggggaacagccaggcagcagaacttgaaaccttccaatgcagtctctgcttggctgatatgctggaaaagcagcggagttaagacttgtcggaccatttgaattgcttggatctagtgttcatctgcacatggccacatactcggaccattttgctagcatatggacaaaggtagcagaagaaacaaaaggatatgcaaaaagcagcagttgaagtacgatgttcatatacaggtgaatttgagctgttattgtgcagcgtgaaaatagctacaccattgagaatcatgcgaccggcgtatagactgacaggaccacactctccattaccgaagggacacatttctatggacttttctgggaattggtatctccagcaatggatcgaatcttgcacgagctacaggcgtacaaagtactaaaaagaaagagctggcttctcccgaggctttgagcgcatctgaaatttcactgctagaatgtggcacgaaagaagtacagaatgtggacgacagcagtaaccaatcaaatgacttgacatagtcatcgcgcagtggcctaaatttgttgtgtccatacgaaacgcagagcagcttccttccatggcacgccatacactaatacaaccgtataggcatataaaatgagatgacttcttagagccagattgaagcttcgccaacgctttttacaccataaagctgaagagcgcccagcattgaagattttctgagttgttatgatcacagccatttttacaccatcatgggggtgaataccgtttgtgcattcagagaggagacggtcgaagaattctttgaaacctgcacagcattttacacgtgaagtttgatccaaagcattactggagattgtcatacggtcgggaaggatcaggattgtcgctggtgatacacaccttgtgcgcacttgaatccagagtgcattcaagagacggtctgatgtttcctgtggtactggtgctaccaaacgggctaactgtttgcacctttgcctttccaacgctggtgcagactagaggaatgtgggaagaatccatcgcagagatatttgttttgtgttagaatcatcaggtcgctatatctatgctcaaaagcctgaaaacaagaaggacaagctcctaacgaacgggcatctatcacctcgtgcacaggttctacctgttccttcaaatacagcgcagggatccatcaggctgtcacgctcgtgcaaccaaggcaccgccatacgggcttctgtggccctgtgccgctgcctcacgaatccagttcccgactctcatcaaccatcccacatgaacctaaagatgctacctcacactttggaccactgaaaaagacatccaaaagcccaacagtaaaaacagatgtgatgtgacagaaccagagatccgggcaccgtgcgctaccgaagtgccagacgtatcaaatgatcaaatggaggctatccgcagcagatgtctataactatatattacattatctatataataaaatttgaaatagaggatgagatagtgaacgtgataagatagctgctggaaacaactttatcgctccagcggaaaatgggaacaactatgcataaggccattctcagtagaagttttattagggctagtttggtgacaaagtaatcgaggagaattgtagagaattgtggggggagagggatgaattgatttgtcccttaatcctctcaatccccttttatcaaaccagcccttaaaatttttatggcattaattaatatgtcgcatgcgtaggatttttatggcatgggactacatttaatataaaataggtgaaattagtttcatcactatgaaactatgccaacatgtttccaagacattggaaagcgtacgaaaccactactaagagtgatttattttatctatttctattgattatttagatgcaacatttatgtcacgtgttagcctataaaattgtcataaaactcttcattgaaagaacatatttcattcttcatttcatcttactcttgttgatatggtaacattagaaatggtgaaaccaaactatcgctgagaatggcctattgtatcttattttttttgctacccaaagtaatgaaaatattgctttctgtatgccttgtttgggacgacttcacttcaaaaattgcaacttctgtttttcaacttcaccataaaacagcttcaatatattgttaaggtggatttcaagagtttttagcttgcacatggactccagcttctataatataattaatttgtgtgagtttcaataattacctttgatgattagtggactatgatgagttggggagagagacatggataagtagatcgtgtaaccaatggggtggtgggtaattttgtgtagcttcatgaggatgtatgaaaacaatgtttttaatgcaccatttgagaagctgcaaaaaaatcttgaaactaccctctagtttcatttttttaaaagctacaagtagtaaattcatgaagtgaagccctcccaaacccctcccaaacaggcccttacaagtatctcaagtttaataaatatttcaacacacaatataaatagatattattagactgattatgatatatatttatatatttaacatattaaatctactttaacaaaaaatgacaagttaagaattctgtctttatttgtatggagcaaatagataatataccataatttttattagtcagttgcccatatgttactacgatttctatattcagaatatttataatatttattctttgttgcacacaaatggttgtgagcccaaatgattacaatctaggcgtgggaggggcgggacggttcgaacaccagcaccggagatgacgcacgaagggagaaactcttacttaagctcttgtttagacacgagtattcacctcaatccacatgtattgagatagattagagtaaaacttaaactaatttatacctgaaactatttcaatgtatatgaattgaaggtgaatacgagagtattcaaataaggtctaaatacagtagagatatacactccgaatctatcacaccatttttgaccataggccaaaggccactagctagttgctagtttagaaacttaaatccttttgagatcccttcttctttttcagtgtgagaaatacctccagaaatacctctccgtatgtgcctcctctttcttccaaattagccctcgaggggcagagacgggtcaaaactccactgtgagcacaagtagtatag

SEQ ID NO: 74871 - DNA, 3268 bp, Zea Mays
gcaccttggtgccccttttggggccatcggtttccttccgtttcgcttctgatcgttcgtccgaagatttctttctcgcttccgtgctttccgggcacatgggctccagatcccgccgcagatggaaataacaacagctaccgcctactgagtacctgattgccgctcgagctgaaaagagtcgccacgatttggccacaagaaattcacccaaaaatctagcactgtgaggctatgctgcggtgctgcctgtgctggtgccggctgccggctgccgccgaacaggtcaaagagttttgttgccggtgaaaatccaaccgaaactgtggcgcacactactcttgttgtctagtgacaaatggatgacaccatgcaatggatcgaatcttgcacgagctacaggcgtacaaagtactaaaaagaaagagctggcttctcccgaggctttgagcgcatctgaaatttcactgctagaatgtggcacgaaagaagtacagaatgtggacgacagcagtaaccaatcaaatgacttgacatagtcatcgcgcagtggcctaaatttgttgtgtccatacgaaacgcagagcagcttccttccatggcacgccatacactaatacaaccgtataggcatataaaatgagatgacttcttagagccagattgaagcttcgccaacgctttttacaccataaagctgaagagcgcccagcattgaagattttctgagttgttatgatcacagccatttttacaccatcatgggggtgaataccgtttgtgcattcagagaggagacggtcgaagaattctttgaaacctgcacagcattttacacgtgaagtttgatccaaagcattactggagattgtcatacggtcgggaaggatcaggattgtcgctggtgatacacaccttgtgcgcacttgaatccagagtgcattcaagagacggtctgatgtttcctgtggtactggtgctaccaaacgggctaactgtttgcacctttgcctttccaacgctggtgcagactagaggaatgtgggaagaatccatcgcagagatatttgttttgtgttagaatcatcaggtcgctatatctatgctcaaaagcctgaaaacaagaaggacaagctcctaacgaacgggcatctatcacctcgtgcacaggttctacctgttccttcaaatacagcgcagggatccatcaggctgtcacgctcgtgcaaccaaggcaccgccatacgggcttctgtggccctgtgccgctgcctcacgaatccagttcccgactctcatcaaccatcccacatgaacctaaagatgctacctcacactttggaccactgaaaaagacatccaaaagcccaacagtaaaaacagatgtgatgtgacagaaccagagatccgggcaccgtgcgctaccgaagtgccagacgtatcaaatgatcaaatggaggctatccgcagcagatgtctataactatatattacattatctatataataaaatttgaaatagaggatgagatagtgaacgtgataagatagctgctggaaacaactttatcgctccagcggaaaatgggaacaactatgcataaggccattctcagtagaagttttattagggctagtttggtgacaaagtaatcgaggagaattgtagagaattgtggggggagagggatgaattgatttgtcccttaatcctctcaatccccttttatcaaaccagcccttaaaatttttatggcattaattaatatgtcgcatgcgtaggatttttatggcatgggactacatttaatataaaataggtgaaattagtttcatcactatgaaactatgccaacatgtttccaagacattggaaagcgtacgaaaccactactaagagtgatttattttatctatttctattgattatttagatgcaacatttatgtcacgtgttagcctataaaattgtcataaaactcttcattgaaagaacatatttcattcttcatttcatcttactcttgttgatatggtaacattagaaatggtgaaaccaaactatcgctgagaatggcctattgtatcttattttttttgctacccaaagtaatgaaaatattgctttctgtatgccttgtttgggacgacttcacttcaaaaattgcaacttctgtttttcaacttcaccataaaacagcttcaatatattgttaaggtggatttcaagagtttttagcttgcacatggactccagcttctataatataattaatttgtgtgagtttcaataattacctttgatgattagtggactatgatgagttggggagagagacatggataagtagatcgtgtaaccaatggggtggtgggtaattttgtgtagcttcatgaggatgtatgaaaacaatgtttttaatgcaccatttgagaagctgcaaaaaaatcttgaaactaccctctagtttcatttttttaaaagctacaagtagtaaattcatgaagtgaagccctcccaaacccctcccaaacaggcccttacaagtatctcaagtttaataaatatttcaacacacaatataaatagatattattagactgattatgatatatatttatatatttaacatattaaatctactttaacaaaaaatgacaagttaagaattctgtctttatttgtatggagcaaatagataatataccataatttttattagtcagttgcccatatgttactacgatttctatattcagaatatttataatatttattctttgttgcacacaaatggttgtgagcccaaatgattacaatctaggcgtgggaggggcgggacggttcgaacaccagcaccggagatgacgcacgaagggagaaactcttacttaagctcttgtttagacacgagtattcacctcaatccacatgtattgagatagattagagtaaaacttaaactaatttatacctgaaactatttcaatgtatatgaattgaaggtgaatacgagagtattcaaataaggtctaaatacagtagagatatacactccgaatctatcacaccatttttgaccataggccaaaggccactagctagttgctagtttagaaacttaaatccttttgagatcccttcttctttttcagtgtgagaaatacctccagaaatacctctccgtatgtgcctcctctttcttccaaattagccctcgaggggcagagacgggtcaaaactccactgtgagcacaagtagtatag

SEQ ID NO: 74872 - DNA, 1475 bp, Zea Mays
catatactatactagtaccattcttcttccctcaccacggaagagtaaaacagtaatttcagagctggtaccagtcgcgtgctattttaacgactggttcccgctcgttcgtcggcgagcgccacccacacgccacgcccgagagcgcccgcgaaaatgacgccgccggcgagaacatcaggcaaacgcgcggacgccggcgccagcgcgggcgcgatagacgagccgctgctgccggagtcctcggcgggtgggcggcacggcggcggggcgtcggtctcgggcgccgtgttcaacgtgtcgacgagcatcgtcggcgccggcatcatgtcgatcccggcagcgatgcgggtgctcggggtggtccccgcggcgctcctcatcgccgccgtcgccgcgctcgccgacgtctccgtggagttcatgctgcggtacacggggcgggggtggggcggcggcggcaaggacgaggcggccacgtcgtacgcggggaccatgggcgacgccttcggccgcgccggcgccgcattgctcaacgtcttcgtcgcccttaccaccacgggcacgctcgtcgtctacctcatcatcatcggggacgtgatgtctgggagcgtcggcggaggcgacgagcacgccggggtgctgcaggagctgttcggcgcgcggtggtggacggggaggcagttcgtgctgctcgtcaccgccgtcttcgttctgctgccgctcgtgctccgccgccgtgtcgggatgttcatggaatagcgaagcgcaaggacaaggcattggcggcaacgatgatcgttctggcagtggtcacgagcagcatcgccattgcctcgaacatcatgagctccatcagtgacgaagacagaggaggtcatgtagctggtagacgataatggctcagatcgaatcaaattaaaatgtggtttccaggccaaccgcgcgtgaagattgctgctcgtgtcatgcgttcctcctgggtattctttctttgcagcgagattgcttcggcccctgagatgcaagtttagtctgtgccccctcatggtgtagatgtttgtggttgagaggagatacgttggtacatggtaaggaaattaccagttggccaatgctgtatacttgtttcggtgatacattacagtgtaaaatagaaaacggtcatattttctttttcaggggtttataaaccgtagcaaataattgcaggccacttgttagccatctcccattacaacagaaagatagtccaccttagccttacccttaccattctaaatgccagacgtaagagccattgatgaaattgctttaaaggttttactcagtttaagcacacatttgctgtaaagcataacttgatctcttgtactatagttgtttatttagaatacttaacaaatttaggattatgagctctagtaatatagtatgcaaaagcatcagactcaccaatccaaagagatagatgc

SEQ ID NO: 74873 - DNA, 444 bp, Zea Mays
ggaaaaccagatatcttctttctactctggccgaagaagactggagatcacaccactgaactgaacgaacgaaggcgacagatgcgatgtgaaggttgcaggtgactctcgatgccgcaaagcacgcgacttggacatcctcctcatctatcctgctgccaaaaattgccaacgcttccttccagtccttcacgacatcaatctagccatctggctttgccgaatccgagcgcagacgcaacagcaacatctcctaatctcttttctcttcctccccacatcaacggctccaccccggccgacttttttttctttaatttttcccacaacagaagccacgaaaggaaggccagacagacgcaaaagcagcatccactctcgtcggctttctctcagcacaggtgtagtagtagagctagaggacgagggtgaaggatcaccgag

SEQ ID NO: 74874 - DNA, 682 bp, Zea Mays
ggaagcaattcatttcttcgttaagaaatagttacagtacaatcctttctttcaggcaaccataattacactacagggcttcacattgcaaggaagcaatttccctagtatatccttgccacacagccaacaaagaccaacacacatacaattattacatacatgattcagcaatgtacttacaaaaaaaagagaagagaaaccactatcacagtaaacacttcaatcgcagcgtcgtcaactctctcaatcgggaaaaaaaaaatcaaccaaccccacatagcatgtcccatttcccctcaactatcacaaactaacagcagtatgtaccggacctatgacctatccctccaagaaaagaaaagccatgcaaatcaccacaaacactcgaaccacctgttgcatgccaccgcaatccacgcggtgttttcccccatcatctccgtagccagccaacagagaagggcaggcagtcgtcacaggtccgacaaggctgtaaaatctagccatctcggacgtcgcaaaaggaatcgacaatccagtccaaacggatcgatccacccggatcagccccggaagaggtagaacaaagacagcaaaaccagagcgaccagtatctggtccctaaaggaaacgatcgtggcacggtcaacgcggcggctggcgtaccggccagcctcag

SEQ ID NO: 74875 - DNA, 1978 bp, Zea Mays
acacaattgccccaaaagtaaatgtcataataggagaaaacaactgtcttgcatcaccacgagcgtgggctctctctctcctttctcgacgacgactgggccaccgtcgctgccgcctgccgccctacgccaggtgccaagcagccaggtgttcttggggcccttcgccggcgacgagcaccaccagctgaaatatggcgaggataccgtctctgaagagcctcaatgcgtttccacatgcggaagagcacttgttgaagaagacttactctggcgctgttgtgacaatttttgggctacttataatgattacactgtttgtgcatgagctgcagttttatcttaccacctacacggtgcatcaggtatgattggccacagcttatatcttcatgtttgactgctcactgctatatgcaacttttcaatgtaatattcacagagacttttgttctccccttcaaatatattttagtttttttccgaggcactgtgaatatgcctgtagaaaacagggccttatccaaagtaaatgcttatatttcctttttcaagataattctagttggcatgttgggggctgagttcaagcgtcgtccagcaacctgatcaaattatcattttgatggcaattcctttatttgatatgaaacatgattataaatcaatttcattgttcaattattcatgcgttttctgatgttgtagtttctgttaattgtccttgatgagattgtggcaaagtcattttcctttcattgagcttatccttcccaacatctgtatcatgaacccttcaccagttattacggtctgcagatgtctgtagatctgaaacgaggagaaactctgccaatccatatcaatatgtcatttccttctttgccatgtgaagtattgagtgtggatgcaattgacatgtctgggaaacatgaagttgatttgcatacaaatatttggaagcttcgcttggataagtatggccatataatcggtacagagtacttgtctgacctagttgaaaaggggcatggggcacatcatgatcatgaccatgatcatgaccatcacgatgaacaaaagaagcatgaacaaaccttcaacgaagaagcagaaaaaatgatcaagagtgtgaaacaagcactcggaaatggtgaaggctgccgagtctatgggatgttggatgtgcagagagtggctggtaacttccatatctcagtgcatggtttgaacatttttgttgctgaaaagatttttgaagggtcaaaccatgtgaacgtcagtcatgttatccacgagctgtcatttggcccaaagtatccaggaattcataacccactggatgaaacttcaaggatacttcatgacacaagtggaaccttcaaatactatattaaggttgttccgactgagtacaaatatctgtcaaagaaagtattgccaacaaatcagttttctgtcactgagtattttcttcccatccgtccaactgacagggcctggccagcggtttacttcctgtatgatctgtcaccaattacagtcaccatcaaagaggaaagaaggaacttccttcattttgtaactcgtctatgtgcagttcttggtggcacatttgccatgacaggaatgcttgaccggtggatgtaccagcttatcaagacagtcaccaactcaaagaccagaagtgtactgcggtaattgcacaagtcatgatggatggaaaaccgttggtagtgtggtacccgtggctaatggagcccatagatctttgcccgaagctaactgatcaagccatgttgatttttgcatgttttattttcttcttacatggttaacttataatacgtcgttgttttttttttcatcaactatgttagattaacacagtccacggactacattgttaactatgttggtagtggaactgaaatgccaagccgatcttgatcaaccctatagtcccatcgtgccaaaa

SEQ ID NO: 74876 - DNA, 1428 bp, Zea Mays
ccttggtcttcccttcccgcttagcgaaaccaagcactcaaattctaactattcgtggtcggatctgatctaattacaagtgcatatgcatctgaaatatggcgaggataccgtctctgaagagcctcaatgcgtttccacatgcggaagagcacttgttgaagaagacttactctggcgctgttgtgacaatttttgggctacttataatgattacactgtttgtgcatgagctgcagttttatcttaccacctacacggtgcatcagatgtctgtagatctgaaacgaggagaaactctgccaatccatatcaatatgtcatttccttctttgccatgtgaagtattgagtgtggatgcaattgacatgtctgggaaacatgaagttgatttgcatacaaatatttggaagcttcgcttggataagtatggccatataatcggtacagagtacttgtctgacctagttgaaaaggggcatggggcacatcatgatcatgaccatgatcatgaccatcacgatgaacaaaagaagcatgaacaaaccttcaacgaagaagcagaaaaaatgatcaagagtgtgaaacaagcactcggaaatggtgaaggctgccgagtctatgggatgttggatgtgcagagagtggctggtaacttccatatctcagtgcatggtttgaacatttttgttgctgaaaagatttttgaagggtcaaaccatgtgaacgtcagtcatgttatccacgagctgtcatttggcccaaagtatccaggaattcataacccactggatgaaacttcaaggatacttcatgacacaagtggaaccttcaaatactatattaaggttgttccgactgagtacaaatatctgtcaaagaaagtattgccaacaaatcagttttctgtcactgagtattttcttcccatccgtccaactgacagggcctggccagcggtttacttcctgtatgatctgtcaccaattacagtcaccatcaaagaggaaagaaggaacttccttcattttgtaactcgtctatgtgcagttcttggtggcacatttgccatgacaggaatgcttgaccggtggatgtaccagcttatcaagacagtcaccaactcaaagaccagaagtgtactgcggtaattgcacaagtcatgatggatggaaaaccgttggtagtgtggtacccgtggctaatggagcccatagatctttgcccgaagctaactgatcaagccatgttgatttttgcatgttttattttcttcttacatggttaacttataatacgtcgttgttttttttttcatcaactatgttagattaacacagtccacggactacattgttaactatgttggtagtggaactgaaatgccaagccgatcttgatcaaccctatagtcccatcgtgccaaaa

SEQ ID NO: 74877 - DNA, 825 bp, Zea Mays
ctactggctcttatttaattgacagaatggcactacagagagtggctggtaacttccatatctcagtgcatggtttgaacatttttgttgctgaaaagatttttgaagggtcaaaccatgtgaacgtcagtcatgttatccacgagctgtcatttggcccaaagtatccaggaattcataacccactggatgaaacttcaaggatacttcatgacacaagtggaaccttcaaatactatattaaggttgttccgactgagtacaaatatctgtcaaagaaagtattgccaacaaatcagttttctgtcactgagtattttcttcccatccgtccaactgacagggcctggccagcggtttacttcctgtatgatctgtcaccaattacagtcaccatcaaagaggaaagaaggaacttccttcattttgtaactcgtctatgtgcagttcttggtggcacatttgccatgacaggaatgcttgaccggtggatgtaccagcttatcaagacagtcaccaactcaaagaccagaagtgtactgcggtaattgcacaagtcatgatggatggaaaaccgttggtagtgtggtacccgtggctaatggagcccatagatctttgcccgaagctaactgatcaagccatgttgatttttgcatgttttattttcttcttacatggttaacttataatacgtcgttgttttttttttcatcaactatgttagattaacacagtccacggactacattgttaactatgttggtagtggaactgaaatgccaagccgatcttgatcaaccctatagtcccatcgtgccaaaa

SEQ ID NO: 74878 - DNA, 1686 bp, Zea Mays
cttttgttgacgtggtgacactagaaatagtgtgacgaaactatcatagagaatacccttagcatagaactcaaaaaaacatcttgcatgtattaaattatgtgttggtatgtcaaaagatgttagaaagaaaaaaaatagaaaaaatagatggtatggatttttatttgatgacctatttagaagcccactgattcagcaaccaggttacaccacacctacatgtttctttaccctaacggcctaacctttctgctctagcgaaggtgacggcggcagcgacggcgctcagactcgggcttttagtgacggcatcagcggtttcccctcccgcctcttgccagtcccatcgcgccctcgcctcgggtcctctgcacaccgtccagtgaccttgcgtgatggactggataaagttttgcagcgattttaccgcaagtgatgggaaacagcatgcattgcttgataatcttaatcaggaattgtcccagaagtctgtactattgggtgatggttttaaactgtcagctgctgataatgatgtgtttgcaactgttcatccttttgtgatccgtgttagtgacagcgagttgcagaaatatccacatgtactgcggtggatggactacattcagaacactgttggtgctggtacaactttgcaaaagataaatgtgaccaagtctgactttgatccaccttctcatccaaggaaagctgataaaaaagatgctgaatcaagttcaaagaaagccatttccgtacagaagactgctgacaagtcaaatggaagtgctgactcaaagaaatccacaagagagcctcctgaaaataaggagaatcctactgctgcggggaacagcaaaacctctggggagaaaaagaaagtgcaagagaagtcagcaggaaaaacaacagagaaagctccagagaaaattgcagacaaggaatcagagtgcgatatcagtatcctgaatatacaggttggccttatccgtaaagcatggaagcatccatctgctgacagccttttagttgaggagatagatttgggagatggtaatgtgcgtcaagttgttagtggtcttgcaaagtattgcagcccagatgatcttactaatcggcatgttgtcttgatcacgaatgtgaagcctggaaagctgcgagatgtaatgtctgctggattggtcctttgtgcttcaactgaagatcatgctgctgtggagcctttgattcctccagaaggagccaagattggagaacgcatttcatttgctgggtttgatgggaagcctgaagatgttctaaatccaaagaaaaagcagctggacaagattaccccgcatcttcgtaccgacgagaatggaattgcaatgttcaaaggtgttccctttactacatcagctggcccatgtagatcttcgattcacaacggaaatgttaagtgagcagctcattagacatggttgcatagattgacatcaaacttatgcaggctgtctgtgtaccattttgtcatacatcatgttttgcccatatttagcgttgcaaaatttgaacagagttacactatctgtaagcaattttctactaatggttggcccagagtttgcttttgagaaaaaaaaataaaatagaaccaataccttgcttggttggagaattttgcatggggcagcatcaatgcct

SEQ ID NO: 74879 - DNA, 1626 bp, Zea Mays
cttttgttgacgtggtgacactagaaatagtgtgacgaaactatcatagagaatacccttagcatagaactcaaaaaaacatcttgcatgtattaaattatgtgttggtatgtcaaaagatgttagaaagaaaaaaaatagaaaaaatagatggtatggatttttatttgatgacctatttagaagcccactgattcagcaaccaggtgacggcggcagcgacggcgctcagactcgggcttttagtgacggcatcagcggtttcccctcccgcctcttgccagtcccatcgcgccctcgcctcgggtcctctgcacaccgtccagtgaccttgcgtgatggactggataaagttttgcagcgattttaccgcaagtgatgggaaacagcatgcattgcttgataatcttaatcaggaattgtcccagaagtctgtactattgggtgatggttttaaactgtcagctgctgataatgatgtgtttgcaactgttcatccttttgtgatccgtgttagtgacagcgagttgcagaaatatccacatgtactgcggtggatggactacattcagaacactgttggtgctggtacaactttgcaaaagataaatgtgaccaagtctgactttgatccaccttctcatccaaggaaagctgataaaaaagatgctgaatcaagttcaaagaaagccatttccgtacagaagactgctgacaagtcaaatggaagtgctgactcaaagaaatccacaagagagcctcctgaaaataaggagaatcctactgctgcggggaacagcaaaacctctggggagaaaaagaaagtgcaagagaagtcagcaggaaaaacaacagagaaagctccagagaaaattgcagacaaggaatcagagtgcgatatcagtatcctgaatatacaggttggccttatccgtaaagcatggaagcatccatctgctgacagccttttagttgaggagatagatttgggagatggtaatgtgcgtcaagttgttagtggtcttgcaaagtattgcagcccagatgatcttactaatcggcatgttgtcttgatcacgaatgtgaagcctggaaagctgcgagatgtaatgtctgctggattggtcctttgtgcttcaactgaagatcatgctgctgtggagcctttgattcctccagaaggagccaagattggagaacgcatttcatttgctgggtttgatgggaagcctgaagatgttctaaatccaaagaaaaagcagctggacaagattaccccgcatcttcgtaccgacgagaatggaattgcaatgttcaaaggtgttccctttactacatcagctggcccatgtagatcttcgattcacaacggaaatgttaagtgagcagctcattagacatggttgcatagattgacatcaaacttatgcaggctgtctgtgtaccattttgtcatacatcatgttttgcccatatttagcgttgcaaaatttgaacagagttacactatctgtaagcaattttctactaatggttggcccagagtttgcttttgagaaaaaaaaataaaatagaaccaataccttgcttggttggagaattttgcatggggcagcatcaatgcct

SEQ ID NO: 74880 - DNA, 1217 bp, Zea Mays
ctttttctctatgctgccacaaccatttcggcaaaatgcgtgcacgatatatgtcgtatgaggtgggggatgacagaaacggggagataaagcccgaggaagctcaggaaatttggaaggtaatgctggagcagttcaaggctgaggccctgcggatgcaggccctgtcaatgcaggcttatgatgtctactccgagaggacgagggaggtcttgctggaagcatcagagaagctgaagatacaggcagacaaagcacagaaggacctgagcgtggtagctaccgaaattggtcaggagggacaggaatatctgatgatggcagctcggaactccccagactcgatcaaggatatcacaacaacgttcagggctcttggaaaattgaattggccatcagagtatgaggattatcatgtgggcattccgtttggtacctttcttaccgtagggggtttcctcaacttcatgttggccggaagtacctctgcccttcgttttggtatcattcttggccttgcactgttggctctgggaatctcaagtttgagatcacaaagagatggcggccgtcggcctcgtcttctggtgaaagggcaagctgcaatagccagtgtcatcttcttcagggagttttcagttcttctccagaatggctggtttccaaaaatcttcatggttctcctcagtggagtagtggcaggcttttacttctatcgcattgcagctggtagccccaaagagctgagcagcaacagtgattcagtgaactaatgcacttggatgaatcagatgatcatgggggaacgcagacccagaaggctatggcctgtttgctttcgatttccttcatcatccttcaattcaggcaaagctcggttgtaaggtgtccgcatgatgaccacatggattcagaagaattgcttgtttactcggccctcttcccgcactcctttgttcctttgctcatgtagtatagatgatagacttgaacaacatcaataaacgacattcaaaggccatgcagttagctcttcagtttgtctgctgtttgtttttcatggggacagcccgaaaggtcggtgaagcgttcaatgtttcgtgaagtgtccgaaaacagtcagtgttattactctgtagattccagctcgctcaaaactattcaaggccgatgacaagttgataacaattagtggcactgtgatttgttcctattcg

SEQ ID NO: 74881 - DNA, 660 bp, Zea Mays
cataaacatgatatggtatacagaagacgaaatagaaggattattacaatagccagtgtcatcttcttcagggagttttcagttcttctccagaatggctggtttccaaaaatcttcatggttctcctcagtggagtagtggcaggcttttacttctatcgcattgcagctggtagccccaaagagctgagcagcaacagtgattcagtgaactaatgcacttggatgaatcagatgatcatgggggaacgcagacccagaaggctatggcctgtttgctttcgatttccttcatcatccttcaattcaggcaaagctcggttgtaaggtgtccgcatgatgaccacatggattcagaagaattgcttgtttactcggccctcttcccgcactcctttgttcctttgctcatgtagtatagatgatagacttgaacaacatcaataaacgacattcaaaggccatgcagttagctcttcagtttgtctgctgtttgtttttcatggggacagcccgaaaggtcggtgaagcgttcaatgtttcgtgaagtgtccgaaaacagtcagtgttattactctgtagattccagctcgctcaaaactattcaaggccgatgacaagttgataacaattagtggcactgtgatttgttcctattcg

SEQ ID NO: 74882 - DNA, 2597 bp, Zea Mays
ccaacatcccacgtccgttcgtgcgccccgaccccccgcctcaccggctcacccgccctcgctcaaaccgcgctcgctcgcccaccctgcaaccctagcctcacctgcctccgccgcccgccatggccagccctggaaatcttgcccgcgagatgcgccgccctctaccacgaaacctcatcgtcccctgcccaaacgtcgtccctgtccacatcaccgcccgcccgcgattaccgtcggaaatctcatcgacgagatgcccctcccccagcgcgcgcaacggcctccgctcgtgatggccggcggcgaagcggacgacgaaagaggaggaggagcaagaggcggagcggtttcccacatcgagcttgtgaccatggtggagacgtggtggttctatatatgcctctatctacaaggatgtccccatgatggttagcctgtctggtcggtttcatctggagagaggcattgaagagcgcctaggcaaagagtttatggatagaataaacaaagaaggctacatcgatgtcacaagcaaatcaggttctttacaattcatggttcagctgacttgatcatacgagtggaagatgcgtacgagtttgcatggcttataccaaactacatgttgcatgtcatcgagggagcaaatcactgctacactgctcactgtagagaacattctgatgacgtagtagaagccatcacatccagtgaggaatgctatggcttaatgccctaatctttatattcctcttcttatatctgcacttccatggacactaggcggtttcttatatggctgttgttgctgatttcagtcaccttcaccttctcacaggatgctgctcagctaggcagattcaccttcaccttctgttactcaatttctgcttgccttcattattactcatactcttttttgttttttatttaaatacttataaataagcagtacatatgtgagtataaagcagggatactcataaataagcagtacatcgatagttatgtggtacaacataaaaatataattatgtagtactaagtcatgaaaaaataatcccaactccaaggatgttaccgatgatattttctttgttgctgcaatttatattatgacatattatcttgaagtataaagcagggatattggtttcttctcttgaatacaaatgggctatagttgataaaattgattaactgatttgtgactatgaagctgactgatttgtgtttccttgttttgttggcttcacggagtgtccttttgatcttaaagaagcaatatcaagtatctgttttgctgctccaagatgtgcagatctactaaaactgttacaacttaaatgatctttgcaactaaatatgggaaggaatttgttgctgcagcttcagagttgatgcctgattgcagggtcaatcgtcaggctggtcagttgcatcttgtgaaaccatatatggttgcagttcagagtaacaatgtctctgccgtgaatgaagccttgaatgaactttatgtcgaagatgaggactacgagagactccgtgaatcagttgacatgcatgacaactttgaccagattggtcttgcccagaagcttgagaagcatgaattgctggagatgaggaggatcgccgcctacatttacaagaaggctggcaggtggaagcagtcgattgctctatcgaagaaagacaacatgtacaaggactgcatggagacatgctcacaatctggcgaccgtgaactgtcagaggacttgctcgtgtatttcattaagcagggtaagaaagaatgttttgcttcttgcctcttcatttgctacgacctgatccggccggatgtcgctcttgagcttgcatggatgaacaacatggtggactttgccttcccgtacctgttacagttcattcgtgaatacactagcaaggtggatgatttagtgaaggacaagatcgagtcgcagaaggaagaaagagctaaggagaaggaggagaaagaccttgcgactcagcagaacatgtatgcacagctgcttcctctcgctttgccagcgccgccaatgcctggcatgggtggccctccacctccgatgggtggaatgggcatgcctcccatggccgggatgggtatgccgccgatgggccctggtccgatgccagcattcggaatgggaggctactgaattgtggttttgcagggagcttagatgatgatgtgaattgttccattgcaagcataagtggaacctcattggagctgtacatggtttacagtttgggaaatcaatattctttattgtaccaggaaattttttttgggtgagtcagtgaaatcagcctgacccatagtttgagaagcggaacctatgatatgttttacaatgggatcggaaataggatgattaggttgtttcagcatgagctattgaaagctggtaccatgtgtatgtatagtggtgtgataaaatcttttgcgtgtcgatagacaaatgtatgtttctttgttacgacctgttaatctatatattagcccgacttgtagttcaaatgtcctacattattttcttctagcttctccatcttggagttca

SEQ ID NO: 74883 - DNA, 3445 bp, Zea Mays
cccacgtccgttcgtgcgccccgaccccccgcctcaccggctcacccgccctcgctcaaaccgcgctcgctcgcccaccctgcaaccctagcctcacctgcctccgccgcccgccatggccagccctggaaatcttgcccgcgagatgcgccgccctctaccacgaaacctcatcgtcccctgcccaaacgtcgtccctgtccacatcaccgcccgcccgcgattaccgtcggaaatctcatcgacgagatgcccctcccccagcgcgcgcaacggcctccgctcgtgatggccggcggcgaagcggacgacgaaagaggaggaggagcaagaggcggagcggtttcccacatcgagcttgtgaccatggtggagacgtggtggttctatatatgcctctatctacaaggatgtccccatgatggttagcctgtctggtcggtttcatctggagagaggcattgaagagcgcctaggcaaagagtttatggatagaataaacaaagaaggctacatcgatgtcacaagcaaatcaggtatgggaacatgtctgacctatattgaacactacgctacacaaataatatcttctgcctatagcttatttacctttcatgtgcatctaataaatgcttatctgttgtgacctaggaaaggttttgtatagagtaaagagagcttgatggaaagactaagcaatgatatgcatgcaacgagccttttccatcagcaaagagttcagcttatcagtattagcttatttaggcataactttcccctcatgctaattaccaaccaagcgtccaatttatagcagtacaccatattgatgctaattattaccagactttattcccaggttctttacaattcatggttcagctgacttgatcatacgagtggaagatgcgtacgagtttgcatggcttataccaaactacatgttgcatgtcatcgagggagcaaatcactgctacactgctcactgtagagaacattctgatgacgtagtagaagccatcacatccagtgaggaatgctatggcttaatgccctaatctttatattcctcttcttatatctgcacttccatggacactagtgatatctcaaagtagtgcaaagggagagttaccaagttgatcaatttttttctagaaatttcactacagccggttatagctgccaatgaacgtgcatttagattcaagaaatggaggtgatacttcgaatgaggcccataaaaggaattctatagatggcaacaataaacaaacaagtgaattggatgcattcatctacaagagtcttgagggcatccaagatcaagaattctgtaatgtattttagttgcctcctgaaaaggctattattcttttactaccataatgtattgttttgttgtaggaaatgggaaaatttccaacaacttttatctatttgttgcattgtgcctattcgattgttagccaatcaatctgttgagaaacccgacatacgatccaggcttgcagtcgaccatataagttgtacatcattagtgggggcacattctgttactccatttctcttgtgcatcagggtttcttatatggctgttgttgctgatttcagtcaccttcaccttctcacaggcggtttcttatatggctgttgttgctgatttcagtcaccttcaccttctcacaggatgctgctcagctaggcagattcaccttcaccttctgttactcaatttctgcttgccttcattattactcatactcttttttgttttttatttaaatacttataaataagcagtacatatgtgagtataaagcagggatactcataaataagcagtacatcgatagttatgtggtacaacataaaaatataattatgtagtactaagtcatgaaaaaataatcccaactccaaggatgttaccgatgatattttctttgttgctgcaatttatattatgacatattatcttgaagtataaagcagggatattggtttcttctcttgaatacaaatgggctatagttgataaaattgattaactgatttgtgactatgaagctgactgatttgtgtttccttgttttgttggcttcacggagtgtccttttgatcttaaagaagcaatatcaagtatctgttttgctgctccaagatgtgcagatctactaaaactgttacaacttaaatgatctttgcaactaaatatgggaaggaatttgttgctgcagcttcagagttgatgcctgattgcagggtcaatcgtcaggctggtcagttgcatcttgtgaaaccatatatggttgcagttcagagtaacaatgtctctgccgtgaatgaagccttgaatgaactttatgtcgaagatgaggactacgagagactccgtgaatcagttgacatgcatgacaactttgaccagattggtcttgcccagaagcttgagaagcatgaattgctggagatgaggaggatcgccgcctacatttacaagaaggctggcaggtggaagcagtcgattgctctatcgaagaaagacaacatgtacaaggactgcatggagacatgctcacaatctggcgaccgtgaactgtcagaggacttgctcgtgtatttcattaagcagggtaagaaagaatgttttgcttcttgcctcttcatttgctacgacctgatccggccggatgtcgctcttgagcttgcatggatgaacaacatggtggactttgccttcccgtacctgttacagttcattcgtgaatacactagcaaggtggatgatttagtgaaggacaagatcgagtcgcagaaggaagaaagagctaaggagaaggaggagaaagaccttgcgactcagcagaacatgtatgcacagctgcttcctctcgctttgccagcgccgccaatgcctggcatgggtggccctccacctccgatgggtggaatgggcatgcctcccatggccgggatgggtatgccgccgatgggccctggtccgatgccagcattcggaatgggaggctactgaattgtggttttgcagggagcttagatgatgatgtgaattgttccattgcaagcataagtggaacctcattggagctgtacatggtttacagtttgggaaatcaatattctttattgtaccaggaaattttttttgggtgagtcagtgaaatcagcctgacccatagtttgagaagcggaacctatgatatgttttacaatgggatcggaaataggatgattaggttgtttcagcatgagctattgaaagctggtaccatgtgtatgtatagtggtgtgataaaatcttttgcgtgtcgatagacaaatgtatgtttctttgttacgacctgttaatctatatattagcccgacttgtagttcaaatgtcctacattattttcttctagcttctccatcttggagttca

SEQ ID NO: 74884 - DNA, 2990 bp, Zea Mays
ctcaccggctcacccgccctcgctcaaaccgcgctcgctcgcccaccctgcaaccctagcctcacctgcctccgccgcccgccatggccagccctggaaatcttgcccgcgagatgcgccgccctctaccacgaaacctcatcgtcccctgcccaaacgtcgtccctgtccacatcaccgcccgcccgcgattaccgtcggaaatctcatcgacgagatgcccctcccccagcgcgcgcaacggcctccgctcgtgatggccgggtccgtgaatgccgcaagtgccccctatatatatataccttcccaacctcagttcttattatctcgacagcggcgaagcggacgacgaaagaggaggaggagcaagaggcggagcggtttcccacatcgagcttgtgaccatggtggagacgtggtggttctatatatgcctctatctacaaggatgtccccatgatggttagcctgtctggtcggtttcatctggagagaggcattgaagagcgcctaggcaaagagtttatggatagaataaacaaagaaggctacatcgatgtcacaagcaaatcaggttctttacaattcatggttcagctgacttgatcatacgagtggaagatgcgtacgagtttgcatggcttataccaaactacatgttgcatgtcatcgagggagcaaatcactgctacactgctcactgtagagaacattctgatgacgtagtagaagccatcacatccagtgagattcaagaaatggaggtgatacttcgaatgaggcccataaaaggaattctatagatggcaacaataaacaaacaagtgaattggatgcattcatctacaagagtcttgagggcatccaagatcaagaattctgtaatgtattttagttgcctcctgaaaaggctattattcttttactaccataatgtattgttttgttgtaggaaatgggaaaatttccaacaacttttatctatttgttgcattgtgcctattcgattgttagccaatcaatctgttgagaaacccgacatacgatccaggcttgcagtcgaccatataagttgtacatcattagtgggggcacattctgttactccatttctcttgtgcatcagggtttcttatatggctgttgttgctgatttcagtcaccttcaccttctcacaggcggtttcttatatggctgttgttgctgatttcagtcaccttcaccttctcacaggatgctgctcagctaggcagattcaccttcaccttctgttactcaatttctgcttgccttcattattactcatactcttttttgttttttatttaaatacttataaataagcagtacatatgtgagtataaagcagggatactcataaataagcagtacatcgatagttatgtggtacaacataaaaatataattatgtagtactaagtcatgaaaaaataatcccaactccaaggatgttaccgatgatattttctttgttgctgcaatttatattatgacatattatcttgaagtataaagcagggatattggtttcttctcttgaatacaaatgggctatagttgataaaattgattaactgatttgtgactatgaagctgactgatttgtgtttccttgttttgttggcttcacggagtgtccttttgatcttaaagaagcaatatcaagtatctgttttgctgctccaagatgtgcagatctactaaaactgttacaacttaaatgatctttgcaactaaatatgggaaggaatttgttgctgcagcttcagagttgatgcctgattgcagggtcaatcgtcaggctggtcagttgcatcttgtgaaaccatatatggttgcagttcagagtaacaatgtctctgccgtgaatgaagccttgaatgaactttatgtcgaagatgaggactacgagagactccgtgaatcagttgacatgcatgacaactttgaccagattggtcttgcccagaagcttgagaagcatgaattgctggagatgaggaggatcgccgcctacatttacaagaaggctggcaggtggaagcagtcgattgctctatcgaagaaagacaacatgtacaaggactgcatggagacatgctcacaatctggcgaccgtgaactgtcagaggacttgctcgtgtatttcattaagcagggtaagaaagaatgttttgcttcttgcctcttcatttgctacgacctgatccggccggatgtcgctcttgagcttgcatggatgaacaacatggtggactttgccttcccgtacctgttacagttcattcgtgaatacactagcaaggtggatgatttagtgaaggacaagatcgagtcgcagaaggaagaaagagctaaggagaaggaggagaaagaccttgcgactcagcagaacatgtatgcacagctgcttcctctcgctttgccagcgccgccaatgcctggcatgggtggccctccacctccgatgggtggaatgggcatgcctcccatggccgggatgggtatgccgccgatgggccctggtccgatgccagcattcggaatgggaggctactgaattgtggttttgcagggagcttagatgatgatgtgaattgttccattgcaagcataagtggaacctcattggagctgtacatggtttacagtttgggaaatcaatattctttattgtaccaggaaattttttttgggtgagtcagtgaaatcagcctgacccatagtttgagaagcggaacctatgatatgttttacaatgggatcggaaataggatgattaggttgtttcagcatgagctattgaaagctggtaccatgtgtatgtatagtggtgtgataaaatcttttgcgtgtcgatagacaaatgtatgtttctttgttacgacctgttaatctatatattagcccgacttgtagttcaaatgtcctacattattttcttctagcttctccatcttggagttca

SEQ ID NO: 74885 - DNA, 3052 bp, Zea Mays
ctcaccggctcacccgccctcgctcaaaccgcgctcgctcgcccaccctgcaaccctagcctcacctgcctccgccgcccgccatggccagccctggaaatcttgcccgcgagatgcgccgccctctaccacgaaacctcatcgtcccctgcccaaacgtcgtccctgtccacatcaccgcccgcccgcgattaccgtcggaaatctcatcgacgagatgcccctcccccagcgcgcgcaacggcctccgctcgtgatggccggcggcgaagcggacgacgaaagaggaggaggagcaagaggcggagcggtttcccacatcgagcttgtgaccatggtggagacgtggtggttctatatatgcctctatctacaaggatgtccccatgatggttagcctgtctggtcggtttcatctggagagaggcattgaagagcgcctaggcaaagagtttatggatagaataaacaaagaaggctacatcgatgtcacaagcaaatcaggtatgggaacatgtctgacctatattgaacactacgctacacaaataatatcttctgcctatagcttatttacctttcatgtgcatctaataaatgcttatctgttgtgacctaggaaaggttttgtatagagtaaagagagcttgatggaaagactaagcaatgatatgcatgcaacgagccttttccatcagcaaagagttcagcttatcagtattagcttatttaggcataactttcccctcatgctaattaccaaccaagcgtccaatttatagcagtacaccatattgatgctaattattaccagactttattcccaggttctttacaattcatggttcagctgacttgatcatacgagtggaagatgcgtacgagtttgcatggcttataccaaactacatgttgcatgtcatcgagggagcaaatcactgctacactgctcactgtagagaacattctgatgacgtagtagaagccatcacatccagtgagtgatatctcaaagtagtgcaaagggagagttaccaagttgatcaatttttttctagaaatttcactacagccggttatagctgccaatgaacgtgcatttagattcaagaaatggaggtgatacttcgaatgaggcccataaaaggaattctatagatggcaacaataaacaaacaagtgaattggatgcattcatctacaagagtcttgagggcatccaagatcaagaattctgtaatgcggtttcttatatggctgttgttgctgatttcagtcaccttcaccttctcacaggatgctgctcagctaggcagattcaccttcaccttctgttactcaatttctgcttgccttcattattactcatactcttttttgttttttatttaaatacttataaataagcagtacatatgtgagtataaagcagggatactcataaataagcagtacatcgatagttatgtggtacaacataaaaatataattatgtagtactaagtcatgaaaaaataatcccaactccaaggatgttaccgatgatattttctttgttgctgcaatttatattatgacatattatcttgaagtataaagcagggatattggtttcttctcttgaatacaaatgggctatagttgataaaattgattaactgatttgtgactatgaagctgactgatttgtgtttccttgttttgttggcttcacggagtgtccttttgatcttaaagaagcaatatcaagtatctgttttgctgctccaagatgtgcagatctactaaaactgttacaacttaaatgatctttgcaactaaatatgggaaggaatttgttgctgcagcttcagagttgatgcctgattgcagggtcaatcgtcaggctggtcagttgcatcttgtgaaaccatatatggttgcagttcagagtaacaatgtctctgccgtgaatgaagccttgaatgaactttatgtcgaagatgaggactacgagagactccgtgaatcagttgacatgcatgacaactttgaccagattggtcttgcccagaagcttgagaagcatgaattgctggagatgaggaggatcgccgcctacatttacaagaaggctggcaggtggaagcagtcgattgctctatcgaagaaagacaacatgtacaaggactgcatggagacatgctcacaatctggcgaccgtgaactgtcagaggacttgctcgtgtatttcattaagcagggtaagaaagaatgttttgcttcttgcctcttcatttgctacgacctgatccggccggatgtcgctcttgagcttgcatggatgaacaacatggtggactttgccttcccgtacctgttacagttcattcgtgaatacactagcaaggtggatgatttagtgaaggacaagatcgagtcgcagaaggaagaaagagctaaggagaaggaggagaaagaccttgcgactcagcagaacatgtatgcacagctgcttcctctcgctttgccagcgccgccaatgcctggcatgggtggccctccacctccgatgggtggaatgggcatgcctcccatggccgggatgggtatgccgccgatgggccctggtccgatgccagcattcggaatgggaggctactgaattgtggttttgcagggagcttagatgatgatgtgaattgttccattgcaagcataagtggaacctcattggagctgtacatggtttacagtttgggaaatcaatattctttattgtaccaggaaattttttttgggtgagtcagtgaaatcagcctgacccatagtttgagaagcggaacctatgatatgttttacaatgggatcggaaataggatgattaggttgtttcagcatgagctattgaaagctggtaccatgtgtatgtatagtggtgtgataaaatcttttgcgtgtcgatagacaaatgtatgtttctttgttacgacctgttaatctatatattagcccgacttgtagttcaaatgtcctacattattttcttctagcttctccatcttggagttca

SEQ ID NO: 74886 - DNA, 2249 bp, Zea Mays
ctcaccggctcacccgccctcgctcaaaccgcgctcgctcgcccaccctgcaaccctagcctcacctgcctccgccgcccgccatggccagccctggaaatcttgcccgcgagatgcgccgccctctaccacgaaacctcatcgtcccctgcccaaacgtcgtccctgtccacatcaccgcccgcccgcgattaccgtcggaaatctcatcgacgagatgcccctcccccagcgcgcgcaacggcctccgctcgtgatggccggcggcgaagcggacgacgaaagaggaggaggagcaagaggcggagcggtttcccacatcgagcttgtgaccatggtggagacgtggtggttctatatatgcctctatctacaaggatgtccccatgatggttagcctgtctggtcggtttcatctggagagaggcattgaagagcgcctaggcaaagagtttatggatagaataaacaaagaaggctacatcgatgtcacaagcaaatcaggtatgggaacatgtctgacctatattgaacactacgctacacaaataatatcttctgcctatagcttatttacctttcatgtgcatctaataaatgcttatctgttgtgacctaggaaaggttttgtatagagtaaagagagcttgatggaaagactaagcaatgatatgcatgcaacgagccttttccatcagcaaagagttcagcttatcagtattagcttatttaggcataactttcccctcatgctaattaccaaccaagcgtccaatttatagcagtacaccatattgatgctaattattaccagactttattcccaggttctttacaattcatggttcagctgacttgatcatacgagtggaagatgcgtacgagtttgcatggcttataccaaactacatgttgcatgtcatcgagggagcaaatcactgctacactgctcactgtagagaacattctgatgacgtagtagaagccatcacatccagtgagtaattgaactactctctgtccgtcctcctattgatgcaaagttgaaactgatgaaagaaatagctgaggaacatattcctgctggtcagttgcatcttgtgaaaccatatatggttgcagttcagagtaacaatgtctctgccgtgaatgaagccttgaatgaactttatgtcgaagatgaggactacgagagactccgtgaatcagttgacatgcatgacaactttgaccagattggtcttgcccagaagcttgagaagcatgaattgctggagatgaggaggatcgccgcctacatttacaagaaggctggcaggtggaagcagtcgattgctctatcgaagaaagacaacatgtacaaggactgcatggagacatgctcacaatctggcgaccgtgaactgtcagaggacttgctcgtgtatttcattaagcagggtaagaaagaatgttttgcttcttgcctcttcatttgctacgacctgatccggccggatgtcgctcttgagcttgcatggatgaacaacatggtggactttgccttcccgtacctgttacagttcattcgtgaatacactagcaaggtggatgatttagtgaaggacaagatcgagtcgcagaaggaagaaagagctaaggagaaggaggagaaagaccttgcgactcagcagaacatgtatgcacagctgcttcctctcgctttgccagcgccgccaatgcctggcatgggtggccctccacctccgatgggtggaatgggcatgcctcccatggccgggatgggtatgccgccgatgggccctggtccgatgccagcattcggaatgggaggctactgaattgtggttttgcagggagcttagatgatgatgtgaattgttccattgcaagcataagtggaacctcattggagctgtacatggtttacagtttgggaaatcaatattctttattgtaccaggaaattttttttgggtgagtcagtgaaatcagcctgacccatagtttgagaagcggaacctatgatatgttttacaatgggatcggaaataggatgattaggttgtttcagcatgagctattgaaagctggtaccatgtgtatgtatagtggtgtgataaaatcttttgcgtgtcgatagacaaatgtatgtttctttgttacgacctgttaatctatatattagcccgacttgtagttcaaatgtcctacattattttcttctagcttctccatcttggagttca

SEQ ID NO: 74887 - DNA, 3198 bp, Zea Mays
accggctcacccgccctcgctcaaaccgcgctcgctcgcccaccctgcaaccctagcctcacctgcctccgccgcccgccatggccagccctggaaatcttgcccgcgagatgcgccgccctctaccacgaaacctcatcgtcccctgcccaaacgtcgtccctgtccacatcaccgcccgcccgcgattaccgtcggaaatctcatcgacgagatgcccctcccccagcgcgcgcaacggcctccgctcgtgatggccggcggcgaagcggacgacgaaagaggaggaggagcaagaggcggagcggtttcccacatcgagcttgtgaccatggtggagacgtggtggttctatatatgcctctatctacaaggatgtccccatgatggttagcctgtctggtcggtttcatctggagagaggcattgaagagcgcctaggcaaagagtttatggatagaataaacaaagaaggctacatcgatgtcacaagcaaatcaggaaaggttttgtatagagtaaagagagcttgatggaaagactaagcaatgatatgcatgcaacgagccttttccatcagcaaagagttcagcttatcagtattagcttatttaggcataactttcccctcatgctaattaccaaccaagcgtccaatttatagcagtacaccatattgatgctaattattaccagactttattcccaggttctttacaattcatggttcagctgacttgatcatacgagtggaagatgcgtacgagtttgcatggcttataccaaactacatgttgcatgtcatcgagggagcaaatcactgctacactgctcactgtagagaacattctgatgacgtagtagaagccatcacatccagtgaggaatgctatggcttaatgccctaatctttatattcctcttcttatatctgcacttccatggacactaggtgacactaaattcacaagatgtcttcattgatataagaaaccctgatgcacaaaacttggaactcgatagatatttgtgctctaattttattattgcatttacattttttggttatagtattaacgtctaatatcaaaggactgctattgtggggggctctaatggcatttcttatattgacaacatgtcttcagtgatatctcaaagtagtgcaaagggagagttaccaagttgatcaatttttttctagaaatttcactacagccggttatagctgccaatgaacgtgcatttagattcaagaaatggaggtgatacttcgaatgaggcccataaaaggaattctatagatggcaacaataaacaaacaagtgaattggatgcattcatctacaagagtcttgagggcatccaagatcaagaattctgtaatgcggtttcttatatggctgttgttgctgatttcagtcaccttcaccttctcacaggatgctgctcagctaggcagattcaccttcaccttctgttactcaatttctgcttgccttcattattactcatactcttttttgttttttatttaaatacttataaataagcagtacatatgtgagtataaagcagggatactcataaataagcagtacatcgatagttatgtggtacaacataaaaatataattatgtagtactaagtcatgaaaaaataatcccaactccaaggatgttaccgatgatattttctttgttgctgcaatttatattatgacatattatcttgaagtataaagcagggatattggtttcttctcttgaatacaaatgggctatagttgataaaattgattaactgatttgtgactatgaagctgactgatttgtgtttccttgttttgttggcttcacggagtgtccttttgatcttaaagaagcaatatcaagtatctgttttgctgctccaagatgtgcagatctactaaaactgttacaacttaaatgatctttgcaactaaatatgggaaggaatttgttgctgcagcttcagagttgatgcctgattgcagggtcaatcgtcaggctggtcagttgcatcttgtgaaaccatatatggttgcagttcagagtaacaatgtctctgccgtgaatgaagccttgaatgaactttatgtcgaagatgaggactacgagagactccgtgaatcagttgacatgcatgacaactttgaccagattggtcttgcccagaagcttgagaagcatgaattgctggagatgaggaggatcgccgcctacatttacaagaaggctggcaggtggaagcagtcgattgctctatcgaagaaagacaacatgtacaaggactgcatggagacatgctcacaatctggcgaccgtgaactgtcagaggacttgctcgtgtatttcattaagcagggtaagaaagaatgttttgcttcttgcctcttcatttgctacgacctgatccggccggatgtcgctcttgagcttgcatggatgaacaacatggtggactttgccttcccgtacctgttacagttcattcgtgaatacactagcaaggtggatgatttagtgaaggacaagatcgagtcgcagaaggaagaaagagctaaggagaaggaggagaaagaccttgcgactcagcagaacatgtatgcacagctgcttcctctcgctttgccagcgccgccaatgcctggcatgggtggccctccacctccgatgggtggaatgggcatgcctcccatggccgggatgggtatgccgccgatgggccctggtccgatgccagcattcggaatgggaggctactgaattgtggttttgcagggagcttagatgatgatgtgaattgttccattgcaagcataagtggaacctcattggagctgtacatggtttacagtttgggaaatcaatattctttattgtaccaggaaattttttttgggtgagtcagtgaaatcagcctgacccatagtttgagaagcggaacctatgatatgttttacaatgggatcggaaataggatgattaggttgtttcagcatgagctattgaaagctggtaccatgtgtatgtatagtggtgtgataaaatcttttgcgtgtcgatagacaaatgtatgtttctttgttacgacctgttaatctatatattagcccgacttgtagttcaaatgtcctacattattttcttctagcttctccatcttggagttca

SEQ ID NO: 74888 - DNA, 2794 bp, Zea Mays
accggctcacccgccctcgctcaaaccgcgctcgctcgcccaccctgcaaccctagcctcacctgcctccgccgcccgccatggccagccctggaaatcttgcccgcgagatgcgccgccctctaccacgaaacctcatcgtcccctgcccaaacgtcgtccctgtccacatcaccgcccgcccgcgattaccgtcggaaatctcatcgacgagatgcccctcccccagcgcgcgcaacggcctccgctcgtgatggccggcggcgaagcggacgacgaaagaggaggaggagcaagaggcggagcggtttcccacatcgagcttgtgaccatggtggagacgtggtggttctatatatgcctctatctacaaggatgtccccatgatggttagcctgtctggtcggtttcatctggagagaggcattgaagagcgcctaggcaaagagtttatggatagaataaacaaagaaggctacatcgatgtcacaagcaaatcaggttctttacaattcatggttcagctgacttgatcatacgagtggaagatgcgtacgagtttgcatggcttataccaaactacatgttgcatgtcatcgagggagcaaatcactgctacactgctcactgtagagaacattctgatgacgtagtagaagccatcacatccagtgaggaatgctatggcttaatgccctaatctttatattcctcttcttatatctgcacttccatggacactagtgatatctcaaagtagtgcaaagggagagttaccaagttgatcaatttttttctagaaatttcactacagccggttatagctgccaatgaacgtgcatttagattcaagaaatggaggtgatacttcgaatgaggcccataaaaggaattctatagatggcaacaataaacaaacaagtgaattggatgcattcatctacaagagtcttgagggcatccaagatcaagaattctgtaatgcggtttcttatatggctgttgttgctgatttcagtcaccttcaccttctcacaggatgctgctcagctaggcagattcaccttcaccttctgttactcaatttctgcttgccttcattattactcatactcttttttgttttttatttaaatacttataaataagcagtacatatgtgagtataaagcagggatactcataaataagcagtacatcgatagttatgtggtacaacataaaaatataattatgtagtactaagtcatgaaaaaataatcccaactccaaggatgttaccgatgatattttctttgttgctgcaatttatattatgacatattatcttgaagtataaagcagggatattggtttcttctcttgaatacaaatgggctatagttgataaaattgattaactgatttgtgactatgaagctgactgatttgtgtttccttgttttgttggcttcacggagtgtccttttgatcttaaagaagcaatatcaagtatctgttttgctgctccaagatgtgcagatctactaaaactgttacaacttaaatgatctttgcaactaaatatgggaaggaatttgttgctgcagcttcagagttgatgcctgattgcagggtcaatcgtcaggctggtcagttgcatcttgtgaaaccatatatggttgcagttcagagtaacaatgtctctgccgtgaatgaagccttgaatgaactttatgtcgaagatgaggactacgagagactccgtgaatcagttgacatgcatgacaactttgaccagattggtcttgcccagaagcttgagaagcatgaattgctggagatgaggaggatcgccgcctacatttacaagaaggctggcaggtggaagcagtcgattgctctatcgaagaaagacaacatgtacaaggactgcatggagacatgctcacaatctggcgaccgtgaactgtcagaggacttgctcgtgtatttcattaagcagggtaagaaagaatgttttgcttcttgcctcttcatttgctacgacctgatccggccggatgtcgctcttgagcttgcatggatgaacaacatggtggactttgccttcccgtacctgttacagttcattcgtgaatacactagcaaggtggatgatttagtgaaggacaagatcgagtcgcagaaggaagaaagagctaaggagaaggaggagaaagaccttgcgactcagcagaacatgtatgcacagctgcttcctctcgctttgccagcgccgccaatgcctggcatgggtggccctccacctccgatgggtggaatgggcatgcctcccatggccgggatgggtatgccgccgatgggccctggtccgatgccagcattcggaatgggaggctactgaattgtggttttgcagggagcttagatgatgatgtgaattgttccattgcaagcataagtggaacctcattggagctgtacatggtttacagtttgggaaatcaatattctttattgtaccaggaaattttttttgggtgagtcagtgaaatcagcctgacccatagtttgagaagcggaacctatgatatgttttacaatgggatcggaaataggatgattaggttgtttcagcatgagctattgaaagctggtaccatgtgtatgtatagtggtgtgataaaatcttttgcgtgtcgatagacaaatgtatgtttctttgttacgacctgttaatctatatattagcccgacttgtagttcaaatgtcctacattattttcttctagcttctccatcttggagttca

SEQ ID NO: 74889 - DNA, 2711 bp, Zea Mays
ccgccctcgctcaaaccgcgctcgctcgcccaccctgcaaccctagcctcacctgcctccgccgcccgccatggccagccctggaaatcttgcccgcgagatgcgccgccctctaccacgaaacctcatcgtcccctgcccaaacgtcgtccctgtccacatcaccgcccgcccgcgattaccgtcggaaatctcatcgacgagatgcccctcccccagcgcgcgcaacggcctccgctcgtgatggccggcggcgaagcggacgacgaaagaggaggaggagcaagaggcggagcggtttcccacatcgagcttgtgaccatggtggagacgtggtggttctatatatgcctctatctacaaggatgtccccatgatggttagcctgtctggtcggtttcatctggagagaggcattgaagagcgcctaggcaaagagtttatggatagaataaacaaagaaggctacatcgatgtcacaagcaaatcaggttctttacaattcatggttcagctgacttgatcatacgagtggaagatgcgtacgagtttgcatggcttataccaaactacatgttgcatgtcatcgagggagcaaatcactgctacactgctcactgtagagaacattctgatgacgtagtagaagccatcacatccagtgagtgatatctcaaagtagtgcaaagggagagttaccaagttgatcaatttttttctagaaatttcactacagccggttatagctgccaatgaacgtgcatttagattcaagaaatggaggtgatacttcgaatgaggcccataaaaggaattctatagatggcaacaataaacaaacaagtgaattggatgcattcatctacaagagtcttgagggcatccaagatcaagaattctgcggtttcttatatggctgttgttgctgatttcagtcaccttcaccttctcacaggatgctgctcagctaggcagattcaccttcaccttctgttactcaatttctgcttgccttcattattactcatactcttttttgttttttatttaaatacttataaataagcagtacatatgtgagtataaagcagggatactcataaataagcagtacatcgatagttatgtggtacaacataaaaatataattatgtagtactaagtcatgaaaaaataatcccaactccaaggatgttaccgatgatattttctttgttgctgcaatttatattatgacatattatcttgaagtataaagcagggatattggtttcttctcttgaatacaaatgggctatagttgataaaattgattaactgatttgtgactatgaagctgactgatttgtgtttccttgttttgttggcttcacggagtgtccttttgatcttaaagaagcaatatcaagtatctgttttgctgctccaagatgtgcagatctactaaaactgttacaacttaaatgatctttgcaactaaatatgggaaggaatttgttgctgcagcttcagagttgatgcctgattgcagggtcaatcgtcaggctggtcagttgcatcttgtgaaaccatatatggttgcagttcagagtaacaatgtctctgccgtgaatgaagccttgaatgaactttatgtcgaagatgaggactacgagagactccgtgaatcagttgacatgcatgacaactttgaccagattggtcttgcccagaagcttgagaagcatgaattgctggagatgaggaggatcgccgcctacatttacaagaaggctggcaggtggaagcagtcgattgctctatcgaagaaagacaacatgtacaaggactgcatggagacatgctcacaatctggcgaccgtgaactgtcagaggacttgctcgtgtatttcattaagcagggtaagaaagaatgttttgcttcttgcctcttcatttgctacgacctgatccggccggatgtcgctcttgagcttgcatggatgaacaacatggtggactttgccttcccgtacctgttacagttcattcgtgaatacactagcaaggtggatgatttagtgaaggacaagatcgagtcgcagaaggaagaaagagctaaggagaaggaggagaaagaccttgcgactcagcagaacatgtatgcacagctgcttcctctcgctttgccagcgccgccaatgcctggcatgggtggccctccacctccgatgggtggaatgggcatgcctcccatggccgggatgggtatgccgccgatgggccctggtccgatgccagcattcggaatgggaggctactgaattgtggttttgcagggagcttagatgatgatgtgaattgttccattgcaagcataagtggaacctcattggagctgtacatggtttacagtttgggaaatcaatattctttattgtaccaggaaattttttttgggtgagtcagtgaaatcagcctgacccatagtttgagaagcggaacctatgatatgttttacaatgggatcggaaataggatgattaggttgtttcagcatgagctattgaaagctggtaccatgtgtatgtatagtggtgtgataaaatcttttgcgtgtcgatagacaaatgtatgtttctttgttacgacctgttaatctatatattagcccgacttgtagttcaaatgtcctacattattttcttctagcttctccatcttggagttca

SEQ ID NO: 74890 - DNA, 1608 bp, Zea Mays
catcgagcttgtgaccatggtggagacgtggtggttctatatatgcctctatctacaaggatgtccccatgatggttagcctgtctggtcggtttcatctggagagaggcattgaagagcgcctaggcaaagagtttatggatagaataaacaaagaaggctacatcgatgtcacaagcaaatcaggttctttacaattcatggttcagctgacttgatcatacgagtggaagatgcgtacgagtttgcatggcttataccaaactacatgttgcatgtcatcgagggagcaaatcactgctacactgctcactgtagagaacattctgatgacgtagtagaagccatcacatccagtgagtaattgaactactctctgtccgtcctcctattgatgcaaagttgaaactgatgaaagaaatagctgaggaacatattcctgctggtcagttgcatcttgtgaaaccatatatggttgcagttcagagtaacaatgtctctgccgtgaatgaagccttgaatgaactttatgtcgaagatgaggactacgagagactccgtgaatcagttgacatgcatgacaactttgaccagattggtcttgcccagaagcttgagaagcatgaattgctggagatgaggaggatcgccgcctacatttacaagaaggctggcaggtggaagcagtcgattgctctatcgaagaaagacaacatgtacaaggactgcatggagacatgctcacaatctggcgaccgtgaactgtcagaggacttgctcgtgtatttcattaagcagggtaagaaagaatgttttgcttcttgcctcttcatttgctacgacctgatccggccggatgtcgctcttgagcttgcatggatgaacaacatggtggactttgccttcccgtacctgttacagttcattcgtgaatacactagcaaggtggatgatttagtgaaggacaagatcgagtcgcagaaggaagaaagagctaaggagaaggaggagaaagaccttgcgactcagcagaacatgtatgcacagctgcttcctctcgctttgccagcgccgccaatgcctggcatgggtggccctccacctccgatgggtggaatgggcatgcctcccatggccgggatgggtatgccgccgatgggccctggtccgatgccagcattcggaatgggaggctactgaattgtggttttgcagggagcttagatgatgatgtgaattgttccattgcaagcataagtggaacctcattggagctgtacatggtttacagtttgggaaatcaatattctttattgtaccaggaaattttttttgggtgagtcagtgaaatcagcctgacccatagtttgagaagcggaacctatgatatgttttacaatgggatcggaaataggatgattaggttgtttcagcatgagctattgaaagctggtaccatgtgtatgtatagtggtgtgataaaatcttttgcgtgtcgatagacaaatgtatgtttctttgttacgacctgttaatctatatattagcccgacttgtagttcaaatgtcctacattattttcttctagcttctccatcttggagttca

SEQ ID NO: 74891 - DNA, 2392 bp, Zea Mays
atgaaccggcgagcccccctcgacgatatcgacaaccttgttagtgtccgcccagtcgaaggaataggaaactgtgatgcgatcaactggcaatcaattgcatctatcaggtggagacgtggtggttctatatatgcctctatctacaaggatgtccccatgatggttagcctgtctggtcggtttcatctggagagaggcattgaagagcgcctaggcaaagagtttatggatagaataaacaaagaaggctacatcgatgtcacaagcaaatcagcaggttctttacaattcatggttcagctgacttgatcatacgagtggaagatgcgtacgagtttgcatggcttataccaaactacatgttgcatgtcatcgagggagcaaatcactgctacactgctcactgtagagaacattctgatgacgtagtagaagccatcacatccagtgagtgatatctcaaagtagtgcaaagggagagttaccaagttgatcaatttttttctagaaatttcactacagccggttatagctgccaatgaacgtgcatttagattcaagaaatggaggtgatacttcgaatgaggcccataaaaggaattctatagatggcaacaataaacaaacaagtgaattggatgcattcatctacaagagtcttgagggcatccaagatcaagaattctgtaatgtattttagttgcctcctgaaaaggctattattcttttactaccataatgtattgttttgttgtaggaaatgggaaaatttccaacaacttttatctatttgttgcattgtgcctattcgattgttagccaatcaatctgttgagaaacccgacatacgatccaggcttgcagtcgaccatataagttgtacatcattagtgggggcacattctgttactccatttctcttgtgcatcagggtttcttatatggctgttgttgctgatttcagtcaccttcaccttctcacaggcggtttcttatatggctgttgttgctgatttcagtcaccttcaccttctcacaggatgctgctcagctagtgtccttttgatcttaaagaagcaatatcaagtatctgttttgctgctccaagatgtgcagatctactaaaactgttacaacttaaatgatctttgcaactaaatatgggaaggaatttgttgctgcagcttcagagttgatgcctgattgcagggtcaatcgtcaggctggtcagttgcatcttgtgaaaccatatatggttgcagttcagagtaacaatgtctctgccgtgaatgaagccttgaatgaactttatgtcgaagatgaggactacgagagactccgtgaatcagttgacatgcatgacaactttgaccagattggtcttgcccagaagcttgagaagcatgaattgctggagatgaggaggatcgccgcctacatttacaagaaggctggcaggtggaagcagtcgattgctctatcgaagaaagacaacatgtacaaggactgcatggagacatgctcacaatctggcgaccgtgaactgtcagaggacttgctcgtgtatttcattaagcagggtaagaaagaatgttttgcttcttgcctcttcatttgctacgacctgatccggccggatgtcgctcttgagcttgcatggatgaacaacatggtggactttgccttcccgtacctgttacagttcattcgtgaatacactagcaaggtggatgatttagtgaaggacaagatcgagtcgcagaaggaagaaagagctaaggagaaggaggagaaagaccttgcgactcagcagaacatgtatgcacagctgcttcctctcgctttgccagcgccgccaatgcctggcatgggtggccctccacctccgatgggtggaatgggcatgcctcccatggccgggatgggtatgccgccgatgggccctggtccgatgccagcattcggaatgggaggctactgaattgtggttttgcagggagcttagatgatgatgtgaattgttccattgcaagcataagtggaacctcattggagctgtacatggtttacagtttgggaaatcaatattctttattgtaccaggaaattttttttgggtgagtcagtgaaatcagcctgacccatagtttgagaagcggaacctatgatatgttttacaatgggatcggaaataggatgattaggttgtttcagcatgagctattgaaagctggtaccatgtgtatgtatagtggtgtgataaaatcttttgcgtgtcgatagacaaatgtatgtttctttgttacgacctgttaatctatatattagcccgacttgtagttcaaatgtcctacattattttcttctagcttctccatcttggagttca

SEQ ID NO: 74892 - DNA, 3086 bp, Zea Mays
agaccacctcccgcaaggcctggcagtgacagcgtgattaggctgacagatttgtagcggcaggaatacatctcagccaccgacatgccctccacctccaggctccaacgtagccgaatctctccctctgccaccaccgcttcctacctccgccaccaaaacaacgtacgcagcaggaaaaaacgcgcgcgggtgcccagattggggaagaaaggtgcacgcgaaaatataaggcaagggaggagctcgatgcgggtcgccaatattttggggtgaagaagaggcgtctgttggatcagaaaaaaaggattttttcctaatatcgattttcaggcggagggggcacattccaccgaggttggggctgtcaaaatcaggtgcccttccagatcccagaggagagagaggccccggcgagtccgccgcccgtccagatcctgccgatccagtcacgggttcatcgccttgccggctttgtctactgccgtcttcttcctcgccgggaaatctccttcgctgcctcgcttgcgtccctgggcttcttgttccacaccatcgcctggcttcgtcccctgcaaattttgaaactgtcagaagcctaggtaatgcatgtggtttggggatctatgagctgtcagtgagctgggattagggcttgttaatcggccttgtaagggagaatcactcctataaatacctgtacttggtgattgagaaggaataacagaaataatacaaccaaataccaaaatcgaagtccacttgcctaactgactcacctggtgacgtctcggctcatcgctgcagtgacctcaccgtcgctggaaatctcacgctgtagtggaaatccccttcccacggccagggggtcatcacatctggtatcaaagccatcggagccggcgatcgttgaagagaagacgcaacggctccctctgcaaaaccatccgtgcagacccggtttctactggaagccagggatgagagatcgagcagtgcaagggaattgggactgtatgtttgagtctatggagtttgtgactgaaagactgaaggaggtggagagagtccatgtcaaggacctcccgacctagggtagctggcccctgactacggagttcgtagccacggtccgtcgtcgccggtgaggtttttcccctcaaccgtcggcttgttttagagagagagattaggaaataataatcttccttgctttattccctgctgccatgtggcttataaatagccctatggctaaccaacttctcctataaactctcaactaactcctattttcttggacttatctgctgccaactaactctccacaattctctcatctcaatcttattctctagccttatctttatttctaaatctatccactggttgtggcctcctcctgtgcgcgttcagcgcgctctgcagcgcggcgtgcgtcacggcggcgcctatatgtgcgcccgcacatgacatctctccccccctcgagacccagctcgtcctcgagctgaaagtctgcgtacttgctgcggaattcgtcgaggtcttcccaggaagcagactcggccggttcgcccctccagtggacgagaacttgacgcacgcctcgcgccaagcgtgcctgagtaacctgcatcggctcagggaccacgacgccgttgtggatgattggtaaggcaggcggggacgctggtggaacgccgacaaacttcttgaggacacccacgtggaacacatcatggaggcgcgcccctggcggcaaggccaggcgaacggcgacgtcgttgatgagctcgacgacgcggtagggccccacaaagcgaggcttgagcttgcccgtggtggtcctgggcattgaagaagctgcccgctgccgaagacgaaggagggcccaatcccctggctggtaggagacttgacggtggtgccgatcgtagtgaagcttctgggtcgcctgggcctgctctaggcggtaccggacctcctccaggaaggcctcccgagcctccatgtcccgggcgacggctgccaccctcgtctcccccagctcataagagcggatggaaggtggctctccggccatacaccactcgaaacggtgtgtcccgaagcgaagtctggtacacggtgttgtaggtgtactcagcccacggcaaccagcgcagccattggcgggggcgatctccagtgaagcagcgcaggtacatcactatgactcggttggcggcttccgtctggccgtccgactggggatgaaaagcggacgtcatgtgaagcttagtacccataagcctcatgagctcctgccagaacgtcgaggtgaatacggggtcgcggtcggagacgatggactgcggaacaccgtggaggcgcacaatgtcggtgaagaatgcctgtgccaccgtctctgccgtgtacgagtgcgcgagtggaatgaagtggcagtacttgctgaagcggtcaaccacggataggatcaccatcttcccattcacgcggggtagcgcctccacaaagtccagcaccagggtgatgctgtggtcccgactgcgtgggggaggtaggccgcgaggctcgctgaaaacgtcgtcgaagtccgccaagagctcgtcgaggagcgtactggtggcggtggttgtgctgacagcagccggtcggtaggtcgcgagcccctgccagcagaacgccctgccctggaaggtgaaggagatcgcgtggttgctgaaatcccacatgatcggtcccagcgctgccagccatcgggtgcccaggaccacgtcgtagcccgccaaaggcatgacgtataggtcagcagggaagcagtggccgccgatgtccagtggtgcgttgcggatgacgcccacacacgcgacgcgctccccattcgcgaccattgccgtgaggcgtggccggtgttcgaggggcaggcccgtgcgtgcagccgcgacttctgatatgaagttgtgggtgctgcccgaatccagcatggcgacgagggaggtggcccccagcgtgacctgcagctgcatcgtgtcggtgagcgccacgcccgcaagagcttggagggagaataccggggtctc

SEQ ID NO: 74893 - DNA, 3088 bp, Zea Mays
gaccacctcccgcaaggcctggcagtgacagcgtgattaggctgacagatttgtagcggcaggaatacatctcagccaccgacatgccctccacctccaggctccaacgtagccgaatctctccctctgccaccaccgcttcctacctccgccaccaaaacaacgtacgcagcaggaaaaaacgcgcgcgggtgcccagattggggaagaaaggtgcacgcgaaaatataaggcaagggaggagctcgatgcgggtcgccaatattttggggtgaagaagaggcgtctgttggatcagaaaaaaaggattttttcctaatatcgattttcaggcggagggggcacattccaccgaggttggggctgtcaaaatcaggtgcccttccagatcccagaggagagagaggccccggcgagtccgccgcccgtccagatcctgccgatccagtcacgggttcatcgccttgccggctttgtctactggagccgtcttcttcctcgccgggaaatctccttcgctgcctcgcttgcgtccctgggcttcttgttccacaccatcgcctggcttcgtcccctgcaaattttgaaactgtcagaagcctaggtaatgcatgtggtttggggatctatgagctgtcagtgagctgggattagggcttgttaatcggccttgtaagggagaatcactcctataaatacctgtacttggtgattgagaaggaataacagaaataatacaaccaaataccaaaatcgaagtccacttgcctaactgactcacctggtgacgtctcggctcatcgctgcagtgacctcaccgtcgctggaaatctcacgctgtagtggaaatccccttcccacggccagggggtcatcacatctggtatcaaagccatcggagccggcgatcgttgaagagaagacgcaacggctccctctgcaaaaccatccgtgcagacccggtttctactggaagccagggatgagagatcgagcagtgcaagggaattgggactgtatgtttgagtctatggagtttgtgactgaaagactgaaggaggtggagagagtccatgtcaaggacctcccgacctagggtagctggcccctgactacggagttcgtagccacggtccgtcgtcgccggtgaggtttttcccctcaaccgtcggcttgttttagagagagagattaggaaataataatcttccttgctttattccctgctgccatgtggcttataaatagccctatggctaaccaacttctcctataaactctcaactaactcctattttcttggacttatctgctgccaactaactctccacaattctctcatctcaatcttattctctagccttatctttatttctaaatctatccactggttgtggcctcctcctgtgcgcgttcagcgcgctctgcagcgcggcgtgcgtcacggcggcgcctatatgtgcgcccgcacatgacatctctccccccctcgagacccagctcgtcctcgagctgaaagtctgcgtacttgctgcggaattcgtcgaggtcttcccaggaagcagactcggccggttcgcccctccagtggacgagaacttgacgcacgcctcgcgccaagcgtgcctgagtaacctgcatcggctcagggaccacgacgccgttgtggatgattggtaaggcaggcggggacgctggtggaacgccgacaaacttcttgaggacacccacgtggaacacatcatggaggcgcgcccctggcggcaaggccaggcgaacggcgacgtcgttgatgagctcgacgacgcggtagggccccacaaagcgaggcttgagcttgcccgtggtggtcctgggcattgaagaagctgcccgctgccgaagacgaaggagggcccaatcccctggctggtaggagacttgacggtggtgccgatcgtagtgaagcttctgggtcgcctgggcctgctctaggcggtaccggacctcctccaggaaggcctcccgagcctccatgtcccgggcgacggctgccaccctcgtctcccccagctcataagagcggatggaaggtggctctccggccatacaccactcgaaacggtgtgtcccgaagcgaagtctggtacacggtgttgtaggtgtactcagcccacggcaaccagcgcagccattggcgggggcgatctccagtgaagcagcgcaggtacatcactatgactcggttggcggcttccgtctggccgtccgactggggatgaaaagcggacgtcatgtgaagcttagtacccataagcctcatgagctcctgccagaacgtcgaggtgaatacggggtcgcggtcggagacgatggactgcggaacaccgtggaggcgcacaatgtcggtgaagaatgcctgtgccaccgtctctgccgtgtacgagtgcgcgagtggaatgaagtggcagtacttgctgaagcggtcaaccacggataggatcaccatcttcccattcacgcggggtagcgcctccacaaagtccagcaccagggtgatgctgtggtcccgactgcgtgggggaggtaggccgcgaggctcgctgaaaacgtcgtcgaagtccgccaagagctcgtcgaggagcgtactggtggcggtggttgtgctgacagcagccggtcggtaggtcgcgagcccctgccagcagaacgccctgccctggaaggtgaaggagatcgcgtggttgctgaaatcccacatgatcggtcccagcgctgccagccatcgggtgcccaggaccacgtcgtagcccgccaaaggcatgacgtataggtcagcagggaagcagtggccgccgatgtccagtggtgcgttgcggatgacgcccacacacgcgacgcgctccccattcgcgaccattgccgtgaggcgtggccggtgttcgaggggcaggcccgtgcgtgcagccgcgacttctgatatgaagttgtgggtgctgcccgaatccagcatggcgacgagggaggtggcccccagcgtgacctgcagctgcatcgtgtcggtgagcgccacgcccgcaagagcttggagggagaataccggggtctc

SEQ ID NO: 74894 - DNA, 3091 bp, Zea Mays
cgaaaaccttgtcacacgtgcatggccattgtgcatttgtgctgtcaaaaactcaaaatagttgcaaattctcgcaaattttaatgatgagttgtgttgtgtgcctgccctcctgctgtctgtccagctgcagattctctcacgagtctaatcataggccaggggtaaaagcgcaaatgtttctgcgctctcttttctcccctcaccctttctctttctccctcgaccgccccggatctatctcgccgcgccggcgcgcagctgagccgccgaagcgaggaggcaatcgaggcggacgaagcgccgcaccaaattcgacgggggatcgagcaccagaggcgtagcgcaaaatgttcaagttcctcaaggaggtggtcgcgggatccggatcgggactcaaggacttcccctacaccatcggcgagccctacgcatcggcttggggctcatggaaacaccaccgcggtacctccaaggatgatgggtcgcctgtgtcaattttttctctgtcagggagcaaccctcaggacagacacatggttgctggtcgcaacggtgttaagagattacgaacagtgcggcatccaaatatcttatcctttttacacagtactgaagcagaagctgcggatggacctgccatgaaatacacaatttatattgtaacagagcctgttatgccactttctgaaaagctcaaggaactgaatcttggtggtacacagagagatgagtactttgcatgggggcttcatcagatatccaaagctgtgagctttctcaataatgactgcaaacttgttcatggtaatgtatgcttggccagtgttgttgttacacaaaccctggattggaagcttcatgcttttgatgttctgtcagaatttgatgctaataatgaagcctctggtagccccatgttgcaatttgaatggttagttggaacacagtacaagccaatggagctgtcaaagtcagattgggcttcaattagaaaatcacccccatgggccattgattcttggggactagggtgtttaatttatgaactattttctggtgcaaagctggctagaacagaggaccttcgaaatactgcttcaatcccaaagtctctacttccagattaccagaggctcttgaattccacaccttctcgtagactaaatccttcaaaacttattgacaacagcgagtttttccagaacaagttagtagagaccatccagttcatggaaattcttaatttgaaagacacctttgagaaagacagtttttttcgtaaactccccaatatagctgaacagcttcctcgtgaaatagttctgaaaaagctgctccctgtattggcttcttctcttgaatttggttcagctgccgctccagccttaactgttttgttaaagatgggttcctggcttcctgctgaccaatttaatatcaaggtcttgccaactattgtcaagctttttgcctccaatgaccgagctatccgagcatgtcttttgcatcacataaatcagtttggggaatcaatgtcagctcaaattgttgacgaacaagtttttcctcatgtagccactggcttctctgatactgatggtactattcgtgaactgacattgaagtcgatgctcgtattagcaccaaaattatctcagcgtacaatctcaggatctctcttaaaatatctctctaagctacaggtggacgaagaacctggtatcaggacaaacacaacaattcttcttggcaatattgcaggctacatgaacgatgggacaaggaagagagtactgatcaatgcattcacagttcgtgcattacgtgataccttccctccggccagagcagctggaatcatggcactgagtgtcactagttcatactatgaaatgacagagattgcaactcgcatcctgcctaacattgttgtgctcacatttgacccaaatagtgatgtccgaacgaaggcttttcaggctaccgatcagttcttgcaaatagcaaaacaacaccatgaaaagcttaatacaggagacaacagtgtggctgaaagtactggtgttaagttaaagcctggaaatgcaggtttacttgggtgggccatgagttctgttacacaaaagggtaaaccttttgaccatgccccaatatctactgcaaatgccaataattctcaagcatcaacaacctcgactgccactccagacactcaggcttccacactagcgtatgcaccatccacatccacctcgcttgatcaagctgcatcagcatcagcaaggtcgtcagtagatgggtggggtgagcttgaggatggtaatatccatgaggagaatagtagcgataaagatggatgggatgatgtagacccatttgaggacaagccatccccatctcttctatccaacatacaggctgctcaaaaacgtccagtggtgcaaccaaagcaaccggttgcaaactcatctaaaccaaacccactgaaagcgccaaagtcagaagacgatcctttgtggggtcctatagctgctgcaccacctaaaagtgcagtaaaatctgcagacatcaagccatcaacatcacataatgatgaggatgacctctggggttcaatagcagcacctccaaaatcatctgggaagcctttgaagccagctgtagcgaatagtgacgacttatggggtgccatcgcagcacctccaccagcaaccaaagccagacccttagcctcgtcaggtaggggccgaggaacaaagccagcgcaaccaaaacttggtgctcaaagaataggaagaacatcttcaactggaatgtgacgtcttatgatatcaagtgttgtacaagaatgcaaagttttcctttttttttcccctgccttgcgttgagtctgtccaggatgacattctttgtaaactagtaaaaagatttatgtatatgagcacagttttgaccaatgtattagtattattttaccattgtgtattaaaatagatccagaagatttttgcacatcacagctgcaatcatcttaagtccatattattaatatattgctatgtcttattttggcgtgataagagcaact

SEQ ID NO: 74895 - DNA, 3201 bp, Zea Mays
caaaaactcaaaatagttgcaaattctcgcaaattttaatgatgagttgtgttgtgtgcctgccctcctgctgtctgtccagctgcagattctctcacgagtctaatcataggccaggggtaaaagcgcaaatgtttctgcgctctcttttctcccctcaccctttctctttctccctcgaccgccccggatctatctcgccgcgccggcgcgcagctgagccgccgaagcgaggaggcaatcgaggcggacgaagcgccgcaccaaattcgacgggggatcgagcaccagaggcgtagcgcaaaatgttcaagttcctcaaggaggtggtcgcgggatccggatcgggactcaaggacttcccctacaccatcggcgagccctacgcatcggcttggggctcatggaaacaccaccgcggtacctccaaggatgatgggtcgcctgtgtcaattttttctctgtcagggagcaaccctcaggacagacacatggttgctggtcgcaacggtgttaagagattacgaacagtgcggcatccaaatatcttatcctttttacacagtactgaagcagaagctgcggatggacctgccatgaaatacacaatttatattgtaacagagcctgttatgccactttctgaaaagctcaaggaactgaatcttggtggtacacagagagatgagtactttgcatgggggcttcatcagatatccaaagctgtgagctttctcaataatgactgcaaacttgttcatggtaatgtatgcttggccagtgttgttgttacacaaaccctggattggaagcttcatgcttttgatgttctgtcagaatttgatgctaataatgaagcctctggtagccccatgttgcaatttgaatggttagttggaacacagtacaagccaatggagctgtcaaagtcagattgggcttcaattagaaaatcacccccatgggccattgattcttggggactagggtgtttaatttatgaactattttctggtgcaaagctggctagaacagaggaccttcgaaatactgcttcaatcccaaagtctctacttccagattaccagaggctcttgaattccacaccttctcgtagactaaatccttcaaaacttattgacaacagcgagtttttccagaacaagttagtagagaccatccagttcatggaaattcttaatttgaaagacacctttgagaaagacagtttttttcgtaaactccccaatatagctgaacagcttcctcgtgaaatagttctgaaaaagctgctccctgtattggcttcttctcttgaatttggttcagctgccgctccagccttaactgttttgttaaagatgggttcctggcttcctgctgaccaatttaatatcaaggtcttgccaactattgtcaagctttttgcctccaatgaccgagctatccgagcatgtcttttgcatcacataaatcagtttggggaatcaatgtcagctcaaattgttgacgaacaagtttttcctcatgtagccactggcttctctgatactgatggtactattcgtgaactgacattgaagtcgatgctcgtattagcaccaaaaatgcaggagcgtgcacatacgcacaacaatttgccatggcatgctttgatggaatatttctgggattttagatcctcaatccctcatgcactgatttctatttcctgccaaaagctatacttgcagatgactgattgtctggtccgttattgcagttatctcagcgtacaatctcaggatctctcttaaaatatctctctaagctacaggtggacgaagaacctggtatcaggacaaacacaacaattcttcttggcaatattgcaggctacatgaacgatgggacaaggaagagagtactgatcaatgcattcacagttcgtgcattacgtgataccttccctccggccagagcagctggaatcatggcactgagtgtcactagttcatactatgaaatgacagagattgcaactcgcatcctgcctaacattgttgtgctcacatttgacccaaatagtgatgtccgaacgaaggcttttcaggctaccgatcagttcttgcaaatagcaaaacaacaccatgaaaagcttaatacaggagacaacagtgtggctgaaagtactggtgttaagttaaagcctggaaatgcaggtttacttgggtgggccatgagttctgttacacaaaagggtaaaccttttgaccatgccccaatatctactgcaaatgccaataattctcaagcatcaacaacctcgactgccactccagacactcaggcttccacactagcgtatgcaccatccacatccacctcgcttgatcaagctgcatcagcatcagcaaggtcgtcagtagatgggtggggtgagcttgaggatggtaatatccatgaggagaatagtagcgataaagatggatgggatgatgtagacccatttgaggacaagccatccccatctcttctatccaacatacaggctgctcaaaaacgtccagtggtgcaaccaaagcaaccggttgcaaactcatctaaaccaaacccactgaaagcgccaaagtcagaagacgatcctttgtggggtcctatagctgctgcaccacctaaaagtgcagtaaaatctgcagacatcaagccatcaacatcacataatgatgaggatgacctctggggttcaatagcagcacctccaaaatcatctgggaagcctttgaagccagctgtagcgaatagtgacgacttatggggtgccatcgcagcacctccaccagcaaccaaagccagacccttagcctcgtcaggtaggggccgaggaacaaagccagcgcaaccaaaacttggtgctcaaagaataggaagaacatcttcaactggaatgtgacgtcttatgatatcaagtgttgtacaagaatgcaaagttttcctttttttttcccctgccttgcgttgagtctgtccaggatgacattctttgtaaactagtaaaaagatttatgtatatgagcacagttttgaccaatgtattagtattattttaccattgtgtattaaaatagatccagaagatttttgcacatcacagctgcaatcatcttaagtccatattattaatatattgctatgtcttattttggcgtgataagagcaact

SEQ ID NO: 74896 - DNA, 3085 bp, Zea Mays
caaaaactcaaaatagttgcaaattctcgcaaattttaatgatgagttgtgttgtgtgcctgccctcctgctgtctgtccagctgcagattctctcacgagtctaatcataggccaggggtaaaagcgcaaatgtttctgcgctctcttttctcccctcaccctttctctttctccctcgaccgccccggatctatctcgccgcgccggcgcgcagctgagccgccgaagcgaggaggcaatcgaggcggacgaagcgccgcaccaaattcgacgggggatcgagcaccagaggcgtagcgcaaaatgttcaagttcctcaaggaggtggtcgcgggatccggatcgggactcaaggacttcccctacaccatcggcgagccctacgcatcggcttggggctcatggaaacaccaccgcggtacctccaaggatgatgggtcgcctgtgtcaattttttctctgtcagggagcaaccctcaggacagacacatggttgctggtcgcaacggtgttaagagattacgaacagtgcggcatccaaatatcttatcctttttacacagtactgaagcagaagctgcggatggacctgccatgaaatacacaatttatattgtaacagagcctgttatgccactttctgaaaagctcaaggaactgaatcttggtggtacacagagagatgagtactttgcatgggggcttcatcagatatccaaagctgtgagctttctcaataatgactgcaaacttgttcatggtaatgtatgcttggccagtgttgttgttacacaaaccctggattggaagcttcatgcttttgatgttctgtcagaatttgatgctaataatgaagcctctggtagccccatgttgcaatttgaatggttagttggaacacagtacaagccaatggagctgtcaaagtcagattgggcttcaattagaaaatcacccccatgggccattgattcttggggactagggtgtttaatttatgaactattttctggtgcaaagctggctagaacagaggaccttcgaaatactgcttcaatcccaaagtctctacttccagattaccagaggctcttgaattccacaccttctcgtagactaaatccttcaaaacttattgacaacagcgagtttttccagaacaagttagtagagaccatccagttcatggaaattcttaatttgaaagacacctttgagaaagacagtttttttcgtaaactccccaatatagctgaacagcttcctcgtgaaatagttctgaaaaagctgctccctgtattggcttcttctcttgaatttggttcagctgccgctccagccttaactgttttgttaaagatgggttcctggcttcctgctgaccaatttaatatcaaggtcttgccaactattgtcaagctttttgcctccaatgaccgagctatccgagcatgtcttttgcatcacataaatcagtttggggaatcaatgtcagctcaaattgttgacgaacaagtttttcctcatgtagccactggcttctctgatactgatggtactattcgtgaactgacattgaagtcgatgctcgtattagcaccaaaattatctcagcgtacaatctcaggatctctcttaaaatatctctctaagctacaggtggacgaagaacctggtatcaggacaaacacaacaattcttcttggcaatattgcaggctacatgaacgatgggacaaggaagagagtactgatcaatgcattcacagttcgtgcattacgtgataccttccctccggccagagcagctggaatcatggcactgagtgtcactagttcatactatgaaatgacagagattgcaactcgcatcctgcctaacattgttgtgctcacatttgacccaaatagtgatgtccgaacgaaggcttttcaggctaccgatcagttcttgcaaatagcaaaacaacaccatgaaaagattcaagggttctggtacttttcatggtttagatcacagcttaatacaggagacaacagtgtggctgaaagtactggtgttaagttaaagcctggaaatgcaggtttacttgggtgggccatgagttctgttacacaaaagggtaaaccttttgaccatgccccaatatctactgcaaatgccaataattctcaagcatcaacaacctcgactgccactccagacactcaggcttccacactagcgtatgcaccatccacatccacctcgcttgatcaagctgcatcagcatcagcaaggtcgtcagtagatgggtggggtgagcttgaggatggtaatatccatgaggagaatagtagcgataaagatggatgggatgatgtagacccatttgaggacaagccatccccatctcttctatccaacatacaggctgctcaaaaacgtccagtggtgcaaccaaagcaaccggttgcaaactcatctaaaccaaacccactgaaagcgccaaagtcagaagacgatcctttgtggggtcctatagctgctgcaccacctaaaagtgcagtaaaatctgcagacatcaagccatcaacatcacataatgatgaggatgacctctggggttcaatagcagcacctccaaaatcatctgggaagcctttgaagccagctgtagcgaatagtgacgacttatggggtgccatcgcagcacctccaccagcaaccaaagccagacccttagcctcgtcaggtaggggccgaggaacaaagccagcgcaaccaaaacttggtgctcaaagaataggaagaacatcttcaactggaatgtgacgtcttatgatatcaagtgttgtacaagaatgcaaagttttcctttttttttcccctgccttgcgttgagtctgtccaggatgacattctttgtaaactagtaaaaagatttatgtatatgagcacagttttgaccaatgtattagtattattttaccattgtgtattaaaatagatccagaagatttttgcacatcacagctgcaatcatcttaagtccatattattaatatattgctatgtcttattttggcgtgataagagcaact

SEQ ID NO: 74897 - DNA, 2988 bp, Zea Mays
gcagattctctcacgagtctaatcataggccaggggtaaaagcgcaaatgtttctgcgctctcttttctcccctcaccctttctctttctccctcgaccgccccggatctatctcgccgcgccggcgcgcagctgagccgccgaagcgaggaggcaatcgaggcggacgaagcgccgcaccaaattcgacgggggatcgagcaccagaggcgtagcgcaaaatgttcaagttcctcaaggaggtggtcgcgggatccggatcgggactcaaggacttcccctacaccatcggcgagccctacgcatcggcttggggctcatggaaacaccaccgcggtacctccaaggatgatgggtcgcctgtgtcaattttttctctgtcagggagcaaccctcaggacagacacatggttgctggtcgcaacggtgttaagagattacgaacagtgcggcatccaaatatcttatcctttttacacagtactgaagcagaagctgcggatggacctgccatgaaatacacaatttatattgtaacagagcctgttatgccactttctgaaaagctcaaggaactgaatcttggtggtacacagagagatgagtactttgcatgggggcttcatcagatatccaaagctgtgagctttctcaataatgactgcaaacttgttcatggtaatgtatgcttggccagtgttgttgttacacaaaccctggattggaagcttcatgcttttgatgttctgtcagaatttgatgctaataatgaagcctctggtagccccatgttgcaatttgaatggttagttggaacacagtacaagccaatggagctgtcaaagtcagattgggcttcaattagaaaatcacccccatgggccattgattcttggggactagggtgtttaatttatgaactattttctggtgcaaagctggctagaacagaggaccttcgaaatactgcttcaatcccaaagattaccagaggctcttgaattccacaccttctcgtagactaaatccttcaaaacttattgacaacagcgagtttttccagaacaagttagtagagaccatccagttcatggaaattcttaatttgaaagacacctttgagaaagacagtttttttcgtaaactccccaatatagctgaacagcttcctcgtgaaatagttctgaaaaagctgctccctgtattggcttcttctcttgaatttggttcagctgccgctccagccttaactgttttgttaaagatgggttcctggcttcctgctgaccaatttaatatcaaggtcttgccaactattgtcaagctttttgcctccaatgaccgagctatccgagcatgtcttttgcatcacataaatcagtttggggaatcaatgtcagctcaaattgttgacgaacaagtttttcctcatgtagccactggcttctctgatactgatggtactattcgtgaactgacattgaagtcgatgctcgtattagcaccaaaattatctcagcgtacaatctcaggatctctcttaaaatatctctctaagctacaggtggacgaagaacctggtatcaggacaaacacaacaattcttcttggcaatattgcaggctacatgaacgatgggacaaggaagagagtactgatcaatgcattcacagttcgtgcattacgtgataccttccctccggccagagcagctggaatcatggcactgagtgtcactagttcatactatgaaatgacagagattgcaactcgcatcctgcctaacattgttgtgctcacatttgacccaaatagtgatgtccgaacgaaggcttttcaggctaccgatcagttcttgcaaatagcaaaacaacaccatgaaaagattcaagggttctggtacttttcatggtttagatcacagcttaatacaggagacaacagtgtggctgaaagtactggtgttaagttaaagcctggaaatgcaggtttacttgggtgggccatgagttctgttacacaaaagggtaaaccttttgaccatgccccaatatctactgcaaatgccaataattctcaagcatcaacaacctcgactgccactccagacactcaggcttccacactagcgtatgcaccatccacatccacctcgcttgatcaagctgcatcagcatcagcaaggtcgtcagtagatgggtggggtgagcttgaggatggtaatatccatgaggagaatagtagcgataaagatggatgggatgatgtagacccatttgaggacaagccatccccatctcttctatccaacatacaggctgctcaaaaacgtccagtggtgcaaccaaagcaaccggttgcaaactcatctaaaccaaacccactgaaagcgccaaagtcagaagacgatcctttgtggggtcctatagctgctgcaccacctaaaagtgcagtaaaatctgcagacatcaagccatcaacatcacataatgatgaggatgacctctggggttcaatagcagcacctccaaaatcatctgggaagcctttgaagccagctgtagcgaatagtgacgacttatggggtgccatcgcagcacctccaccagcaaccaaagccagacccttagcctcgtcaggtaggggccgaggaacaaagccagcgcaaccaaaacttggtgctcaaagaataggaagaacatcttcaactggaatgtgacgtcttatgatatcaagtgttgtacaagaatgcaaagttttcctttttttttcccctgccttgcgttgagtctgtccaggatgacattctttgtaaactagtaaaaagatttatgtatatgagcacagttttgaccaatgtattagtattattttaccattgtgtattaaaatagatccagaagatttttgcacatcacagctgcaatcatcttaagtccatattattaatatattgctatgtcttattttggcgtgataagagcaact

SEQ ID NO: 74898 - DNA, 2933 bp, Zea Mays
gtctaatcataggccaggggtaaaagcgcaaatgtttctgcgctctcttttctcccctcaccctttctctttctccctcgaccgccccggatctatctcgccgcgccggcgcgcagctgagccgccgaagcgaggaggcaatcgaggcggacgaagcgccgcaccaaattcgacgggggatcgagcaccagaggcgtagcgcaaaatgttcaagttcctcaaggaggtggtcgcgggatccggatcgggactcaaggacttcccctacaccatcggcgagccctacgcatcggcttggggctcatggaaacaccaccgcggtacctccaaggatgatgggtcgcctgtgtcaattttttctctgtcagggagcaaccctcaggacagacacatggttgctggtcgcaacggtgttaagagattacgaacagtgcggcatccaaatatcttatcctttttacacagtactgaagcagaagctgcggatggacctgccatgaaatacacaatttatattgtaacagagcctgttatgccactttctgaaaagctcaaggaactgaatcttggtggtacacagagagatgagtactttgcatgggggcttcatcagatatccaaagctgtgagctttctcaataatgactgcaaacttgttcatggtaatgtatgcttggccagtgttgttgttacacaaaccctggattggaagcttcatgcttttgatgttctgtcagaatttgatgctaataatgaagcctctggtagccccatgttgcaatttgaatggttagttggaacacagtacaagccaatggagctgtcaaagtcagattgggcttcaattagaaaatcacccccatgggccattgattcttggggactagggtgtttaatttatgaactattttctggtgcaaagctggctagaacagaggaccttcgaaatactgcttcaatcccaaagattaccagaggctcttgaattccacaccttctcgtagactaaatccttcaaaacttattgacaacagcgagtttttccagaacaagttagtagagaccatccagttcatggaaattcttaatttgaaagacacctttgagaaagacagtttttttcgtaaactccccaatatagctgaacagcttcctcgtgaaatagttctgaaaaagctgctccctgtattggcttcttctcttgaatttggttcagctgccgctccagccttaactgttttgttaaagatgggttcctggcttcctgctgaccaatttaatatcaaggtcttgccaactattgtcaagctttttgcctccaatgaccgagctatccgagcatgtcttttgcatcacataaatcagtttggggaatcaatgtcagctcaaattgttgacgaacaagtttttcctcatgtagccactggcttctctgatactgatggtactattcgtgaactgacattgaagtcgatgctcgtattagcaccaaaattatctcagcgtacaatctcaggatctctcttaaaatatctctctaagctacaggtggacgaagaacctggtatcaggacaaacacaacaattcttcttggcaatattgcaggctacatgaacgatgggacaaggaagagagtactgatcaatgcattcacagttcgtgcattacgtgataccttccctccggccagagcagctggaatcatggcactgagtgtcactagttcatactatgaaatgacagagattgcaactcgcatcctgcctaacattgttgtgctcacatttgacccaaatagtgatgtccgaacgaaggcttttcaggctaccgatcagttcttgcaaatagcaaaacaacaccatgaaaagcttaatacaggagacaacagtgtggctgaaagtactggtgttaagttaaagcctggaaatgcaggtttacttgggtgggccatgagttctgttacacaaaagggtaaaccttttgaccatgccccaatatctactgcaaatgccaataattctcaagcatcaacaacctcgactgccactccagacactcaggcttccacactagcgtatgcaccatccacatccacctcgcttgatcaagctgcatcagcatcagcaaggtcgtcagtagatgggtggggtgagcttgaggatggtaatatccatgaggagaatagtagcgataaagatggatgggatgatgtagacccatttgaggacaagccatccccatctcttctatccaacatacaggctgctcaaaaacgtccagtggtgcaaccaaagcaaccggttgcaaactcatctaaaccaaacccactgaaagcgccaaagtcagaagacgatcctttgtggggtcctatagctgctgcaccacctaaaagtgcagtaaaatctgcagacatcaagccatcaacatcacataatgatgaggatgacctctggggttcaatagcagcacctccaaaatcatctgggaagcctttgaagccagctgtagcgaatagtgacgacttatggggtgccatcgcagcacctccaccagcaaccaaagccagacccttagcctcgtcaggtaggggccgaggaacaaagccagcgcaaccaaaacttggtgctcaaagaataggaagaacatcttcaactggaatgtgacgtcttatgatatcaagtgttgtacaagaatgcaaagttttcctttttttttcccctgccttgcgttgagtctgtccaggatgacattctttgtaaactagtaaaaagatttatgtatatgagcacagttttgaccaatgtattagtattattttaccattgtgtattaaaatagatccagaagatttttgcacatcacagctgcaatcatcttaagtccatattattaatatattgctatgtcttattttggcgtgataagagcaact

SEQ ID NO: 74899 - DNA, 2995 bp, Zea Mays
ctaatcataggccaggggtaaaagcgcaaatgtttctgcgctctcttttctcccctcaccctttctctttctccctcgaccgccccggatctatctcgccgcgccggcgcgcagctgagccgccgaagcgaggaggcaatcgaggcggacgaagcgccgcaccaaattcgacgggggatcgagcaccagaggcgtagcgcaaaatgttcaagttcctcaaggaggtggtcgcgggatccggatcgggactcaaggacttcccctacaccatcggcgagccctacgcatcggcttggggctcatggaaacaccaccgcggtacctccaaggatgatgggtcgcctgtgtcaattttttctctgtcagggagcaaccctcaggacagacacatggttgctggtcgcaacggtgttaagagattacgaacagtgcggcatccaaatatcttatcctttttacacagtactgaagcagaagctgcggatggacctgccatgaaatacacaatttatattgtaacagagcctgttatgccactttctgaaaagctcaaggaactgaatcttggtggtacacagagagatgagtactttgcatgggggcttcatcagatatccaaagctgtgagctttctcaataatgactgcaaacttgttcatggtaatgtatgcttggccagtgttgttgttacacaaaccctggattggaagcttcatgcttttgatgttctgtcagaatttgatgctaataatgaagcctctggtagccccatgttgcaatttgaatggttagttggaacacagtacaagccaatggagctgtcaaagtcagattgggcttcaattagaaaatcacccccatgggccattgattcttggggactagggtgtttaatttatgaactattttctggtgcaaagctggctagaacagaggaccttcgaaatactgcttcaatcccaaagtctctacttccagattaccagaggctcttgaattccacaccttctcgtagactaaatccttcaaaacttattgacaacagcgagtttttccagaacaagttagtagagaccatccagttcatggaaattcttaatttgaaagacacctttgagaaagacagtttttttcgtaaactccccaatatagctgaacagcttcctcgtgaaatagttctgaaaaagctgctccctgtattggcttcttctcttgaatttggttcagctgccgctccagccttaactgttttgttaaagatgggttcctggcttcctgctgaccaatttaatatcaaggtcttgccaactattgtcaagctttttgcctccaatgaccgagctatccgagcatgtcttttgcatcacataaatcagtttggggaatcaatgtcagctcaaattgttgacgaacaagtttttcctcatgtagccactggcttctctgatactgatggtactattcgtgaactgacattgaagtcgatgctcgtattagcaccaaaattatctcagcgtacaatctcaggatctctcttaaaatatctctctaagctacaggtggacgaagaacctggtatcaggacaaacacaacaattcttcttggcaatattgcaggctacatgaacgatgggacaaggaagagagtactgatcaatgcattcacagttcgtgcattacgtgataccttccctccggccagagcagctggaatcatggcactgagtgtcactagttcatactatgaaatgacagagattgcaactcgcatcctgcctaacattgttgtgctcacatttgacccaaatagtgatgtccgaacgaaggcttttcaggctaccgatcagttcttgcaaatagcaaaacaacaccatgaaaagcttaatacaggagacaacagtgtggctgaaagtactggtgttaagttaaagcctggaaatgcaggtttacttgggtgggccatgagttctgttacacaaaagggtaaaccttttgaccatgccccaatatctactgcaaatgccaataattctcaagcatcaacaacctcgactgccactccagttctgttcactttaaaagatctgcaattgagtatatcaattcgattgccagacactcaggcttccacactagcgtatgcaccatccacatccacctcgcttgatcaagctgcatcagcatcagcaaggtcgtcagtagatgggtggggtgagcttgaggatggtaatatccatgaggagaatagtagcgataaagatggatgggatgatgtagacccatttgaggacaagccatccccatctcttctatccaacatacaggctgctcaaaaacgtccagtggtgcaaccaaagcaaccggttgcaaactcatctaaaccaaacccactgaaagcgccaaagtcagaagacgatcctttgtggggtcctatagctgctgcaccacctaaaagtgcagtaaaatctgcagacatcaagccatcaacatcacataatgatgaggatgacctctggggttcaatagcagcacctccaaaatcatctgggaagcctttgaagccagctgtagcgaatagtgacgacttatggggtgccatcgcagcacctccaccagcaaccaaagccagacccttagcctcgtcaggtaggggccgaggaacaaagccagcgcaaccaaaacttggtgctcaaagaataggaagaacatcttcaactggaatgtgacgtcttatgatatcaagtgttgtacaagaatgcaaagttttcctttttttttcccctgccttgcgttgagtctgtccaggatgacattctttgtaaactagtaaaaagatttatgtatatgagcacagttttgaccaatgtattagtattattttaccattgtgtattaaaatagatccagaagatttttgcacatcacagctgcaatcatcttaagtccatattattaatatattgctatgtcttattttggcgtgataagagcaact

SEQ ID NO: 74900 - DNA, 2950 bp, Zea Mays
ggtaaaagcgcaaatgtttctgcgctctcttttctcccctcaccctttctctttctccctcgaccgccccggatctatctcgccgcgccggcgcgcagctgagccgccgaagcgaggaggcaatcgaggcggacgaagcgccgcaccaaattcgacgggggatcgagcaccagaggcgtagcgcaaaatgttcaagttcctcaaggaggtggtcgcgggatccggatcgggactcaaggacttcccctacaccatcggcgagccctacgcatcggcttggggctcatggaaacaccaccgcggtacctccaaggatgatgggtcgcctgtgtcaattttttctctgtcagggagcaaccctcaggacagacacatggttgctggtcgcaacggtgttaagagattacgaacagtgcggcatccaaatatcttatcctttttacacagtactgaagcagaagctgcggatggacctgccatgaaatacacaatttatattgtaacagagcctgttatgccactttctgaaaagctcaaggaactgaatcttggtggtacacagagagatgagtactttgcatgggggcttcatcagatatccaaagctgtgagctttctcaataatgactgcaaacttgttcatggtaatgtatgcttggccagtgttgttgttacacaaaccctggattggaagcttcatgcttttgatgttctgtcagaatttgatgctaataatgaagcctctggtagccccatgttgcaatttgaatggttagttggaacacagtacaagccaatggagctgtcaaagtcagattgggcttcaattagaaaatcacccccatgggccattgattcttggggactagggtgtttaatttatgaactattttctggtgcaaagctggctagaacagaggaccttcgaaatactgcttcaatcccaaagtctctacttccagattaccagaggctcttgaattccacaccttctcgtagactaaatccttcaaaacttattgacaacagcgagtttttccagaacaagttagtagagaccatccagttcatggaaattcttaatttgaaagacacctttgagaaagacagtttttttcgtaaactccccaatatagctgaacagcttcctcgtgaaatagttctgaaaaagctgctccctgtattggcttcttctcttgaatttggttcagctgccgctccagccttaactgttttgttaaagatgggttcctggcttcctgctgaccaatttaatatcaagccactggcttctctgatactgatggtactattcgtgaactgacattgaagtcgatgctcgtattagcaccaaaaatgcaggagcgtgcacatacgcacaacaatttgccatggcatgctttgatggaatatttctgggattttagatcctcaatccctcatgcactgatttctatttcctgccaaaagctatacttgcagatgactgattgtctggtccgttattgcagttatctcagcgtacaatctcaggatctctcttaaaatatctctctaagctacaggtggacgaagaacctggtatcaggacaaacacaacaattcttcttggcaatattgcaggctacatgaacgatgggacaaggaagagagtactgatcaatgcattcacagttcgtgcattacgtgataccttccctccggccagagcagctggaatcatggcactgagtgtcactagttcatactatgaaatgacagagattgcaactcgcatcctgcctaacattgttgtgctcacatttgacccaaatagtgatgtccgaacgaaggcttttcaggctaccgatcagttcttgcaaatagcaaaacaacaccatgaaaagcttaatacaggagacaacagtgtggctgaaagtactggtgttaagttaaagcctggaaatgcaggtttacttgggtgggccatgagttctgttacacaaaagggtaaaccttttgaccatgccccaatatctactgcaaatgccaataattctcaagcatcaacaacctcgactgccactccagacactcaggcttccacactagcgtatgcaccatccacatccacctcgcttgatcaagctgcatcagcatcagcaaggtcgtcagtagatgggtggggtgagcttgaggatggtaatatccatgaggagaatagtagcgataaagatggatgggatgatgtagacccatttgaggacaagccatccccatctcttctatccaacatacaggctgctcaaaaacgtccagtggtgcaaccaaagcaaccggttgcaaactcatctaaaccaaacccactgaaagcgccaaagtcagaagacgatcctttgtggggtcctatagctgctgcaccacctaaaagtgcagtaaaatctgcagacatcaagccatcaacatcacataatgatgaggatgacctctggggttcaatagcagcacctccaaaatcatctgggaagcctttgaagccagctgtagcgaatagtgacgacttatggggtgccatcgcagcacctccaccagcaaccaaagccagacccttagcctcgtcaggtaggggccgaggaacaaagccagcgcaaccaaaacttggtgctcaaagaataggaagaacatcttcaactggaatgtgacgtcttatgatatcaagtgttgtacaagaatgcaaagttttcctttttttttcccctgccttgcgttgagtctgtccaggatgacattctttgtaaactagtaaaaagatttatgtatatgagcacagttttgaccaatgtattagtattattttaccattgtgtattaaaatagatccagaagatttttgcacatcacagctgcaatcatcttaagtccatattattaatatattgctatgtcttattttggcgtgataagagcaact

SEQ ID NO: 74901 - DNA, 3007 bp, Zea Mays
cgcaaatgtttctgcgctctcttttctcccctcaccctttctctttctccctcgaccgccccggatctatctcgccgcgccggcgcgcagctgagccgccgaagcgaggaggcaatcgaggcggacgaagcgccgcaccaaattcgacgggggatcgagcaccagaggcgtagcgcaaaatgttcaagttcctcaaggaggtggtcgcgggatccggatcgggactcaaggacttcccctacaccatcggcgagccctacgcatcggcttggggctcatggaaacaccaccgcggtacctccaaggatgatgggtcgcctgtgtcaattttttctctgtcagggagcaaccctcaggacagacacatggttgctggtcgcaacggtgttaagagattacgaacagtgcggcatccaaatatcttatcctttttacacagtactgaagcagaagctgcggatggacctgccatgaaatacacaatttatattgtaacagagcctgttatgccactttctgaaaagctcaaggaactgaatcttggtggtacacagagagatgagtactttgcatgggggcttcatcagatatccaaagctgtgagctttctcaataatgactgcaaacttgttcatggtaatgtatgcttggccagtgttgttgttacacaaaccctggattggaagcttcatgcttttgatgttctgtcagaatttgatgctaataatgaagcctctggtagccccatgttgcaatttgaatggttagttggaacacagtacaagccaatggagctgtcaaagtcagattgggcttcaattagaaaatcacccccatgggccattgattcttggggactagggtgtttaatttatgaactattttctggtgcaaagctggctagaacagaggaccttcgaaatactgcttcaatcccaaagtctctacttccagattaccagaggctcttgaattccacaccttctcgtagactaaatccttcaaaacttattgacaacagcgagtttttccagaacaagttagtagagaccatccagttcatggaaattcttaatttgaaagacacctttgagaaagacagtttttttcgtaaactccccaatatagctgaacagcttcctcgtgaaatagttctgaaaaagctgctccctgtattggcttcttctcttgaatttggttcagctgccgctccagccttaactgttttgttaaagatgggttcctggcttcctgctgaccaatttaatatcaaggtcttgccaactattgtcaagctttttgcctccaatgaccgagctatccgagcatgtcttttgcatcacataaatcagtttggggaatcaatgtcagctcaaattgttgacgaacaagtttttcctcatgtagccactggcttctctgatactgatggtactattcgtgaactgacattgaagtcgatgctcgtattagcaccaaaaatgcaggagcgtgcacatacgcacaacaatttgccatggcatgctttgatggaatatttctgggattttagatcctcaatccctcatgcactgatttctatttcctgccaaaagctatacttgcagatgactgattgtctggtggacgaagaacctggtatcaggacaaacacaacaattcttcttggcaatattgcaggctacatgaacgatgggacaaggaagagagtactgatcaatgcattcacagttcgtgcattacgtgataccttccctccggccagagcagctggaatcatggcactgagtgtcactagttcatactatgaaatgacagagattgcaactcgcatcctgcctaacattgttgtgctcacatttgacccaaatagtgatgtccgaacgaaggcttttcaggctaccgatcagttcttgcaaatagcaaaacaacaccatgaaaagcttaatacaggagacaacagtgtggctgaaagtactggtgttaagttaaagcctggaaatgcaggtttacttgggtgggccatgagttctgttacacaaaagggtaaaccttttgaccatgccccaatatctactgcaaatgccaataattctcaagcatcaacaacctcgactgccactccagacactcaggcttccacactagcgtatgcaccatccacatccacctcgcttgatcaagctgcatcagcatcagcaaggtcgtcagtagatgggtggggtgagcttgaggatggtaatatccatgaggagaatagtagcgataaagatggatgggatgatgtagacccatttgaggacaagccatccccatctcttctatccaacatacaggctgctcaaaaacgtccagtggtgcaaccaaagcaaccggttgcaaactcatctaaaccaaacccactgaaagcgccaaagtcagaagacgatcctttgtggggtcctatagctgctgcaccacctaaaagtgcagtaaaatctgcagacatcaagccatcaacatcacataatgatgaggatgacctctggggttcaatagcagcacctccaaaatcatctgggaagcctttgaagccagctgtagcgaatagtgacgacttatggggtgccatcgcagcacctccaccagcaaccaaagccagacccttagcctcgtcaggtaggggccgaggaacaaagccagcgcaaccaaaacttggtgctcaaagaataggaagaacatcttcaactggaatgtgacgtcttatgatatcaagtgttgtacaagaatgcaaagttttcctttttttttcccctgccttgcgttgagtctgtccaggatgacattctttgtaaactagtaaaaagatttatgtatatgagcacagttttgaccaatgtattagtattattttaccattgtgtattaaaatagatccagaagatttttgcacatcacagctgcaatcatcttaagtccatattattaatatattgctatgtcttattttggcgtgataagagcaact

SEQ ID NO: 74902 - DNA, 2956 bp, Zea Mays
caccctttctctttctccctcgaccgccccggatctatctcgccgcgccggcgcgcagctgagccgccgaagcgaggaggcaatcgaggcggacgaagcgccgcaccaaattcgacgggggatcgagcaccagaggcgtagcgcaaaatgttcaagttcctcaaggaggtggtcgcgggatccggatcgggactcaaggacttcccctacaccatcggcgagccctacgcatcggcttggggctcatggaaacaccaccgcggtacctccaaggatgatgggtcgcctgtgtcaattttttctctgtcagggagcaaccctcaggacagacacatggttgctggtcgcaacggtgttaagagattacgaacagtgcggcatccaaatatcttatcctttttacacagtactgaagcagaagctgcggatggacctgccatgaaatacacaatttatattgtaacagagcctgttatgccactttctgaaaagctcaaggaactgaatcttggtggtacacagagagatgagtactttgcatgggggcttcatcagatatccaaagctgtgagctttctcaataatgactgcaaacttgttcatggtaatgtatgcttggccagtgttgttgttacacaaaccctggattggaagcttcatgcttttgatgttctgtcagaatttgatgctaataatgaagcctctggtagccccatgttgcaatttgaatggttagttggaacacagtacaagccaatggagctgtcaaagtcagattgggcttcaattagaaaatcacccccatgggccattgattcttggggactagggtgtttaatttatgaactattttctggtgcaaagctggctagaacagaggaccttcgaaatactgcttcaatcccaaagattaccagaggctcttgaattccacaccttctcgtagactaaatccttcaaaacttattgacaacagcgagtttttccagaacaagttagtagagaccatccagttcatggaaattcttaatttgaaagacacctttgagaaagacagtttttttcgtaaactccccaatatagctgaacagcttcctcgtgaaatagttctgaaaaagctgctccctgtattggcttcttctcttgaatttggttcagctgccgctccagccttaactgttttgttaaagatgggttcctggcttcctgctgaccaatttaatatcaaggtcttgccaactattgtcaagctttttgcctccaatgaccgagctatccgagcatgtcttttgcatcacataaatcagtttggggaatcaatgtcagctcaaattgttgacgaacaagtttttcctcatgtagccactggcttctctgatactgatggtactattcgtgaactgacattgaagtcgatgctcgtattagcaccaaaagagcgtgcacatacgcacaacaatttgccatggcatgctttgatggaatatttctgggattttagatcctcaatccctcatgcactgatttctatttcctgccaaaagctatacttgcagatgactgattgtctggtggacgaagaacctggtatcaggacaaacacaacaattcttcttggcaatattgcaggctacatgaacgatgggacaaggaagagagtactgatcaatgcattcacagttcgtgcattacgtgataccttccctccggccagagcagctggaatcatggcactgagtgtcactagttcatactatgaaatgacagagattgcaactcgcatcctgcctaacattgttgtgctcacatttgacccaaatagtgatgtccgaacgaaggcttttcaggctaccgatcagttcttgcaaatagcaaaacaacaccatgaaaagcttaatacaggagacaacagtgtggctgaaagtactggtgttaagttaaagcctggaaatgcaggtttacttgggtgggccatgagttctgttacacaaaagggtaaaccttttgaccatgccccaatatctactgcaaatgccaataattctcaagcatcaacaacctcgactgccactccagacactcaggcttccacactagcgtatgcaccatccacatccacctcgcttgatcaagctgcatcagcatcagcaaggtcgtcagtagatgggtggggtgagcttgaggatggtaatatccatgaggagaatagtagcgataaagatggatgggatgatgtagacccatttgaggacaagccatccccatctcttctatccaacatacaggctgctcaaaaacgtccagtggtgcaaccaaagcaaccggttgcaaactcatctaaaccaaacccactgaaagcgccaaagtcagaagacgatcctttgtggggtcctatagctgctgcaccacctaaaagtgcagtaaaatctgcagacatcaagccatcaacatcacataatgatgaggatgacctctggggttcaatagcagcacctccaaaatcatctgggaagcctttgaagccagctgtagcgaatagtgacgacttatggggtgccatcgcagcacctccaccagcaaccaaagccagacccttagcctcgtcaggtaggggccgaggaacaaagccagcgcaaccaaaacttggtgctcaaagaataggaagaacatcttcaactggaatgtgacgtcttatgatatcaagtgttgtacaagaatgcaaagttttcctttttttttcccctgccttgcgttgagtctgtccaggatgacattctttgtaaactagtaaaaagatttatgtatatgagcacagttttgaccaatgtattagtattattttaccattgtgtattaaaatagatccagaagatttttgcacatcacagctgcaatcatcttaagtccatattattaatatattgctatgtcttattttggcgtgataagagcaact

SEQ ID NO: 74903 - DNA, 2814 bp, Zea Mays
cttcgatctgcatgtttgactatggagcccatttacagtgccatgccatccaacttggatgatgggtcgcctgtgtcaattttttctctgtcagggagcaaccctcaggacagacacatggttgctggtcgcaacggtgttaagagattacgaacagtgcggcatccaaatatcttatcctttttacacagtactgaagcagaagctgcggatggacctgccatgaaatacacaatttatattgtaacagagcctgttatgccactttctgaaaagctcaaggaactgaatcttggtggtacacagagagatgagtactttgcatgggggcttcatcagatatccaaagctgtgagctttctcaataatgactgcaaacttgttcatggtaatgtatgcttggccagtgttgttgttacacaaaccctggattggaagcttcatgcttttgatgttctgtcagaatttgatgctaataatgaagcctctggtagccccatgttgcaatttgaatggttagttggaacacagtacaagccaatggagctgtcaaagtcagattgggcttcaattagaaaatcacccccatgggccattgattcttggggactagggtgtttaatttatgaactattttctggtgcaaagctggctagaacagaggaccttcgaaatactgcttcaatcccaaagattaccagaggctcttgaattccacaccttctcgtagactaaatccttcaaaacttattgacaacagcgagtttttccagaacaagttagtagagaccatccagttcatggaaattcttaatttgaaagacacctttgagaaagacagtttttttcgtaaactccccaatatagctgaacagcttcctcgtgaaatagttctgaaaaagctgctccctgtattggcttcttctcttgaatttggttcagctgccgctccagccttaactgttttgttaaagatgggttcctggcttcctgctgaccaatttaatatcaaggtcttgccaactattgtcaagctttttgcctccaatgaccgagctatccgagcatgtcttttgcatcacataaatcagtttggggaatcaatgtcagctcaaattgttgacgaacaagtttttcctcatgtagccactggcttctctgatactgatggtactattcgtgaactgacattgaagtcgatgctcgtattagcaccaaaaatgcaggagcgtgcacatacgcacaacaatttgccatggcatgctttgatggaatatttctgggattttagatcctcaatccctcatgcactgatttctatttcctgccaaaagctatacttgcagatgactgattgtctggtccgttattgcagttatctcagcgtacaatctcaggatctctcttaaaatatctctctaagctacaggtggacgaagaacctggtatcaggacaaacacaacaattcttcttggcaatattgcaggctacatgaacgatgggacaaggaagagagtactgatcaatgcattcacagttcgtgcattacgtgataccttccctccggccagagcagctggaatcatggcactgagtgtcactagttcatactatgaaatgacagagattgcaactcgcatcctgcctaacattgttgtgctcacatttgacccaaatagtgatgtccgaacgaaggcttttcaggctaccgatcagttcttgcaaatagcaaaacaacaccatgaaaagcttaatacaggagacaacagtgtggctgaaagtactggtgttaagttaaagcctggaaatgcaggtttacttgggtgggccatgagttctgttacacaaaagggtaaaccttttgaccatgccccaatatctactgcaaatgccaataattctcaagcatcaacaacctcgactgccactccagacactcaggcttccacactagcgtatgcaccatccacatccacctcgcttgatcaagctgcatcagcatcagcaaggtcgtcagtagatgggtggggtgagcttgaggatggtaatatccatgaggagaatagtagcgataaagatggatgggatgatgtagacccatttgaggacaagccatccccatctcttctatccaacatacaggctgctcaaaaacgtccagtggtgcaaccaaagcaaccggttgcaaactcatctaaaccaaacccactgaaagcgccaaagtcagaagacgatcctttgtggggtcctatagctgctgcaccacctaaaagtgcagtaaaatctgcagacatcaagccatcaacatcacataatgatgaggatgacctctggggttcaatagcagcacctccaaaatcatctgggaagcctttgaagccagctgtagcgaatagtgacgacttatggggtgccatcgcagcacctccaccagcaaccaaagccagacccttagcctcgtcaggtaggggccgaggaacaaagccagcgcaaccaaaacttggtgctcaaagaataggaagaacatcttcaactggaatgtgacgtcttatgatatcaagtgttgtacaagaatgcaaagttttcctttttttttcccctgccttgcgttgagtctgtccaggatgacattctttgtaaactagtaaaaagatttatgtatatgagcacagttttgaccaatgtattagtattattttaccattgtgtattaaaatagatccagaagatttttgcacatcacagctgcaatcatcttaagtccatattattaatatattgctatgtcttattttggcgtgataagagcaact

SEQ ID NO: 74904 - DNA, 1158 bp, Zea Mays
ctcgtcctcgatttggatctctggtgatgtccgaacgaaggcttttcaggctaccgatcagttcttgcaaatagcaaaacaacaccatgaaaagcttaatacaggagacaacagtgtggctgaaagtactggtgttaagttaaagcctggaaatgcaggtttacttgggtgggccatgagttctgttacacaaaagggtaaaccttttgaccatgccccaatatctactgcaaatgccaataattctcaagcatcaacaacctcgactgccactccagacactcaggcttccacactagcgtatgcaccatccacatccacctcgcttgatcaagctgcatcagcatcagcaaggtcgtcagtagatgggtggggtgagcttgaggatggtaatatccatgaggagaatagtagcgataaagatggatgggatgatgtagacccatttgaggacaagccatccccatctcttctatccaacatacaggctgctcaaaaacgtccagtggtgcaaccaaagcaaccggttgcaaactcatctaaaccaaacccactgaaagcgccaaagtcagaagacgatcctttgtggggtcctatagctgctgcaccacctaaaagtgcagtaaaatctgcagacatcaagccatcaacatcacataatgatgaggatgacctctggggttcaatagcagcacctccaaaatcatctgggaagcctttgaagccagctgtagcgaatagtgacgacttatggggtgccatcgcagcacctccaccagcaaccaaagccagacccttagcctcgtcaggtaggggccgaggaacaaagccagcgcaaccaaaacttggtgctcaaagaataggaagaacatcttcaactggaatgtgacgtcttatgatatcaagtgttgtacaagaatgcaaagttttcctttttttttcccctgccttgcgttgagtctgtccaggatgacattctttgtaaactagtaaaaagatttatgtatatgagcacagttttgaccaatgtattagtattattttaccattgtgtattaaaatagatccagaagatttttgcacatcacagctgcaatcatcttaagtccatattattaatatattgctatgtcttattttggcgtgataagagcaact

SEQ ID NO: 74905 - DNA, 1714 bp, Zea Mays
gtctgcttctaattggtgccttttctttctttttttcctgctttgctctgtcctctcgtacacgacgggtcattggctcgttgcagacttgcagtggtgaggccaaggccattgtccctttgcactgcctctatcctagtatcctgtttccattatgtcgtgtggcttgaggcacaggatgcattgtccattacctttgggcagaactaccaataaaaaaactcggttgggagggaaatggaaagactgaccacctgatattatattaagaagagaccgaaacatattttcgatcgagaaaaccctcaaactctggccatccatcactaacgggcagatcattgcccactctgcaacggccagtaggcgggtggcgcgcaggatatcgatccccgagagcgggcggagcacaacaggttttttttaaccaaacctgaaattcgtcagagagggtgatcgacctgggacccggaggtactgctcggaaaccttaaccattatgttagaggccctttcgcaccgaactaccagtctaccggacaccttctataatgcggtagcaaaatttaaatagtgagtgtctggttggaaggacaactaacttcaacgttggttgcttttcaccatgcttgtcctttgttttttttaatagtctcataatagttatgtgttactctcactttattcagtacgtgatgttcaatttggagccttattgcaagctgaactatggggaataccagcaaattttgtaactaccattcctaattggagttgatggtgctggatgtaaattagctattgtctactgaatatttggaacaaaagcatgaaacttcacatagaataagccacattgtggatcttgtaaggaaagctatgccccttgcactgacacctgagaatgatccggggaaggaagagctcaagcagctccaggtgcagttggaagacatcaacaagcttgcacacaagcaggtccggcgcatcctctggtctggtctgggtttcttgatcacccaggtgggcctcttcttcaggctcacgttctgggagttctcctgggacgtcatggagcccatcacgttcttcacgaccacgacaggcctggttgtgggatacgcatacttcctcatcacatcaagggacccgacctaccgagacttcatggagaggatgtttgagtctcggcagaggaagctgatccagaggcagaacttcaacctggacaagtaccttgagctccagaggcgctgcaaggatcccctggagaaggcctgcggcacgaccaaccctgacacggctcatcttcatgagctctccgttcacaaatgacaaagaattcaccattgcttcactactcattccattctatgggagaaatggtccctgctagcaatagtaagcggtgtttcagataccttttccacggtcttctcctatgcaaatgtgtaggtcagtataatttttttgggggtaaatttgtagcgatgctgaaacacaagctagttaaaagccaaactcatccgcatggctggatgcttactcactacccagaaccgcgcgattctgtggtctctactaatatactgtttcattgtgcctaattagctttattatgaaaactcatttgttggtggctaatattgtcctaattagagacttgtatttgatcacgatcacgtgcctttagaaatgtatacttggaagcgga

SEQ ID NO: 74906 - DNA, 616 bp, Zea Mays
ccaaccgacgctgcttcctttcttcatccactaaaccgaagctctggaagccacgcccgccaccatgattaccgcagttcgactggaatcaacagcaatatatgatgtagtgatgttctttggtgcacggggtctgtacctagggttgattcgtgcagcaggaagtcctggcgaacaacggaccttcatcgccgggcatcggtcgccgcagaaccgcgcaacttcgggggcagcctgtctcgcctatcgattggagcgcgaggtcgcgtgtcatctgaaaggcaagttagtacctggaatctcaagtgccaggcaagttgtgcccttgatcacttcttttacccactcatgttctaattaatcataatgatctgcataggttaattttgatgggacctaataggttaccctagtttgtctatttttatgccttgtttaccattgaactttttgggtagtacttgctagtgctatatgtggtttgggcattgagatacacattattcatgattatacttttgttatccgttgttatttactgttcatgtcaagatcattaatgtcaattggaacatagagcttaacttgagaaacacgtgccaccacaagggtttat

SEQ ID NO: 74907 - DNA, 6837 bp, Zea Mays
aaactatccaagcagcggcgcgtggaccccatagactggcctaccagaaaggcagaaagtgagtaacgcctagtccccgacaccgacggggaacctaccgctccgccgctccgctcccgtcgcgactccaaactcactccatatttcgttaccatttcccacctccagaaagtgtttttttgcctttttatcttcgctcgttttccttcccccgctctctctccaccccctccgtcctccgatccaaactaccgacgaacgccaccacccgaattcgaaaccctaggcggccgctgtagaacacgtgaggctgtagtgcctcttgttcggtggagccggcccgcggcagccggctatgtcgacggaggacgagaagctcctcaaggaggcgaagaagttgccgtgggacgagaggttgcagcataagaactggaaggtgaggaacgacgcaaacatcgacctcgccgctctatgcgactccatcaccgaccctaaggatgcccgcctccgcgagttcgggccgttgtttaggaagacggttgcagattccaatgcgccggtacaggagaaggcgctcgatgcccttctcgcgttccagcgagctgctgacgccgatgcatcaagatacgcgaaggaggtctgtgattcaatcgtggccaagtgcctcactggccgaccaaagactgtcgagaaagctcaagctgcattcctcctatgggtggaactggaggcatcagaggtcttccttgaagctatggagaaggctgtgaagaacaaagtggctaaagcagttgtacctgctattgatgtgatgtttcaagcactaagcgaatttggaactaaggtagtgccacccaaaaagattctgaagatgctacctgagctgtttgaccatccagaccagaatgtccgggcttcttctaagggtttgacactagagctttgtcggtggattggcaaagaccctgtaaagtctattttatttgagaagatgagagatactatgaaaaaggagttggaagcagagttggcaaatgtgtccggacttgctaagccaactcgaaaaataagatccgaacaagaaaaggaacttgaggaggagtctgtgcccgagacaagcggggctaacacttctgaagaggcagcgacagatgcccctgtggagatcgatgaatatgaccttgttgatcctgtagacattttaaccccactagaaaagtctggattctgggacggtgtgaaagcaacaaaatggtctgagagaagggatgctgtggcagaattaaccaagcttggttcggcaaaaaaaattgctcctggtgattttcatgaaatttgccggacactgaagaagctcatcacagatgttaatttggctgtttcggtggaagctactcaggcaattgggaatttagctagaggtttaagagcccaattttctggaaatgcacgaatgctccttccggttttacttgaaaaattgaaagaaaaaaagccaacaatgacagaagcactatctcaaacacttcaagcgatgcacaagtctggttgttttacacttattgatgtgattgaagatgttcgtgcggcagtaaaaaacaaggtgccccttgttcgttctttaacgctgacctgggttgcattttgcattgaaaccagcaataaagcaactgtactaaagttgcacaaggaatatgttcctatctgcatggagtgcttgaatgatggtactccagaagtacgagatgcatccttttctgttttgactgccattgccaagatggttggtatgaaaccattggaacgatccttggagaaattagatgatgtgaggaaaaagaagttatcagatatgattggttcttccagtgacagtgttttgagttcaggaacaggttagttttgcttttgtagttttacttgtattcaaatggatcaaatatctctgttttggactaatttatgtacaaactacacttctccagctccaatcacaacatcaggagcagccacatctgctcgcggggttgcagatagcatgtcaatgaagagatctgctgcaagcatgcttagtggaaagaagcctgtccaggcagcggctgctaccaagaaatctggaccgtccaaatccactgcagcaaaaaagacagatggtgggtcacagtctaaggcatcagctgctcttgagattgaagacgttgagccggcagaaatgagtttcgaggaaatagaagagaggttaaagtctgttgtgaaagctgagacaatttcccagctaaagagctctgtctggaaagagcgtcttgaagctattggcgtactcaaacaagaggtggaaaatcttacggaacttgataagtctgctgaacttctgattcgtttgttgtgtgctgtgcctggatggagcgaaaagaatgttcaggttcttactgttttggtacaacagcaagttatagaggtcaacacctatattgcctcgactgtaaacaaatttccaaagcgatgtgtggttttatgccttcttggcgtaagtgaaagggttgctgatataaaaacacggacctctgcaatgaaatgtctcactgccttctgtgaggcagtgggtcctggatttgtgtttgagaggctttacaaaataatgaaggagcacaagaatcccaaggttcttagtgagggtattctttggatggtctctgctgtggaagactttgggatctccaatttaaagctaaaggacatgattgatttttgcaaagacaccggtcttcagtctagtgctgctgtaacaagaaatgctactataaaattaattgggatgctacataagtttgtgggcccagatattaaaggctttttaagtgatgttaaaccagcacttctaagtgccctcgatactgaatatgagaaaaatccttttgagggtgctgctgctgctgctccgaagagaacagttcgagttctggataccgcatcttctgtatctgctggcttgtttgatgggttgccacgagaagacattagtgctaagataacacctactttactaaaaaatctgggcagtccggactggaaggtacgattggagtccatagatgcagtcaccaaaattgtggaggaggctaataaacgtatccagcctacaggaacagctgacctgttcagtgcacttagaggccgtctttatgacagcaacaaaaatttagtaatggcaaccttgtccactattggtggccttgcatatgctatgggaccttctgttgaaaagtcaagcaagggtattttggcagatgtgctgaagtgtcttggtgacaataagaagcacatgcgagaatgcacattgactgctctagattcatggattgctgcagcccaacttgacaaaatggttccatatattatagtgtctttgggtgatcagaaaacaggttcagaagggcgaaaagatctctttgattggttgtctaagcacgtttctaaaatgagtgatccatctgaggctttgcctttgttgaagccatctgcatcttctttgatggataaatcttctgaagtccgcaaagctgctgaatcctttatgaatgaaattctcaggatctgtggccaagaagtggttggaaggaacttgaaagatttgccatcacctactttggctattgtatcagaaaggctgaaactgtctactgtacatgaaggattttctgaatctgttaagatggtgacaacaagcatgagtttgccatcaaaagctggtttgaagaacaataaacatggtcttaatgatcgtggttctaatgtgggcaaacttgtgtcccaaagaggacttcccgccagggcatctgttactatggtttccacccaagaccctgcacaatcccaagcattatttaacataaaggactcaaacaaggaagagcgggagagacgtgttttggtaagaaaattcaagttcgaagaaccacgtcgtgaacagatagatgaactaaagattgatttgtttaagcatttccgagaagatgtaagcctgcgattatggaactcagactttaagaggcaaatcgatggtattgaattgctacaaaaggcacttccttcaagttggaaagaagtgattgaacttcttgacatattattaaggtggtttgtcttacgcttttgtgaatcgaacacaacatgtttgttgaaggttcttgactttcttcctgagctttttgatattttaaaagaccagtcatacatgttgacagaagctgaagctgcaatttttcttccttgcctcatagagaagtctggtcataacattgaaaaagtcagggaaaaaatgggggagctgataaagcaaatgatcaacatttactctcttcccaaactaattccctatatacttgaggggctccgctccaagaataaccggacaaggatagaatgtgttgatattgttggatatttcattgaccatcatgggaccgaggttggtgggttgatgaaaaacttgccatctgttgcagcactgacagcagagcgtgatggtgagattaggaaagctgcccttaatacgcttgcaacagcctacaagaaccttggggatgatgtatggcgatatgttggaaaactctcagatgcccaaagaagcatgctcgatgataggtttaaatggaaggcaagagaaatggataaaaggcgagaaggaaggcctggtgatgcacgagcagctctgaggcgttcagttagggagaatgggtctgatatagcagaacaaagcggagaagtagtgtcccgtccagtggctggatcaatgatctcaagggacttcggatatgcagatgctcatatggataggcacatggtacctaggcagattccaagtacaagtggtcctgtggactggcgcgaagctctcgagatagttgcattaggtttgcctgagcagtccgttgaaggtatgaaagttatatgccatgagctaacacaggcagctgaccctgaaagcacattgcttgaagatcttattaaggaagctgacagattagtgtcatgcttggctgttatggttccgaaaaccttcaattttagcttatctggtgcttcttcaaggtcttgcaaatatgtgttaaacacactcatgcagacatttcagatcaaacgtcttgctcatgctgtgaaggagggtacccttgacaaccttattacggagttacttctttggcttttagatgaaagggttcctcttatggatgatggcagccaattactcaaagcactaaatgttttgatgcttaaaatcttggataatgctgagagaacatcctcgtttgttgtgctgattaatttgctgaggcctttggacccttcaagatggccatcgcctacaccaacggagtctcttgctgtaaaaaatcagaagttttcagacttagttgtcaaatgtttaattaagttgacgaaggttcttcagagtacaatatatgaagttgaccttgatcgaattcttcagagcatccatatttatttacaagaacttgggatggaagaaatacggagaagggctggtgctgatgacaagccattgagaatggtcaaaactgtcttgcatgaacttgtgaagcttcggggaacggcaataaagggtcacctttcaatggttcctatagatgctgaacctcagccaataattctagcatacattgatctcaatctccagacccttgcagccgctagaatgttgacgccatcggggcctatgggtcaaactcactggggtgatgctgcatcgaacaatccaaatccatctactcactcagctgacgcgcaattgaagcaagagcttgctgctattttcaagaaaattggtgacaagcaaacatgtaccattggcctctatgaactgtatcggataactcagctctacccaaaggttgatatatttgctcagcttcagaatgctagtgaagcgtttagaacctatatcagagatggcctagctcaggtggagaagaatgcagcagctggaagaatgccttccagtcttccattatccacgccgcccccaatagcagcaatacccaatccaaaatttgcaccatcccctgttcacacaaaatcaatcggtaaaacagattataacgaagataatgccagtggtgagacacaacccttcagaggtcaaggtgccatcaccgaccaacaaactgatagataccatacctcaggcacgttggatgctcttagggaaaggatgaaaagcattcaagcggcagctataggtcattttgacggtgctcaggctcggccgttggcaagtatgaacggaagtaatatggtgcatgggggaactcgattggacggtgaaccccaacaacgaagtaatataccacccatggatgagcgagctctatctgggctgcaagcacgaatggagagactaaagagtgggtctatggaattacaatagatacgataacaattctgagaaataccaactattgtagttctttgtaaatttgaggcatagtgatggtgttctttgtagataggtatttgaatgtcggaagaactatatggcacggggtcaacatttcgtaacccatgtgtcaagccattcttgcagagcctttggatgcagttttagataagaggtagccaaatgttttccttgttgctactccaagggctaattagtgttgacacattttgccgtactgtattggttttcctgtggtgtacagcaatagaatttttcattctaaattaactggaaatgttacttgtgaaatatatggtttttgaaatgcatatccgtatggtttcacatttatttgattatctgaatgggattttgat

SEQ ID NO: 74908 - DNA, 6635 bp, Zea Mays
ccgctccgccgctccgctcccgtcgcgactccaaactcactccatatttcgttaccatttcccacctccagaaagtgtttttttgcctttttatcttcgctcgttttccttcccccgctctctctccaccccctccgtcctccgatccaaactaccgacgaacgccaccacccgaattcgaaaccctaggcggccgctgtagaacacgtgaggctgtagtgcctcttgttcggtggagccggcccgcggcagccggctatgtcgacggaggacgagaagctcctcaaggaggcgaagaagttgccgtgggacgagaggttgcagcataagaactggaaggtgaggaacgacgcaaacatcgacctcgccgctctatgcgactccatcaccgaccctaaggatgcccgcctccgcgagttcgggccgttgtttaggaagacggttgcagattccaatgcgccggtacaggagaaggcgctcgatgcccttctcgcgttccagcgagctgctgacgccgatgcatcaagatacgcgaaggaggtctgtgattcaatcgtggccaagtgcctcactggccgaccaaagactgtcgagaaagctcaagctgcattcctcctatgggtggaactggaggcatcagaggtcttccttgaagctatggagaaggctgtgaagaacaaagtggctaaagcagttgtacctgctattgatgtgatgtttcaagcactaagcgaatttggaactaaggtagtgccacccaaaaagattctgaagatgctacctgagctgtttgaccatccagaccagaatgtccgggcttcttctaagggtttgacactagagctttgtcggtggattggcaaagaccctgtaaagtctattttatttgagaagatgagagatactatgaaaaaggagttggaagcagagttggcaaatgtgtccggacttgctaagccaactcgaaaaataagatccgaacaagaaaaggaacttgaggaggagtctgtgcccgagacaagcggggctaacacttctgaagaggcagcgacagatgcccctgtggagatcgatgaatatgaccttgttgatcctgtagacattttaaccccactagaaaagtctggattctgggacggtgtgaaagcaacaaaatggtctgagagaagggatgctgtggcagaattaaccaagcttggttcggcaaaaaaaattgctcctggtgattttcatgaaatttgccggacactgaagaagctcatcacagatgttaatttggctgtttcggtggaagctactcaggcaattgggaatttagctagaggtttaagagcccaattttctggaaatgcacgaatgctccttccggttttacttgaaaaattgaaagaaaaaaagccaacaatgacagaagcactatctcaaacacttcaagcgatgcacaagtctggttgttttacacttattgatgtgattgaagatgttcgtgcggcagtaaaaaacaaggtgccccttgttcgttctttaacgctgacctgggttgcattttgcattgaaaccagcaataaagcaactgtactaaagttgcacaaggaatatgttcctatctgcatggagtgcttgaatgatggtactccagaagtacgagatgcatccttttctgttttgactgccattgccaagatggttggtatgaaaccattggaacgatccttggagaaattagatgatgtgaggaaaaagaagttatcagatatgattggttcttccagtgacagtgttttgagttcaggaacagctccaatcacaacatcaggagcagccacatctgctcgcggggttgcagatagcatgtcaatgaagagatctgctgcaagcatgcttagtggaaagaagcctgtccaggcagcggctgctaccaagaaatctggaccgtccaaatccactgcagcaaaaaagacagatggtgggtcacagtctaaggcatcagctgctcttgagattgaagacgttgagccggcagaaatgagtttcgaggaaatagaagagaggttaaagtctgttgtgaaagctgagacaatttcccagctaaagagctctgtctggaaagagcgtcttgaagctattggcgtactcaaacaagaggtggaaaatcttacggaacttgataagtctgctgaacttctgattcgtttgttgtgtgctgtgcctggatggagcgaaaagaatgttcaggtacaacagcaagttatagaggtcaacacctatattgcctcgactgtaaacaaatttccaaagcgatgtgtggttttatgccttcttggcgtaagtgaaagggttgctgatataaaaacacggacctctgcaatgaaatgtctcactgccttctgtgaggcagtgggtcctggatttgtgtttgagaggctttacaaaataatgaaggagcacaagaatcccaaggttcttagtgagggtattctttggatggtctctgctgtggaagactttgggatctccaatttaaagctaaaggacatgattgatttttgcaaagacaccggtcttcagtctagtgctgctgtaacaagaaatgctactataaaattaattgggatgctacataagtttgtgggcccagatattaaaggctttttaagtgatgttaaaccagcacttctaagtgccctcgatactgaatatgagaaaaatccttttgagggtgctgctgctgctgctccgaagagaacagttcgagttctggataccgcatcttctgtatctgctggcttgtttgatgggttgccacgagaagacattagtgctaagataacacctactttactaaaaaatctgggcagtccggactggaaggtacgattggagtccatagatgcagtcaccaaaattgtggaggaggctaataaacgtatccagcctacaggaacagctgacctgttcagtgcacttagaggccgtctttatgacagcaacaaaaatttagtaatggcaaccttgtccactattggtggccttgcatatgctatgggaccttctgttgaaaagtcaagcaagggtattttggcagatgtgctgaagtgtcttggtgacaataagaagcacatgcgagaatgcacattgactgctctagattcatggattgctgcagcccaacttgacaaaatggttccatatattatagtgtctttgggtgatcagaaaacaggttcagaagggcgaaaagatctctttgattggttgtctaagcacgtttctaaaatgagtgatccatctgaggctttgcctttgttgaagccatctgcatcttctttgatggataaatcttctgaagtccgcaaagctgctgaatcctttatgaatgaaattctcaggatctgtggccaagaagtggttggaaggaacttgaaagatttgccatcacctactttggctattgtatcagaaaggctgaaactgtctactgtacatgaaggattttctgaatctgttaagatggtgacaacaagcatgagtttgccatcaaaagctggtttgaagaacaataaacatggtcttaatgatcgtggttctaatgtgggcaaacttgtgtcccaaagaggacttcccgccagggcatctgttactatggtttccacccaagaccctgcacaatcccaagcattatttaacataaaggactcaaacaaggaagagcgggagagacgtgttttggtaagaaaattcaagttcgaagaaccacgtcgtgaacagatagatgaactaaagattgatttgtttaagcatttccgagaagatgtaagcctgcgattatggaactcagactttaagaggcaaatcgatggtattgaattgctacaaaaggcacttccttcaagttggaaagaagtgattgaacttcttgacatattattaaggtggtttgtcttacgcttttgtgaatcgaacacaacatgtttgttgaaggttcttgactttcttcctgagctttttgatattttaaaagaccagtcatacatgttgacagaagctgaagctgcaatttttcttccttgcctcatagagaagtctggtcataacattgaaaaagtcagggaaaaaatgggggagctgataaagcaaatgatcaacatttactctcttcccaaactaattccctatatacttgaggggctccgctccaagaataaccggacaaggatagaatgtgttgatattgttggatatttcattgaccatcatgggaccgaggttggtgggttgatgaaaaacttgccatctgttgcagcactgacagcagagcgtgatggtgagattaggaaagctgcccttaatacgcttgcaacagcctacaagaaccttggggatgatgtatggcgatatgttggaaaactctcagatgcccaaagaagcatgctcgatgataggtttaaatggaaggcaagagaaatggataaaaggcgagaaggaaggcctggtgatgcacgagcagctctgaggcgttcagttagggagaatgggtctgatatagcagaacaaagcggagaagtagtgtcccgtccagtggctggatcaatgatctcaagggacttcggatatgcagatgctcatatggataggcacatggtacctaggcagattccaagtacaagtggtcctgtggactggcgcgaagctctcgagatagttgcattaggtttgcctgagcagtccgttgaaggtatgaaagttatatgccatgagctaacacaggcagctgaccctgaaagcacattgcttgaagatcttattaaggaagctgacagattagtgtcatgcttggctgttatggttccgaaaaccttcaattttagcttatctggtgcttcttcaaggtcttgcaaatatgtgttaaacacactcatgcagacatttcagatcaaacgtcttgctcatgctgtgaaggagggtacccttgacaaccttattacggagttacttctttggcttttagatgaaagggttcctcttatggatgatggcagccaattactcaaagcactaaatgttttgatgcttaaaatcttggataatgctgagagaacatcctcgtttgttgtgctgattaatttgctgaggcctttggacccttcaagatggccatcgcctacaccaacggagtctcttgctgtaaaaaatcagaagttttcagacttagttgtcaaatgtttaattaagttgacgaaggttcttcagagtacaatatatgaagttgaccttgatcgaattcttcagagcatccatatttatttacaagaacttgggatggaagaaatacggagaagggctggtgctgatgacaagccattgagaatggtcaaaactgtcttgcatgaacttgtgaagcttcggggaacggcaataaagggtcacctttcaatggttcctatagatgctgaacctcagccaataattctagcatacattgatctcaatctccagacccttgcagccgctagaatgttgacgccatcggggcctatgggtcaaactcactggggtgatgctgcatcgaacaatccaaatccatctactcactcagctgacgcgcaattgaagcaagagcttgctgctattttcaagaaaattggtgacaagcaaacatgtaccattggcctctatgaactgtatcggataactcagctctacccaaaggttgatatatttgctcagcttcagaatgctagtgaagcgtttagaacctatatcagagatggcctagctcaggtggagaagaatgcagcagctggaagaatgccttccagtcttccattatccacgccgcccccaatagcagcaatacccaatccaaaatttgcaccatcccctgttcacacaaaatcaatcggtaaaacagattataacgaagataatgccagtggtgagacacaacccttcagaggtcaaggtgccatcaccgaccaacaaactgatagataccatacctcaggcacgttggatgctcttagggaaaggatgaaaagcattcaagcggcagctataggtcattttgacggtgctcaggctcggccgttggcaagtatgaacggaagtaatatggtgcatgggggaactcgattggacggtgaaccccaacaacgaagtaatataccacccatggatgagcgagctctatctgggctgcaagcacgaatggagagactaaagagtgggtctatggaattacaatagatacgataacaattctgagaaataccaactattgtagttctttgtaaatttgaggcatagtgatggtgttctttgtagataggtatttgaatgtcggaagaactatatggcacggggtcaacatttcgtaacccatgtgtcaagccattcttgcagagcctttggatgcagttttagataagaggtagccaaatgttttccttgttgctactccaagggctaattagtgttgacacattttgccgtactgtattggttttcctgtggtgtacagcaatagaatttttcattctaaattaactggaaatgttacttgtgaaatatatggtttttgaaatgcatatccgtatggtttcacatttatttgattatctgaatgggattttgat

SEQ ID NO: 74909 - DNA, 6407 bp, Zea Mays
tctccaccccctccgtcctccgatccaaactaccgacgaacgccaccacccgaattcgaaaccctaggcggccgctgtagaacacgtgaggctgtagtgcctcttgttcggtggagccggcccgcggcagccggctatgtcgacggaggacgagaagctcctcaaggaggcgaagaagttgccgtgggacgagaggttgcagcataagaactggaaggtgaggaacgacgcaaacatcgacctcgccgctctatgcgactccatcaccgaccctaaggatgcccgcctccgcgagttcgggccgttgtttaggaagacggttgcagattccaatgcgccggtacaggagaaggcgctcgatgcccttctcgcgttccagcgagctgctgacgccgatgcatcaagatacgcgaaggaggtctgtgattcaatcgtggccaagtgcctcactggccgaccaaagactgtcgagaaagctcaagctgcattcctcctatgggtggaactggaggcatcagaggtcttccttgaagctatggagaaggctgtgaagaacaaagtggctaaagcagttgtacctgctattgatgtgatgtttcaagcactaagcgaatttggaactaaggtagtgccacccaaaaagattctgaagatgctacctgagctgtttgaccatccagaccagaatgtccgggcttcttctaagggtttgacactagagctttgtcggtggattggcaaagaccctgtaaagtctattttatttgagaagatgagagatactatgaaaaaggagttggaagcagagttggcaaatgtgtccggacttgctaagccaactcgaaaaataagatccgaacaagaaaaggaacttgaggaggagtctgtgcccgagacaagcggggctaacacttctgaagaggcagcgacagatgcccctgtggagatcgatgaatatgaccttgttgatcctgtagacattttaaccccactagaaaagtctggattctgggacggtgtgaaagcaacaaaatggtctgagagaagggatgctgtggcagaattaaccaagcttggttcggcaaaaaaaattgctcctggtgattttcatgaaatttgccggacactgaagaagctcatcacagatgttaatttggctgtttcggtggaagctactcaggcaattgggaatttagctagaggtttaagagcccaattttctggaaatgcacgaatgctccttccggttttacttgaaaaattgaaagaaaaaaagccaacaatgacagaagcactatctcaaacacttcaagcgatgcacaagtctggttgttttacacttattgatgtgattgaagatgttcgtgcggcagtaaaaaacaaggtgccccttgttcgttctttaacgctgacctgggttgcattttgcattgaaaccagcaataaagcaactgtactaaagttgcacaaggaatatgttcctatctgcatggagtgcttgaatgatggtactccagaagtacgagatgcatccttttctgttttgactgccattgccaagatggttggtatgaaaccattggaacgatccttggagaaattagatgatgtgaggaaaaagaagttatcagatatgattggttcttccagtgacagtgttttgagttcaggaacagctccaatcacaacatcaggagcagccacatctgctcgcggggttgcagatagcatgtcaatgaagagatctgctgcaagcatgcttagtggaaagaagcctgtccaggcagcggctgctaccaagaaatctggaccgtccaaatccactgcagcaaaaaagacagatggtgggtcacagtctaaggcatcagctgctcttgagattgaagacgttgagctattggcgtactcaaacaagaggtggaaaatcttacggaacttgataagtctgctgaacttctgattcgtttgttgtgtgctgtgcctggatggagcgaaaagaatgttcaggtacaacagcaagttatagaggtcaacacctatattgcctcgactgtaaacaaatttccaaagcgatgtgtggttttatgccttcttggcgtaagtgaaagggttgctgatataaaaacacggacctctgcaatgaaatgtctcactgccttctgtgaggcagtgggtcctggatttgtgtttgagaggctttacaaaataatgaaggagcacaagaatcccaaggttcttagtgagggtattctttggatggtctctgctgtggaagactttgggatctccaatttaaagctaaaggacatgattgatttttgcaaagacaccggtcttcagtctagtgctgctgtaacaagaaatgctactataaaattaattgggatgctacataagtttgtgggcccagatattaaaggctttttaagtgatgttaaaccagcacttctaagtgccctcgatactgaatatgagaaaaatccttttgagggtgctgctgctgctgctccgaagagaacagttcgagttctggataccgcatcttctgtatctgctggcttgtttgatgggttgccacgagaagacattagtgctaagataacacctactttactaaaaaatctgggcagtccggactggaaggtacgattggagtccatagatgcagtcaccaaaattgtggaggaggctaataaacgtatccagcctacaggaacagctgacctgttcagtgcacttagaggccgtctttatgacagcaacaaaaatttagtaatggcaaccttgtccactattggtggccttgcatatgctatgggaccttctgttgaaaagtcaagcaagggtattttggcagatgtgctgaagtgtcttggtgacaataagaagcacatgcgagaatgcacattgactgctctagattcatggattgctgcagcccaacttgacaaaatggttccatatattatagtgtctttgggtgatcagaaaacaggttcagaagggcgaaaagatctctttgattggttgtctaagcacgtttctaaaatgagtgatccatctgaggctttgcctttgttgaagccatctgcatcttctttgatggataaatcttctgaagtccgcaaagctgctgaatcctttatgaatgaaattctcaggatctgtggccaagaagtggttggaaggaacttgaaagatttgccatcacctactttggctattgtatcagaaaggctgaaactgtctactgtacatgaaggattttctgaatctgttaagatggtgacaacaagcatgagtttgccatcaaaagctggtttgaagaacaataaacatggtcttaatgatcgtggttctaatgtgggcaaacttgtgtcccaaagaggacttcccgccagggcatctgttactatggtttccacccaagaccctgcacaatcccaagcattatttaacataaaggactcaaacaaggaagagcgggagagacgtgttttggtaagaaaattcaagttcgaagaaccacgtcgtgaacagatagatgaactaaagattgatttgtttaagcatttccgagaagatgtaagcctgcgattatggaactcagactttaagaggcaaatcgatggtattgaattgctacaaaaggcacttccttcaagttggaaagaagtgattgaacttcttgacatattattaaggtggtttgtcttacgcttttgtgaatcgaacacaacatgtttgttgaaggttcttgactttcttcctgagctttttgatattttaaaagaccagtcatacatgttgacagaagctgaagctgcaatttttcttccttgcctcatagagaagtctggtcataacattgaaaaagtcagggaaaaaatgggggagctgataaagcaaatgatcaacatttactctcttcccaaactaattccctatatacttgaggggctccgctccaagaataaccggacaaggatagaatgtgttgatattgttggatatttcattgaccatcatgggaccgaggttggtgggttgatgaaaaacttgccatctgttgcagcactgacagcagagcgtgatggtgagattaggaaagctgcccttaatacgcttgcaacagcctacaagaaccttggggatgatgtatggcgatatgttggaaaactctcagatgcccaaagaagcatgctcgatgataggtttaaatggaaggcaagagaaatggataaaaggcgagaaggaaggcctggtgatgcacgagcagctctgaggcgttcagttagggagaatgggtctgatatagcagaacaaagcggagaagtagtgtcccgtccagtggctggatcaatgatctcaagggacttcggatatgcagatgctcatatggataggcacatggtacctaggcagattccaagtacaagtggtcctgtggactggcgcgaagctctcgagatagttgcattaggtttgcctgagcagtccgttgaaggtatgaaagttatatgccatgagctaacacaggcagctgaccctgaaagcacattgcttgaagatcttattaaggaagctgacagattagtgtcatgcttggctgttatggttccgaaaaccttcaattttagcttatctggtgcttcttcaaggtcttgcaaatatgtgttaaacacactcatgcagacatttcagatcaaacgtcttgctcatgctgtgaaggagggtacccttgacaaccttattacggagttacttctttggcttttagatgaaagggttcctcttatggatgatggcagccaattactcaaagcactaaatgttttgatgcttaaaatcttggataatgctgagagaacatcctcgtttgttgtgctgattaatttgctgaggcctttggacccttcaagatggccatcgcctacaccaacggagtctcttgctgtaaaaaatcagaagttttcagacttagttgtcaaatgtttaattaagttgacgaaggttcttcagagtacaatatatgaagttgaccttgatcgaattcttcagagcatccatatttatttacaagaacttgggatggaagaaatacggagaagggctggtgctgatgacaagccattgagaatggtcaaaactgtcttgcatgaacttgtgaagcttcggggaacggcaataaagggtcacctttcaatggttcctatagatgctgaacctcagccaataattctagcatacattgatctcaatctccagacccttgcagccgctagaatgttgacgccatcggggcctatgggtcaaactcactggggtgatgctgcatcgaacaatccaaatccatctactcactcagctgacgcgcaattgaagcaagagcttgctgctattttcaagaaaattggtgacaagcaaacatgtaccattggcctctatgaactgtatcggataactcagctctacccaaaggttgatatatttgctcagcttcagaatgctagtgaagcgtttagaacctatatcagagatggcctagctcaggtggagaagaatgcagcagctggaagaatgccttccagtcttccattatccacgccgcccccaatagcagcaatacccaatccaaaatttgcaccatcccctgttcacacaaaatcaatcggtaaaacagattataacgaagataatgccagtggtgagacacaacccttcagaggtcaaggtgccatcaccgaccaacaaactgatagataccatacctcaggcacgttggatgctcttagggaaaggatgaaaagcattcaagcggcagctataggtcattttgacggtgctcaggctcggccgttggcaagtatgaacggaagtaatatggtgcatgggggaactcgattggacggtgaaccccaacaacgaagtaatataccacccatggatgagcgagctctatctgggctgcaagcacgaatggagagactaaagagtgggtctatggaattacaatagatacgataacaattctgagaaataccaactattgtagttctttgtaaatttgaggcatagtgatggtgttctttgtagataggtatttgaatgtcggaagaactatatggcacggggtcaacatttcgtaacccatgtgtcaagccattcttgcagagcctttggatgcagttttagataagaggtagccaaatgttttccttgttgctactccaagggctaattagtgttgacacattttgccgtactgtattggttttcctgtggtgtacagcaatagaatttttcattctaaattaactggaaatgttacttgtgaaatatatggtttttgaaatgcatatccgtatggtttcacatttatttgattatctgaatgggattttgat

SEQ ID NO: 74910 - DNA, 6419 bp, Zea Mays
tctccaccccctccgtcctccgatccaaactaccgacgaacgccaccacccgaattcgaaaccctaggcggccgctgtagaacacgtgaggctgtagtgcctcttgttcggtggagccggcccgcggcagccggctatgtcgacggaggacgagaagctcctcaaggaggcgaagaagttgccgtgggacgagaggttgcagcataagaactggaaggtgaggaacgacgcaaacatcgacctcgccgctctatgcgactccatcaccgaccctaaggatgcccgcctccgcgagttcgggccgttgtttaggaagacggttgcagattccaatgcgccggtacaggagaaggcgctcgatgcccttctcgcgttccagcgagctgctgacgccgatgcatcaagatacgcgaaggaggtctgtgattcaatcgtggccaagtgcctcactggccgaccaaagactgtcgagaaagctcaagctgcattcctcctatgggtggaactggaggcatcagaggtcttccttgaagctatggagaaggctgtgaagaacaaagtggctaaagcagttgtacctgctattgatgtgatgtttcaagcactaagcgaatttggaactaaggtagtgccacccaaaaagattctgaagatgctacctgagctgtttgaccatccagaccagaatgtccgggcttcttctaagggtttgacactagagctttgtcggtggattggcaaagaccctgtaaagtctattttatttgagaagatgagagatactatgaaaaaggagttggaagcagagttggcaaatgtgtccggacttgctaagccaactcgaaaaataagatccgaacaagaaaaggaacttgaggaggagtctgtgcccgagacaagcggggctaacacttctgaagaggcagcgacagatgcccctgtggagatcgatgaatatgaccttgttgatcctgtagacattttaaccccactagaaaagtctggattctgggacggtgtgaaagcaacaaaatggtctgagagaagggatgctgtggcagaattaaccaagcttggttcggcaaaaaaaattgctcctggtgattttcatgaaatttgccggacactgaagaagctcatcacagatgttaatttggctgtttcggtggaagctactcaggcaattgggaatttagctagaggtttaagagcccaattttctggaaatgcacgaatgctccttccggttttacttgaaaaattgaaagaaaaaaagccaacaatgacagaagcactatctcaaacacttcaagcgatgcacaagtctggttgttttacacttattgatgtgattgaagatgttcgtgcggcagtaaaaaacaaggtgccccttgttcgttctttaacgctgacctgggttgcattttgcattgaaaccagcaataaagcaactgtactaaagttgcacaaggaatatgttcctatctgcatggagtgcttgaatgatggtactccagaagtacgagatgcatccttttctgttttgactgccattgccaagatggttggtatgaaaccattggaacgatccttggagaaattagatgatgtgaggaaaaagaagttatcagatatgattggttcttccagtgacagtgttttgagttcaggaacagctccaatcacaacatcaggagcagccacatctgctcgcggggttgcagatagcatgtcaatgaagagatctgctgcaagcatgcttagtggaaagaagcctgtccaggcagcggctgctaccaagaaatctggaccgtccaaatccactgcagcaaaaaagacagatggtgggtcacagtctaaggcatcagctgctcttgagattgaagacgttgagccggcagaaatgagtttcgaggaaatagaagagaggttaaagtctgttgtgaaagctgagacaatttcccagctaaagagctctgtctggaaagagcgtcttgaagctattggcgtactcaaacaagaggtggaaaatcttacggaacttgataagtctgctgaacttctgattcgtttgttgtgtgctgtgcctggatggagcgaaaagaatgttcaggtacaacagcaagttatagaggtcaacacctatattgcctcgactgtaaacaaatttccaaagcgatgtgtggttttatgccttcttggcgtaagtgaaagggttgctgatataaaaacacggacctctgcaatgaaatgtctcactgccttctgtgaggcagtgggtcctggatttgtgtttgagaggctttacaaaataatgaaggagcacaagaatcccaaggttcttagtgagggtattctttggatggtctctgctgtggaagactttgggatctccaatttaaagctaaaggacatgattgatttttgcaaagacaccggtcttcagtctagtgctgctgtaacaagaaatgctactataaaattaattgggatgctacataagtttgtgggcccagatattaaaggctttttaagtgatgttaaaccagcacttctaagtgccctcgatactgaatatgagaaaaatccttttgagggtgctgctgctgctgctccgaagagaacagttcgagttctggataccgcatcttctgtatctgctggcttgtttgatgggttgccacgagaagacattagtgctaagataacacctactttactaaaaaatctgggcagtccggactggaaggtacgattggagtccatagatgcagtcaccaaaattgtggaggaggctaataaacgtatccagcctacaggaacagctgacctgttcagtgcacttagaggccgtctttatgacagcaacaaaaatttagtaatggcaaccttgtccactattggtggccttgcatatgctatgggaccttctgttgaaaagtcaagcaagggtattttggcagatgtgctgaagtgtcttggtgacaataagaagcacatgcgagaatgcacattgactgctctagattcatggattgctgcagcccaacttgacaaaatggttccatatattatagtgtctttgggtgatcagaaaacaggttcagaagggcgaaaagatctctttgattggttgtctaagcacgtttctaaaatgagtgatccatctgaggctttgcctttgttgaagccatctgcatcttctttgatggataaatcttctgaagtccgcaaagctgctgaatcctttatgaatgaaattctcaggatctgtggccaagaagtggttggaaggaacttgaaagatttgccatcacctactttggctattgtatcagaaaggctgaaactgtctactgtacatgaaggattttctgaatctgttaagatggtgacaacaagcatgagtttgccatcaaaagctggtttgaagaacaataaacatggtcttaatgatcgtggttctaatgtgggcaaacttgtgtcccaaagaggacttcccgccagggcatctgttactatggtttccacccaagaccctgcacaatcccaagcattatttaacataaaggactcaaacaaggaagagcgggagagacgtgttttggtaagaaaattcaagttcgaagaaccacgtcgtgaacagatagatgaactaaagattgatttgtttaagcatttccgagaagatgtaagcctgcgattatggaactcagactttaagaggcaaatcgatggtattgaattgctacaaaaggcacttccttcaagttggaaagaagtgattgaacttcttgacatattattaaggtggtttgtcttacgcttttgtgaatcgaacacaacatgtttgttgaaggttcttgactttcttcctgagctttttgatattttaaaagaccagtcatacatgttgacagaagctgaagctgcaatttttcttccttgcctcatagagaaggttggtgggttgatgaaaaacttgccatctgttgcagcactgacagcagagcgtgatggtgagattaggaaagctgcccttaatacgcttgcaacagcctacaagaaccttggggatgatgtatggcgatatgttggaaaactctcagatgcccaaagaagcatgctcgatgataggtttaaatggaaggcaagagaaatggataaaaggcgagaaggaaggcctggtgatgcacgagcagctctgaggcgttcagttagggagaatgggtctgatatagcagaacaaagcggagaagtagtgtcccgtccagtggctggatcaatgatctcaagggacttcggatatgcagatgctcatatggataggcacatggtacctaggcagattccaagtacaagtggtcctgtggactggcgcgaagctctcgagatagttgcattaggtttgcctgagcagtccgttgaaggtatgaaagttatatgccatgagctaacacaggcagctgaccctgaaagcacattgcttgaagatcttattaaggaagctgacagattagtgtcatgcttggctgttatggttccgaaaaccttcaattttagcttatctggtgcttcttcaaggtcttgcaaatatgtgttaaacacactcatgcagacatttcagatcaaacgtcttgctcatgctgtgaaggagggtacccttgacaaccttattacggagttacttctttggcttttagatgaaagggttcctcttatggatgatggcagccaattactcaaagcactaaatgttttgatgcttaaaatcttggataatgctgagagaacatcctcgtttgttgtgctgattaatttgctgaggcctttggacccttcaagatggccatcgcctacaccaacggagtctcttgctgtaaaaaatcagaagttttcagacttagttgtcaaatgtttaattaagttgacgaaggttcttcagagtacaatatatgaagttgaccttgatcgaattcttcagagcatccatatttatttacaagaacttgggatggaagaaatacggagaagggctggtgctgatgacaagccattgagaatggtcaaaactgtcttgcatgaacttgtgaagcttcggggaacggcaataaagggtcacctttcaatggttcctatagatgctgaacctcagccaataattctagcatacattgatctcaatctccagacccttgcagccgctagaatgttgacgccatcggggcctatgggtcaaactcactggggtgatgctgcatcgaacaatccaaatccatctactcactcagctgacgcgcaattgaagcaagagcttgctgctattttcaagaaaattggtgacaagcaaacatgtaccattggcctctatgaactgtatcggataactcagctctacccaaaggttgatatatttgctcagcttcagaatgctagtgaagcgtttagaacctatatcagagatggcctagctcaggtggagaagaatgcagcagctggaagaatgccttccagtcttccattatccacgccgcccccaatagcagcaatacccaatccaaaatttgcaccatcccctgttcacacaaaatcaatcggtaaaacagattataacgaagataatgccagtggtgagacacaacccttcagaggtcaaggtgccatcaccgaccaacaaactgatagataccatacctcaggtcgccatcctactcagcctcgatgctaattatatgctatcaatgtttatgtgatctgattattggaatcattatttctgtaccagcaggcacgttggatgctcttagggaaaggatgaaaagcattcaagcggcagctataggtcattttgacggtgctcaggctcggccgttggcaagtatgaacggaagtaatatggtgcatgggggaactcgattggacggtgaaccccaacaacgaagtaatataccacccatggatgagcgagctctatctgggctgcaagcacgaatggagagactaaagagtgggtctatggaattacaatagatacgataacaattctgagaaataccaactattgtagttctttgtaaatttgaggcatagtgatggtgttctttgtagataggtatttgaatgtcggaagaactatatggcacggggtcaacatttcgtaacccatgtgtcaagccattcttgcagagcctttggatgcagttttagataagaggtagccaaatgttttccttgttgctactccaagggctaattagtgttgacacattttgccgtactgtattggttttcctgtggtgtacagcaatagaatttttcattctaaattaactggaaatgttacttgtgaaatatatggtttttgaaatgcatatccgtatggtttcacatttatttgattatctgaatgggattttgat

SEQ ID NO: 74911 - DNA, 2451 bp, Zea Mays
gtctgaattggtatcttcacccatttgtcacactgacagcagagcgtgatggtgagattaggaaagctgcccttaatacgcttgcaacagcctacaagaaccttggggatgatgtatggcgatatgttggaaaactctcagatgcccaaagaagcatgctcgatgataggtttaaatggaaggcaagagaaatggataaaaggcgagaaggaaggcctggtgatgcacgagcagctctgaggcgttcagttagggagaatgggtctgatatagcagaacaaagcggagaagtagtgtcccgtccagtggctggatcaatgatctcaagggacttcggatatgcagatgctcatatggataggcacatggtacctaggcagattccaagtacaagtggtcctgtggactggcgcgaagctctcgagatagttgcattaggtttgcctgagcagtccgttgaaggtatgaaagttatatgccatgagctaacacaggcagctgaccctgaaagcacattgcttgaagatcttattaaggaagctgacagattagtgtcatgcttggctgttatggttccgaaaaccttcaattttagcttatctggtgcttcttcaaggtcttgcaaatatgtgttaaacacactcatgcagacatttcagatcaaacgtcttgctcatgctgtgaaggagggtacccttgacaaccttattacggagttacttctttggcttttagatgaaagggttcctcttatggatgatggcagccaattactcaaagcactaaatgttttgatgcttaaaatcttggataatgctgagagaacatcctcgtttgttgtgctgattaatttgctgaggcctttggacccttcaagatggccatcgcctacaccaacggagtctcttgctgtaaaaaatcagaagttttcagacttagttgtcaaatgtttaattaagttgacgaaggttcttcagagtacaatatatgaagttgaccttgatcgaattcttcagagcatccatatttatttacaagaacttgggatggaagaaatacggagaagggctggtgctgatgacaagccattgagaatggtcaaaactgtcttgcatgaacttgtgaagcttcggggaacggcaataaagggtcacctttcaatggttcctatagatgctgaacctcagccaataattctagcatacattgatctcaatctccagacccttgcagccgctagaatgttgacgccatcggggcctatgggtcaaactcactggggtgatgctgcatcgaacaatccaaatccatctactcactcagctgacgcgcaattgaagcaagagcttgctgctattttcaagaaaattggtgacaagcaaacatgtaccattggcctctatgaactgtatcggataactcagctctacccaaaggttgatatatttgctcagcttcagaatgctagtgaagcgtttagaacctatatcagagatggcctagctcaggtggagaagaatgcagcagctggaagaatgccttccagtcttccattatccacgccgcccccaatagcagcaatacccaatccaaaatttgcaccatcccctgttcacacaaaatcaatcggtaaaacagattataacgaagataatgccagtggtgagacacaacccttcagaggtcaaggtgccatcaccgaccaacaaactgatagataccatacctcaggtcgccatcctactcagcctcgatgctaattatatgctatcaatgtttatgtgatctgattattggaatcattatttctgtaccagcaggcacgttggatgctcttagggaaaggatgaaaagcattcaagcggcagctataggtcattttgacggtgctcaggctcggccgttggcaagtatgaacggaagtaatatggtgcatgggggaactcgattggacggtgaaccccaacaacgaagtaatataccacccatggatgagcgagctctatctgggctgcaagcacgaatggagagactaaagagtgggtctatggaattacaatagatacgataacaattctgagaaataccaactattgtagttctttgtaaatttgaggcatagtgatggtgttctttgtagataggtatttgaatgtcggaagaactatatggcacggggtcaacatttcgtaacccatgtgtcaagccattcttgcagagcctttggatgcagttttagataagaggtagccaaatgttttccttgttgctactccaagggctaattagtgttgacacattttgccgtactgtattggttttcctgtggtgtacagcaatagaatttttcattctaaattaactggaaatgttacttgtgaaatatatggtttttgaaatgcatatccgtatggtttcacatttatttgattatctgaatgggattttgat

SEQ ID NO: 74912 - DNA, 2519 bp, Zea Mays
ccgcccattaggcccgacccaaatgtacacctatagatataagtaagggagacgaagttatttagtgatatgtaacattgattttgatgatgtgttaagtttggatgtaatttgtttgatgaatttagtggaagttataggtgtaaaggtgatttgttaaattggtggattatagaaacatggtaagaaaaagtaaaaaaataataaaaaaccggccaggaggaaaaggggccaaacgaaacacaccaccaccactcgtcgtctcgtccgctcgcgcaccacgcacggcgcggtgccgactgtcgagtaaccccccattcgcattccccagccccaccgatcggatcggcaaaatcccccaccagatcccggcgcccccaccacacagcgctcgcgcctccctgcttcccaattcccgtctgcccggccgcggagcggagctgctcctgccccccgtcgccacgccacgatggcggagtgccgcagcctcatcgagttcctccgcgcgttcgagcaccaccgcagggcggccgacagctccgcctccgcgtgctcccgatccaggcgggcgtccgccgccggtggctccttctgcgacaacaccccgatggccgtgatcgacgcggtcatgctcctcgccgtcgtcatcgcgatcggcttcctcctgatcccgtacctcaagctgctcctcctcgagatgggcgcgatgctccaccccgccgcgtcctgcctcccggccgccgccttcttcggggccgcggtcgccgtcgccgcggtggtcgtcgcgtgggagctgctgggccaccacgctcgcaagtgcggcaagcccaggtgcagggggctcaagaaggccgtcgagttcgacatccagcttgagactgaggagtgcgtgcgcggccgccccggccccacggcgcgatcagcgctgcttgcggcggcgggggcgcgtcctgtggagctaggcgacgagcagcgggagttggaggctgagctgcgaaagatggcgccgcccaacggccgtaccgttctcatcttccgcgccccctgcgggtgccccaagggccgcatggaggtctggggcgccaagaaggtgcgccggatcaaaaagtaaagcggggcaaggatcggatggttactagttagtgcaatagtaccagtgcactcttgttccttcctcaatcctcataagtagctcctgctagaaaaaaatttaaaaaaaatcctcagttagcaataataagtataagtatagggtgattaaataaacggatcacagaaccagttatatcacagatagcttatatagacaatcatatactccttgtattatgaatcatggggaatttcgacagaaatacatgctttttacttgttcattctctaattttcatgggatcctggataactgatattacagtagcaacatagctagtatcttactgaatccttgatttccgtagctgactactcctttgtctgccttttgaatccttgatttccatctgtattatggtgcgggttagttgctacttgtctgtcttgaaatgtttttgctgttgattcaatgttattgaggtgaagttttagctccttgatggtagattgacaaccaactcccattagttgagattttaattttagcttctggacatcccaactatgagcatggtagaatttgtgtcatccagctactcttaaattggtaacccgatgaacttcacaaagtttcaatgtaatggtcttaaattcaaccatcaaaagttctggtacggtagtatgtcttccctcaaaagaaatccttccttgattacaagttgaaacctactttctatgaattcatgaataaaatgttgggtgtgcatgggtacagctttattttagctgaggagtcctgatactaaatttttaccctacccatgcctaaataattgcagttcctaatgttagtacacgtgccttacttttctttttacttaagcaataggctggctcattttatcttgtcataatcttcaatctgtgacatgcctttgtggctgttcctgtgtggcatactggcatacctaccagttgaagtggtgagtgattctgtaatgtaatatggtctgtttttatatgtcatataacaatataacactaccatcatttatctgtatgcttggcatgagacatacttcatactatatattccatccgtgtttagttcaaaaatgaactagcggacgataaatattcgagaacggaggtagtatgttattaaattcccttgtacagttgtactccgtctcccaaaatattatgttttgggtgctttcagtgatactgcctactttttaagttttgaatgggttttcattttcttttcctggcttacctgcttttctaccatattttctccaggctaaaatttacttttcattagcttagcggctccagcctccagtgtcataaacagagtagcagaccattgcagaagacttccttttctgagctataacaccacgcacactttatagttg

SEQ ID NO: 74913 - DNA, 2008 bp, Zea Mays
cccacatgtcagagaccgaaataaactagcataagacacacccccaaagcggcctctcgccgcaccaacagccaatccggacctctcgcctcctctctcgcgttgtcctcgccgcgccctgctccggttccccaatccttcgccccgcctccgttgcctaccgtctcctccgagccagatcgatacaagcggagccgtgatccggtcaacgcgcggagcgtgttagccggattctctcgccgtcgcctcccctcccctcccgccgccgtcaccgccgtttctggttgcccgggatcagccgagttggatctcgaggcgtgaagcgttgcgggcgcccggcgaggatacgatgcctgcggtgctcgccgcattcgcttgcctccgactccgagcggccgctgccatcgccttcggggactcctccttcctctgctcccatcgtcttaagcatcattttagtagtaattttagtattagtaattgtctttgacctttacgtttcctccgtcacccacacccccctccggtttcgttctggttgtgttcgattcgtggcttctttggctctgtcgcaggatcgaaaggaggcaaggtgttttaacgtggttattactacctacaagataacagaaacttgtatttgtaatttgagatcaagcttgtggatgggcgaaccctcagcggacttcagtgctgaagatgttagtagcatctcagaagtgacgacgatcgatctgttggcggttgacgaagggtcaggtctgcatgaagattctgatgacgattacatcgatgatccaattctttctctggaatctgattcaactgatgatttagtgaacgttgattttatatcacctgcctttcctattggtggtgtaacagaatcatcaattagcaattcagttgctgggaattcttcaattaatggcactccaaggttagtttctgcaatgaaaggaactcgtgccaagaagggaatcaaaacaaagttgagcgtttcatgggccactgatgtatatgacccacctattacttcagactcgcacactgtgaaagggcaccgtaagagttcaactaagggtaactacaaatacaagtgttccaagagcagcagtagcagtaaccacagtaccactggaagcaaaaaggacaagaagcattctaggcaccgtagcagcagtgggggtggcagcaaaagggacaggaaacattcttactgcagtagtgctagcagcaacagtagcagagttgttaccaacggttctctatatggtaacacatgcagtggcggtgggatcagcagcagcagcagaactacgacatgtgttcctgaatctgccaaggtatctacattgatggtagctgaaaatgcgacaccacaagagagagttcctgtattgaagacaccggaaccaatcaaatgtactaccagctacggcaaagagaagccatttgccttgctgtcgcgccagtttccccctgcaagatacaaggggatgttctccttctggagccaaaaccagctggcttcttgataatctgctatacggaaagctgctatacagaaagctcacctggaagtcttggttgctaattaaattgcactgcatctgtgattgttttttggtgtcgttctcttcgttgccatgtttcttttgcctgcgtctgaaacttcagagatcacgttttcgaaaattgctcagcgaagtgcttgtatatttgagtttatgttgttactatttcctcaccgaatcgtgtaattcgcttatcaatttcatcatgtgttttgtattattccatttgagatcatgcactattatttccacacctacactgtagcaagggactggtttagtcttctgtactttggttattatgttggaattgcaacgattacagtaaatgagaatgacatcacctgatgcttaggacataagacatgttgatttattccaaaacttgtttggaaatctggaaagcattcatggaacaacatggcagtgta

SEQ ID NO: 74914 - DNA, 2018 bp, Zea Mays
cataagacacacccccaaagcggcctctcgccgcaccaacagccaatccggacctctcgcctcctctctcgcgttgtcctcgccgcgccctgctccggttccccaatccttcgccccgcctccgttgcctaccgtctcctccgagccagatcgatacaagcggagccgtgatccggtcaacgcgcggagcgtgttagccggattctctcgccgtcgcctcccctcccctcccgccgccgtcaccgccgtttctggttgcccgggatcagccgagttggatctcgaggcgtgaagcgttgcgggcgcccggcgaggatacgatgcctgcggtgctcgccgcattcgcttgcctccgactccgagcggccgctgccatcgccttcggggactcctccttcctctgctcccatcgtcttaagcatcattttagtagtaattttagtattagtaattgtctttgacctttacgtttcctccgtcacccacacccccctccggtttcgttctggttgtgttcgattcgtggcttctttggctctgtcgcaggatcgaaaggaggcaaggtgttttaacgtggttattactacctacaagataacagaaacttgtatttgtaatttgagatcaagcttgtggatgggcgaaccctcagcggacttcagtgctgaagatgttagtagcatctcagatgatttggcggttgaggaaattggaatcgctcttacagaagtgacgacgatcgatctgttggcggttgacgaagggtcaggtctgcatgaagattctgatgacgattacatcgatgatccaattctttctctggaatctgattcaactgatgatttagtgaacgttgattttatatcacctgcctttcctattggtggtgtaacagaatcatcaattagcaattcagttgctgggaattcttcaattaatggcactccaaggttagtttctgcaatgaaaggaactcgtgccaagaagggaatcaaaacaaagttgagcgtttcatgggccactgatgtatatgacccacctattacttcagactcgcacactgtgaaagggcaccgtaagagttcaactaagggtaactacaaatacaagtgttccaagagcagcagtagcagtaaccacagtaccactggaagcaaaaaggacaagaagcattctaggcaccgtagcagcagtgggggtggcagcaaaagggacaggaaacattcttactgcagtagtgctagcagcaacagtagcagagttgttaccaacggttctctatatggtaacacatgcagtggcggtgggatcagcagcagcagcagaactacgacatgtgttcctgaatctgccaaggtatctacattgatggtagctgaaaatgcgacaccacaagagagagttcctgtattgaagacaccggaaccaatcaaatgtactaccagctacggcaaagagaagccatttgccttgctgtcgcgccagtttccccctgcaagatacaaggggatgttctccttctggagccaaaaccagctggcttcttgataatctgctatacggaaagctgctatacagaaagctcacctggaagtcttggttgctaattaaattgcactgcatctgtgattgttttttggtgtcgttctcttcgttgccatgtttcttttgcctgcgtctgaaacttcagagatcacgttttcgaaaattgctcagcgaagtgcttgtatatttgagtttatgttgttactatttcctcaccgaatcgtgtaattcgcttatcaatttcatcatgtgttttgtattattccatttgagatcatgcactattatttccacacctacactgtagcaagggactggtttagtcttctgtactttggttattatgttggaattgcaacgattacagtaaatgagaatgacatcacctgatgcttaggacataagacatgttgatttattccaaaacttgtttggaaatctggaaagcattcatggaacaacatggcagtgta

SEQ ID NO: 74915 - DNA, 3601 bp, Zea Mays
agcagcccctccaaaaaatctcaaacaactcttcagcacgggaaaacccgtacacaccacagcaccgtcgccaatgtccgccgccgcagccgactggcttccgtcagcgtccgtgacggcatccggccgcccggtgctttccgcgggcgaggtggagcggaatctcctcccgctcgtcgacctcgagcccgaggaaaatccgcgccttgctcccctccgcgcctgcctcctcgcgctgacttcccaccgcctcatcttcctccacgagccctcccgctccgcgcgcggcctgccgctcgccaccgtcgtccatgcgtaccctccccaccgcaggcacagccacaaccccctccgctccctcttctccgccccgtcctcatcttcctcgtctcagcatcaccgcatccgcctccagatctccatgccacccgtgcgatcagaggtcatcgccatcgtcgtgacctgcaaggctgacgttgatgtgttcttcgggaggctgctcgaggcgatccgtgcaagggcttgggaggtgacccctgcagctgctccgtcgagtggcacgtcggtggcagagggggccgcgcctacggaggacatcgcgatacggatgccggttgttggggtctcggggatactgcggatggagcaggagtcatgggagaacgccgggcagaacttgcaagatgcgttccaggatctcaatgccctcatgagcaaagctaaggaaatgatgcagttagcagaaaaaatgaggctcaagctattaatgaactcatccactgaatcaaattccaatgatgaagagatgggttctaagcaagacatgcaggatttgctgttgagtgttggcattgtgtctcctgtgacgaaagaaactgctggtgcgttgtatcatcagcagttgtcactacaggtaacatgcaattgttttttatgtagcttgttttggactataaattggctttgataatgctcaatttttttaagaagtttgtgtggattaggtcaatatttagttcagtgcctcattgccgtatggcgcaagcacaataatatatttccagaagcacagcaatatattttcaggatatatacctttctcctccatctagtgggaatcacaacttctagtggttaataattacagcttacagttcatttttgtatgtcagctagattcctcaaccatttagcaatttactattactagaatttattcaggagatttggtcccatcttgtcagtgaagatgtgtacataaatcaaatatttagtttgaggttcacaccatatgaataatgcactaattatatatacagaaaaaatagcttgtatttaacagttatggccctgtttggcaagcctgctacttagggtttgattgtatgtgtatgaactctgtcacacacttcctacaagcacaaacaaccacacccgagaacacaagcggaaatacaaatacatatgcagtatgaataagcacgaggcaaaccaatcaggagacgcaaggatttgtttgactagagaacgggccaccacaactccacaaggcgccctacgtctccattgtggaagtcagtgagggacccatcaaggtctactcttggtcagacttgaaataacctctttccaccaatccactaagaagtcttctttccactttcagtgggaagactagcctttcttacaagaccaacgcaaacagcctacacaccctcgggtcctgctggtgacattttcccacctaagaacaaagttccaagagaaagatagcaacgaaccaaagatcttcgacttgctcaagttctcgaggatgggataactctcaaagcttcccaagctctgtattgccacaaaggcaagctcacgaagtttgggacaccccctaatcaaggtttaagctttctctattcaaacactcacaaagagagggagaggaatgcccaaggactattctggtcgttgataagagtggggaggatcaacaacatgaaatggtgagtggaagaggtatttatagccatcacgccaaaactagttgtttgagtttgagttgacaaatccgacctagccgggtattcaaaccgactagccgttggcccagaagttggtctggtcgggtttgtggttggggctaaaattttgagtggagttttacttactctctcttactcttgggtttatctgaagcaccattttgcatgcctcgatcttggtgaaacatccctcttgatagtgtggcaatactcaactcacaaaaaataaaaggatctgaaccaccatttgagtttttcttcaattcaatcttggttgccatttttactattgttattttgagggtcttcattacttcaacttcttgagcttgtccatcttgagcatgtgagttgtgtcgaaggtttcaagtcactttgaatattcgattgatcttctacattgacaaccatcacttgattagtgcctcaactcaatgcaagtaaattttttattcacttttagctaggtccatcggctgtcaggccatcgcttgcccttcacctttcacagaagtcaggagcttgcttttgtttcgctccgatgatgccaaatgggcaattttacctatactgtgcttcttagaaaagattgcttgtagagaaaaccagcttctgtgaaaagcacctacaagttaagctcttccaaacatggcctatatatttttcctccatctggtggaaaatttatagtgagtaattacagttcattttcatatgtgatctagactcaaccatttactaatttactgttactagaatttattcaggagctctgaccctatcttgtcagtgaagatgtgaacacatatagggaagggatacattaaaggaaaaatcttgagaatgttatcatttactccctttgtttcactatgtttgtccatggccttgggataatacgtcctgcaatgtttgtcaattgaggatatcaagagtttaagttggtgcaacattttcaatctattatcactaattaaatgctttcaaagaagagaaataattgtgtcatgttttgtgttactagatttttttttccttgtaattactactgtcttaggtagtgtgcatgatgtcctatggacaagcatagtgaaattgaaggaatatgaacgctaagccatcaatagttgcaagattcacactcttatatattcaattggcaggaggcaaggataaaagtttgttcatgccttcagagaatcagagtttccttttaatctgagaaacacatttatatattctccattcctccttagtttctagctgcattatactccctccgttccaatttataattcgtttgacttttttaccccaaatttgacaggctcgtcttattcaaaaaaatcataataataattattttttactatgatatcgtgtactttataatatactttaggtatgactttgatttttttattttttcacaaaaaatttgaataagacaagctggtcaaacttgacacacaaaagtcaaacgaattataaattaggacagagggagtactaaaaagtgtcagacttgttattgtccaatgattattttgtccatttgttgtcag

SEQ ID NO: 74916 - DNA, 2388 bp, Zea Mays
agcagcccctccaaaaaatctcaaacaactcttcagcacgggaaaacccgtacacaccacagcaccgtcgccaatgtccgccgccgcagccgactggcttccgtcagcgtccgtgacggcatccggccgcccggtgctttccgcgggcgaggtggagcggaatctcctcccgctcgtcgacctcgagcccgaggaaaatccgcgccttgctcccctccgcgcctgcctcctcgcgctgacttcccaccgcctcatcttcctccacgagccctcccgctccgcgcgcggcctgccgctcgccaccgtcgtccatgcgtaccctccccaccgcaggcacagccacaaccccctccgctccctcttctccgccccgtcctcatcttcctcgtctcagcatcaccgcatccgcctccagatctccatgccacccgtgcgatcagaggtcatcgccatcgtcgtgacctgcaaggctgacgttgatgtgttcttcgggaggctgctcgaggcgatccgtgcaagggcttgggaggtgacccctgcagctgctccgtcgagtggcacgtcggtggcagagggggccgcgcctacggaggacatcgcgatacggatgccggttgttggggtctcggggatactgcggatggagcaggagtcatgggagaacgccgggcagaacttgcaagatgcgttccaggatctcaatgccctcatgagcaaagctaaggaaatgatgcagttagcagaaaaaatgaggctcaagctattaatgaactcatccactgaatcaaattccaatgatgaagagatgggttctaagcaagacatgcaggatttgctgttgagtgttggcattgtgtctcctgtgacgaaagaaactgctggtgcgttgtatcatcagcagttgtcactacagctggcggactttgtaagaataccacttgagaaagcaggtggtatgatggcactagtcgatgtttattgtctcttcaaccgtgctaggggaacagagttgatctcaccagaggaccttttgcaagcttgttccctgtgggagaaagttgatgtgtatgtatatcatgcttttaatgattaccgaactagctaagtttacttttctgaagacagtccaggatgatgtgaatagcaaagactaattcaatgccttcccagctggctcgtcaccagccattgatcatggttttgatgttttgcttatagatgttgatttctaatgagcagcccagtcatgctcaggaaatttgatagtggagtgaaggtgatccagaccaaaacacatagtgatgaagaggtaagcactaagcaatcacaacaataagccttaacgcataccgaatgcccactagacaacatattgcagccaatcagcattgactttgttagtgaatgtactgcagccacagattctgcagctgtctatgtttgtacttcgtacatttgccgctatcattgtttttagcactaccactaggcactagcgatcgctgaaccttttcctcaacgaacataggtatttgcaagaatctcatcacttgcacagaagccagatgctcttcagaaagggattagcccaagtgatgctgcattcacactgggaattgctccagctttagcaaaggagcatcttctaaatgcagaaaacaaaggcctgttgtgcagagatgttagtccagatggattccgcttttttagcaatttatttaatgacattgatccccaaaatattcactcgcaaaaaccccatgggatgtacaaggcgtggatctccgttgcgatggcgtctcactgaaaaagttcgactgggatatattgagatactggttgatcaagctggacatcgatgcaattatagtgtactctttgaaaacgtccgatcaagccagtcattggtgcgatcacaatgtatcctttgaaaacgttagtctgcatatctcgccattatgtaccataacaccaaaagatgtgatatagcaattagcaagcccatttgttctgttgaatgaagagcgtttgagtacgatgtatgaggattcgggctacattggtaaccgtattagcatgcgaccagattaacttttctgtactgactccatccaaaaataatgcaactctggtatagtcctaagctgtactacctcaattttcatcaaaattataagacgagttatgatactaaaaagtactgctagatatatatatttttgataaatataatttaacaatgggtctctgtcctttggagatgctcacaagaataaggataagatgtgtgtgtgtgtgttcataggtgtaaatgtatggacatgtatgagcatctatgttggagtgtgatttcaaaataaaaagtatagtgcgtgatatcaaaatgac

SEQ ID NO: 74917 - DNA, 2016 bp, Zea Mays
agcagcccctccaaaaaatctcaaacaactcttcagcacgggaaaacccgtacacaccacagcaccgtcgccaatgtccgccgccgcagccgactggcttccgtcagcgtccgtgacggcatccggccgcccggtgctttccgcgggcgaggtggagcggaatctcctcccgctcgtcgacctcgagcccgaggaaaatccgcgccttgctcccctccgcgcctgcctcctcgcgctgacttcccaccgcctcatcttcctccacgagccctcccgctccgcgcgcggcctgccgctcgccaccgtcgtccatgcgtaccctccccaccgcaggcacagccacaaccccctccgctccctcttctccgccccgtcctcatcttcctcgtctcagcatcaccgcatccgcctccagatctccatgccacccgtgcgatcagaggtcatcgccatcgtcgtgacctgcaaggctgacgttgatgtgttcttcgggaggctgctcgaggcgatccgtgcaagggcttgggaggtgacccctgcagctgctccgtcgagtggcacgtcggtggcagagggggccgcgcctacggaggacatcgcgatacggatgccggttgttggggtctcggggatactgcggatggagcaggagtcatgggagaacgccgggcagaacttgcaagatgcgttccaggatctcaatgccctcatgagcaaagctaaggaaatgatgcagttagcagaaaaaatgaggctcaagctattaatgaactcatccactgaatcaaattccaatgatgaagagatgggttctaagcaagacatgcaggatttgctgttgagtgttggcattgtgtctcctgtgacgaaagaaactgctggtgcgttgtatcatcagcagttgtcactacagctggcggactttgtaagaataccacttgagaaagcaggtggtatgatggcactagtcgatgtttattgtctcttcaaccgtgctaggggaacagagttgatctcaccagaggaccttttgcaagcttgttccctgtgggagaaagttgatgtatgttgatttctaatgagcagcccagtcatgctcaggaaatttgatagtggagtgaaggtgatccagaccaaaacacatagtgatgaagaggtatttgcaagaatctcatcacttgcacagaagccagatgctcttcagaaagggattagcccaagtgatgctgcattcacactgggaattgctccagctttagcaaaggagcatcttctaaatgcagaaaacaaaggcctgttgtgcagagatgttagtccagatggattccgcttttttagcaatttatttaatgacattgatccccaaaatattcactcgcaaaaaccccatgggatgtacaaggcgtggatctccgttgcgatggcgtctcactgaaaaagttcgactgggatatattgagatactggttgatcaagctggacatcgatgcaattatagtgtactctttgaaaacgtccgatcaagccagtcattggtgcgatcacaatgtatcctttgaaaacgttagtctgcatatctcgccattatgtaccataacaccaaaagatgtgatatagcaattagcaagcccatttgttctgttgaatgaagagcgtttgagtacgatgtatgaggattcgggctacattggtaaccgtattagcatgcgaccagattaacttttctgtactgactccatccaaaaataatgcaactctggtatagtcctaagctgtactacctcaattttcatcaaaattataagacgagttatgatactaaaaagtactgctagatatatatatttttgataaatataatttaacaatgggtctctgtcctttggagatgctcacaagaataaggataagatgtgtgtgtgtgtgttcataggtgtaaatgtatggacatgtatgagcatctatgttggagtgtgatttcaaaataaaaagtatagtgcgtgatatcaaaatgac

SEQ ID NO: 74918 - DNA, 2042 bp, Zea Mays
cttacagttcatttttgtatgtcagctagattcctcaaccatttagcaatttactattactagaatttattcaggagatttggtcccatcttgtcagtgaagatgtgtacataaatcaaatatttagtttgaggttcacaccatatgaataatgcactaattatatatacagaaaaaatagcttgtatttaacagttatggccctgtttggcaagcctgctacttagggtttgattgtatgtgtatgaactctgtcacacacttcctacaagcacaaacaaccacacccgagaacacaagcggaaatacaaatacatatgcagtatgaataagcacgaggcaaaccaatcaggagacgcaaggatttgtttgactagagaacgggccaccacaactccacaaggcgccctacgtctccattgtggaagtcagtgagggacccatcaaggtctactcttggtcagacttgaaataacctctttccaccaatccactaagaagtcttctttccactttcagtgggaagactagcctttcttacaagaccaacgcaaacagcctacacaccctcgggtcctgctggtgacattttcccacctaagaacaaagttccaagagaaagatagcaacgaaccaaagatcttcgacttgctcaagttctcgaggatgggataactctcaaagcttcccaagctctgtattgccacaaaggcaagctcacgaagtttgggacaccccctaatcaaggtttaagctttctctattcaaacactcacaaagagagggagaggaatgcccaaggactattctggtcgttgataagagtggggaggatcaacaacatgaaatgctggcggactttgtaagaataccacttgagaaagcaggtggtatgatggcactagtcgatgtttattgtctcttcaaccgtgctaggggaacagagttgatctcaccagaggaccttttgcaagcttgttccctgtgggagaaagttgatgtcccagtcatgctcaggaaatttgatagtggagtgaaggtgatccagaccaaaacacatagtgatgaagaggtatttgcaagaatctcatcacttgcacagaagccagatgctcttcagaaagggattagcccaagtgatgctgcattcacactgggaattgctccagctttagcaaaggagcatcttctaaatgcagaaaacaaaggcctgttgtgcagagatgttagtccagatggattccgcttttttagcaatttatttaatgacattgatccccaaaatattcactcgtaagaaaatcacagccctgccctcctgcaagtttcttttcagatattaccctggatccctgcaagttccttttcagatattacccctttattgattgtgaactttgcaggcaaaaaccccatgggatgtacaaggcgtggatctccgttgcgatggcgtctcactgaaaaagttcgactgggatatattgagatactggttgatcaagctggacatcgatgcaattatagtgtactctttgaaaacgtccgatcaagccagtcattggtgcgatcacaatgtatcctttgaaaacgttagtctgcatatctcgccattatgtaccataacaccaaaagatgtgatatagcaattagcaagcccatttgttctgttgaatgaagagcgtttgagtacgatgtatgaggattcgggctacattggtaaccgtattagcatgcgaccagattaacttttctgtactgactccatccaaaaataatgcaactctggtatagtcctaagctgtactacctcaattttcatcaaaattataagacgagttatgatactaaaaagtactgctagatatatatatttttgataaatataatttaacaatgggtctctgtcctttggagatgctcacaagaataaggataagatgtgtgtgtgtgtgttcataggtgtaaatgtatggacatgtatgagcatctatgttggagtgtgatttcaaaataaaaagtatagtgcgtgatatcaaaatgac

SEQ ID NO: 74919 - DNA, 1152 bp, Zea Mays
gactattctggtcgttgataagagtggggaggatcaacaacatgaaatgctggcggactttgtaagaataccacttgagaaagcaggtggtatgatggcactagtcgatgtttattgtctcttcaaccgtgctaggggaacagagttgatctcaccagaggaccttttgcaagcttgttccctgtgggagaaagttgatgtatgttgatttctaatgagcagcccagtcatgctcaggaaatttgatagtggagtgaaggtgatccagaccaaaacacatagtgatgaagaggtatttgcaagaatctcatcacttgcacagaagccagatgctcttcagaaagggattagcccaagtgatgctgcattcacactgggaattgctccagctttagcaaaggagcatcttctaaatgcagaaaacaaaggcctgttgtgcagagatgttagtccagatggattccgcttttttagcaatttatttaatgacattgatccccaaaatattcactcgcaaaaaccccatgggatgtacaaggcgtggatctccgttgcgatggcgtctcactgaaaaagttcgactgggatatattgagatactggttgatcaagctggacatcgatgcaattatagtgtactctttgaaaacgtccgatcaagccagtcattggtgcgatcacaatgtatcctttgaaaacgttagtctgcatatctcgccattatgtaccataacaccaaaagatgtgatatagcaattagcaagcccatttgttctgttgaatgaagagcgtttgagtacgatgtatgaggattcgggctacattggtaaccgtattagcatgcgaccagattaacttttctgtactgactccatccaaaaataatgcaactctggtatagtcctaagctgtactacctcaattttcatcaaaattataagacgagttatgatactaaaaagtactgctagatatatatatttttgataaatataatttaacaatgggtctctgtcctttggagatgctcacaagaataaggataagatgtgtgtgtgtgtgttcataggtgtaaatgtatggacatgtatgagcatctatgttggagtgtgatttcaaaataaaaagtatagtgcgtgatatcaaaatgac

SEQ ID NO: 74920 - DNA, 1360 bp, Zea Mays
tgatgccaaatgggcaattttacctatactgtgcttcttagaaaagattgcttgtagagaaaaccagcttctgtgaaaagcacctacaagttaagctcttccaaacatggcctatatatttttcctccatctggtggaaaatttatactggcggactttgtaagaataccacttgagaaagcaggtggtatgatggcactagtcgatgtttattgtctcttcaaccgtgctaggggaacagagttgatctcaccagaggaccttttgcaagcttgttccctgtgggagaaagttgatgtatgttgatttctaatgagcagcccagtcatgctcaggaaatttgatagtggagtgaaggtgatccagaccaaaacacatagtgatgaagaggtatttgcaagaatctcatcacttgcacagaagccagatgctcttcagaaagggattagcccaagtgatgctgcattcacactgggaattgctccagctttagcaaaggagcatcttctaaatgcagaaaacaaaggcctgttgtgcagagatgttagtccagatggattccgcttttttagcaatttatttaatgacattgatccccaaaatattcactcgtaagaaaatcacagccctgccctcctgcaagtttcttttcagatattaccctggatccctgcaagttccttttcagatattacccctttattgattgtgaactttgcaggcaaaaaccccatgggatgtacaaggcgtggatctccgttgcgatggcgtctcactgaaaaagttcgactgggatatattgagatactggttgatcaagctggacatcgatgcaattatagtgtactctttgaaaacgtccgatcaagccagtcattggtgcgatcacaatgtatcctttgaaaacgttagtctgcatatctcgccattatgtaccataacaccaaaagatgtgatatagcaattagcaagcccatttgttctgttgaatgaagagcgtttgagtacgatgtatgaggattcgggctacattggtaaccgtattagcatgcgaccagattaacttttctgtactgactccatccaaaaataatgcaactctggtatagtcctaagctgtactacctcaattttcatcaaaattataagacgagttatgatactaaaaagtactgctagatatatatatttttgataaatataatttaacaatgggtctctgtcctttggagatgctcacaagaataaggataagatgtgtgtgtgtgtgttcataggtgtaaatgtatggacatgtatgagcatctatgttggagtgtgatttcaaaataaaaagtatagtgcgtgatatcaaaatgac

SEQ ID NO: 74921 - DNA, 1024 bp, Zea Mays
cctaaccaagcaacgctgcacttcactacaccaccccaaaccaacgctcgctagtcacctaccggctaccgcaccgccgccgccgccgcgcccatctcgcacgcgcagcacaggacgcgcgcgatcccctcgcgtccggatcgccatggcctccacggcgttcgccgccgccaagtacttccccgcgcacctcgactcctccccgcccacatgttcgagcccggcgccttctcgctcggctcccgcgtcgccacgctcgtgtccaagggcgccaccttcgcggtggtcggcttcgcagccgggctcgcgggaaccgcgctctccaacggccttatggcgatgcggaagcgcatggacccggcgttcgagacgcccaacaagccgccgcccacgctgctcaacgcggccacctgggcgctccacatggccggcagcagcaacctgcggtaccagacgctgaatggggtcgagtacatgctcggcaaggtcgcaccggcgccggtgttcaaggcgtccgtcgttgttctccgctgcttgaacaacgtgcttggtggggtgtccttcgtgctgcttgctaggttgactggggcgcaaaaatcagataagccggcgacggtcgcggaagagaaggataggttgatagctgtgggcaatgctgcagcagatgccatcggtgaggcgagagatggagaggagggtaagtaagtggtagaggagaggaacagtaagatgatggtgcatcgtcccacgctcttttgcaagaaacctgtagagttggttggaatggaataaggagtgaggctcaacttcttttcttaaagtcggtttgtggtttgtcgctgttgatgattacttcctccgtttcgttttagttttcgttttagttgtcgctggcgttttagttttcgttttagttgtcgctggatagtgtaaaattaaactattcagcgataactagaaagaaacaaagaaacgaagggagtatatgcttagaacgaagtttttctctcatccttgatcgttg

SEQ ID NO: 74922 - DNA, 1642 bp, Zea Mays
gaaacctagtgtctattttacatttaaccacttccatataaaaccgttggatctagactggatgctctggatagtttgattgcacgcttgcaccaaaatgagtgattgcacaggatatgtcctcaagattaaccactgggtccggcctctcctgaaaccgtcactgttcgaaaaactctaccaccacttctcatctaataggtctgaatctaatgccatgccattataatttctttggaactacttggtacacctatgacctatcggtttcattgttggcaacagaaaattcgaattcgaaataaaaaaaacaatgttgacctgggctaggagcccacaggccacgctcgaaacagattcagcccagcaaccgccaaaaattgggcccgcaaggtggtcggactttcggagttcggctgggctccgaccagttggacatccccggaccctgaaccctagcggctgatttattttctcctttcctcccggcggccggcgctgctctctccttcgacatccgcggcagcgaagactaggccacaaaatcgcggtagcaagcagcagacaggtggggaagatgtcgtcgctgcggaatgcgatcccgcggcgcgctcacaaggagcgcgcccagccggaggcgaggaagaagtttgggcttttggagaaacacaaggactatgtcgtccgggcgcgagcttaccacatcaaggaggcaaccatcgctaaactgaaggaaaaggcggcattcaggaatccggatgagttctattttaaaatgatcaacagtaggactgttggtggaattcatagacctaagcctgaagataataagtatactgaagaggaacttcttctgttgaaaaataaagatatgggatatatccttcagagcgttcaaagtgaaaaaaagaaaatcgaaaagctaagctcaacactccatgaacttgataacaagcctcaaaacaagcatgtttattttgctgaagacagaagcaaaagaaatacaatcaaggataggacaaagcagcaacatgcctgatcttgacaacatcccttctcgtataaagaagaaaatagcctcttcgtacagggagttagaagagaggaagcagcggcttcaaaagcttgagaaattgtatgcagacatggccttgcaaaaagaattgaagaaacctggacgcaagaggaaactgaaactccatgaagatgaagagacggacaatcaaacatcacggcctgtttataagtggcgagcacagaggaaacgatgagatgatatgaatgggctatggagggagtaaaaggcaacatgttagtagtggaagtactggtcagtggaaccgctccttcggaccttaaaatacttccctgtagaagtagccctccacaagaactgtgtctttgtcaaactattgggcttaaagatcagattctgtatgattcaatcatgtgcatcatatatcaattcattgttctgtattatgttgaattcgcctagggatgggctatttttgtgatccattttgagatcagcaagtaatgccagatacaataggatagatccaacacaatgtatccctatacaatgtatccctatacaataggatagatcagcaagtaatgcctagcgttgggcttgacc

SEQ ID NO: 74923 - DNA, 2931 bp, Zea Mays
ggggggaacacaattgcataacatgaacaagttgcttctttacggaagtacatggctaagtaaaacatgcatcgtgttacacaaaacatgcaccatgcatgctgcagaatacaacgttctgaccgcacttaagcatggtccaggatagaaagcactcttgttctactgttctttatgaccaaacaagaaaatggacgacaacttgtcaacagacccaagtattttgacccactgtagtgtttaaaaagatgccctcatcacactacactcgcaatggacacaaagtgcttggaacttagactgacctcaattattctcaaattacctcgagtgcaggacactaggactaatccaatcaaaacaagatatatagtaatatttttctggaaatggatgccctctcagatgataacataagattctaggcacatatcatttcaaatcactcatgtaaaagtaacagaaaaaaaaagtaaacggaatcttctctttgttaaaaaaatattcaggcacgtcggcaacaatacaatggccacatgagctaaaccttgaactaattatttatggatcaattacatatacatacaaatgagtgagggcaaaaatacaaaacaaagtatcaaacaacgatgctgaactgacaggatcagacatgaaacatagcagatgaacttactgcacttgagagcctaaatgttttcaggtgtaatttatctttacaaagcatgcaataagatagaaactggcaatgaaacttacttgctcagaggaatatgctcaaatggtccagacgtgggaatcgtcccgcacaaatcattacttgaaacatcactgaaataataaggtgggtagattgtaaaattgagtattagtgtggaaagaatagaattctaaacatttgaggctgacgtgtactcacacaactttgagactagatattccagcgagttcccttgggatgggcccagtcaaatgattgccattgagacgcaagaatacaagggacttcaactttccaagggcaggaggtattgtccccgaaatgttgttcttgtacaagtcgaagcttattagattcttcaaattgccaagctcagaagggattgttccttgaatgttattcttataaagttccctgtttcagtgctaacggtcaatactgttataatttgtcaaactaagtgaaaaaatgtctgagtataccaggcccttgtatcatgagtcataactgcaaacaaatagaacgtggacagatttgcagcttatataaaattgttcctacctaccctttaaaattacaaaattaggcattgaatgtctaaaatcatgaacagggttcaggagggtcctatcgtagtagggaggtattgaaacatgaccctatctacctgattaaccaagaatgacaagcatagtttatatagtataaactaaagatatggcatatcttcttttactacaaatgtatcaaggtatgttgatcatcatgagtaaatccatgccatattgccattataattaatttcctttatgtccttaaaagttatcatctaccagatagataaaaataatactggacaatgaatacagctcagaaatatgttggctttaatagtgtaggttgtggtacaacaatactcggtcacaaaaatgtccagactaccaaattgaaagctgactgacagcttagaacataaaaaggggttgggcctgtatgggtacaaatgcctcaataattctagtaaagatcttataagctgcattcatggacccatctgttataatatagtaggtaccgccgtactgcccatgtgcagagaaccacacatgatttgatgagcacatgtgtgcatcagccactgtcaaaactacaaactgatcaagggtgggacaaaggtagttcgatcctaatctagttattggtgtttgcaaattgcactgtaaatgaattcatgaaccttttcaaggggcataatggcattggcagatgatcagaattacatgccctgttgcccaaagcagttgagtgaatttaagttccgacttcctattgctaacaactaccaagacataaaccatttggggtaagaacttacagatactgaagatgctccagtttcccaagctcaggcaccagatgaccagataagttcaaattaccaagatctctgcgggtgacgcggttgtcgcggtcgcaggtgacgtggaaccaggtgcaggggttgacgagcgtggggtcccagctctgcagaacgccgccggggtccctgaggctccggcgcagcgccgagagcgcgtcgccctccgagttggcccccgcgagcgcgagcacgagcgccagagccagggctcccgccgccttcgcccccgcccccgccatgctggagggcgccggatcggttggtggcgggatctggacgcggacggagggcagcagcgggcgggagaactgaggaagaaggggaacggcagcaggggcagggaggaggacggaacgcgagaggtctcgtctggtctgctttttctctgcctgcccggtccgtcgctggtgctgtggtagtggtaggagttgaaccacggaaccagccacacccacccagtccaccttttgtaccgctccgcgtctcgcgtcgcgtcgtgtcgcgtggctgctgctggcggcgaggctgttggtgttggtgctagtgaaagtggagtggggtggagcagaggccccacctggtggtgcgttgggtacttgggccacgcacgcacgcacgcctgctggaatcgagtggaaagcgagcgagaggggcagtgtcgacagccgttttcgaaaggacacgcagggcatggcggatcaggtcgcaaggtgcagccatggaggaggaggaggaggaagtgcaggtgctgcgcaggggggggggggggggggggggggggggggggggg

SEQ ID NO: 74924 - DNA, 2310 bp, Zea Mays
cgcagttcgaggcattggcaaccccctgacgccgctggagtggagtcctccatctcctcctcctcgcttcgcccaaacacaaccggctgctttgctttctcaacccaccagtcctcaatcacctcacaacacagcccctgtcagatcgtcccactgatcgggccgtgcaaaaccccccaaccttttcgacaggaccctgctggcgctacagtcttctcccggaggcagaaactctttgcttccgcctggctcgcgatgcttgtttgggtgcgcgggcctgcggcgaggtgaggcgacggcggcgccgggcggttgcatggtggccgatggagagtagacggggagggtcgggggcggcggcggaagatgcgggcggggcgatgccgagctttgggccaacgcagcacgccattcgcgcaggcgcagatgtgaacagcatgcaaccttctcgagttactgactttggggcacttgcacagtctgctggattccgaatagaagatcttgctaaccttaatgcaaatgccttgttcaatctgaagccaaattctcatacgattgacaacagtcctcttcagtttggaaattacggaaagtctatttctcctcatataaatactacagaagcaacaacagctgcaacaagaattgaccctcagctgtcagcacagcaaacaggagcacaaccaattctggtggcgttaccaactggtaacatggagaattggggagagtcagctatggctggtagccctatgactgacacatctacagatccagacactgatgagaggaaccagatgtttgaacaaggacttgttgctgtccccacagcatctgattctagcgacaaatcaagggacaaactagatcagaagacacttcggcgtcttgcccaaaatcgtgaagctgccaggaaaagccgattacgaaaaaaggcatacatccaaaaccttgagagtagcagactgaaacttactcagttagagcaagagcttcagcgggctcgtcaacagggtatttttatttcgacatcaggagatcaacctcaatcaacaagtggaaatggagctttggcatttgacatggagtatgcacgctggttggaggagcacaataaacatgtaaatgagttgagggctgcagtcaatgcacatgctggtgataatgatcttcgttgtattgttgatagcattatggtacattacgacgaaattttcaagctcaagggtgtggcagctaaagcagatgtttttcatgtgctgtctgggatgtggaagacccctgctgagagatgtttcatgtggttaggtggcttccgatcatctgagcttcttaagttactggcaggtcacctagagcctcttactgatcagcagcttgttggtatatccaacctgcagcagtcctcccaacaagctgaagatgctctttctcaagggatggaagcattgcaacagtcgcttgcagaaactctagcatctggatccttgggccctgctggaccttctggcaatgttgcaaattacatgggacaaatggcgatggctatgggaaaacttggcactcttgagaactttctacgacaggctgataatctacggctgcaaacacttcaacaaatgcaacgcatcttaactacccgacaatcagcacgagccctactcgcaataagtcaatatcatcggagggaagctctgtaggaggcatcgaacttctcaatctcatcaaaacatgccggaaggtggcagcatgacgtatcttcctgcaccaagagcaatgttcagaacgccatcctcccatactactcggccccttgagatcgtgatctccaccattccctgcacgaacgaaatgaacattagtacatgatgcaccgagaagttgcaagttccacattaagggcatatttagtttgttgctaactatgtcacattttgcttaaggttagtcgttcgaattgaagaactaaatttagtcacaaaagtgtggtaaattagccagcgaaccaaatatgctctaaatactgctgattcatatgtgcaaaaaagaaccgacctttcctctccggccctcgtactccctccatctacatgatttagttgttttagatttgtcctaagtcaacctctatcagagggagtacacattagtgttggacggtgtgtgtgagctgagaagggttaagtatttgtatcattgttgtttgccaattgaacaatgcattttgatacgacaaactgctgctaaactaaaccatggttcgagcagatttagagtttgtttagttgtatgcttaagatacaaaaa

SEQ ID NO: 74925 - DNA, 1817 bp, Zea Mays
caaccccctgacgccgctggagtggagtcctccatctcctcctcctcgcttcgcccaaacacaaccggctgctttgctttctcaacccaccagtcctcaatcacctcacaacacagcccctgtcagatcgtcccactgatcgggccgtgcaaaaccccccaaccttttcgacaggaccctgctggcgctacagtcttctcccggaggcagaaactctttgcttccgcctggctcgcgatgcttgtttgggtgcgcgggcctgcggcgaggtgaggcgacggcggcgccgggcggttgcatggtggccgatggagagtagacggggagggtcgggggcggcggcggaagatgcgggcggggcgatgccgagctttgggccaacgcagcacgccattcgcgcaggcgcagatgtgaacagcatgcaaccttctcgagttactgactttggggcacttgcacagtctgctggattccgaatagaagatcttgctaaccttaatgcaaatgccttgttcaatctgaagccaaattctcatacgattgacaacagtcctcttcagtttggaaattacggaaagtctatttctcctcatataaatactacagaagcaacaacagctgcaacaagaattgaccctcagctgtcagcacagcaaacaggagcacaaccaattctggtggcgttaccaactggtaacatggagaattggggagagtcagctatggctggtagccctatgactgacacatctacagatccagacactgatgagaggaaccagatgtttgaacaaggacttgttgctgtccccacagcatctgattctagcgacaaatcaagggacaaactagatcagaagacacttcggcgtcttgcccaaaatcgtgaagctgccaggaaaagccgattacgaaaaaaggcatacatccaaaaccttgagagtagcagactgaaacttactcagttagagcaagagcttcagcgggctcgtcaacagggtatttttatttcgacatcaggagatcaacctcaatcaacaagtggaaatggagctttggcatttgacatggagtatgcacgctggttggaggagcacaataaacatgtaaatgagttgagggctgcagtcaatgcacatgctgacccctgctgagagatgtttcatgtggttaggtggcttccgatcatctgagcttcttaagttactggcaggtcacctagagcctcttactgatcagcagcttgttggtatatccaacctgcagcagtcctcccaacaagctgaagatgctctttctcaagggatggaagcattgcaacagtcgcttgcagaaactctagcatctggatccttgggccctgctggaccttctggcaatgttgcaaattacatgggacaaatggcgatggctatgggaaaacttggcactcttgagaactttctacgacaggctgataatctacggctgcaaacacttcaacaaatgcaacgcatcttaactacccgacaatcagcacgagccctactcgcaataagtgactacttctctcggctgcgtgctttgagttctctttggcttgcccgtccaagggaataaattcaattaattcataactaggataatttttttttgtactgtttctagtatgcccattagtttcttcagaatgctcatgtgtcagtgagatatttggatcatattgtaggccatcatggtttactggacaagtttgtaacaattttggaggaaaaaaactgagttgtaaatacatctggaataatctaagatcttatgaagggatgatatgggaggat

SEQ ID NO: 74926 - DNA, 2208 bp, Zea Mays
caaccccctgacgccgctggagtggagtcctccatctcctcctcctcgcttcgcccaaacacaaccggctgctttgctttctcaacccaccagtcctcaatcacctcacaacacagcccctgtcagatcgtcccactgatcgggccgtgcaaaaccccccaaccttttcgacaggaccctgctggcgctacagtcttctcccggaggcagaaactctttgcttccgcctggctcgcgatgcttgtttgggtgcgcgggcctgcggcgaggtgaggcgacggcggcgccgggcggttgcatggtggccgatggagagtagacggggagggtcgggggcggcggcggaagatgcgggcggggcgatgccgagctttgggccaacgcagcacgccattcgcgcaggcgcagatgtgaacagcatgcaaccttctcgagttactgactttggggcacttgcacagtctgctggattccgaatagaagatcttgctaaccttaatgcaaatgccttgttcaatctgaagccaaattctcatacgattgacaacagtcctcttcagtttggaaattacggaaagtctatttctcctcatataaatactacagaagcaacaacagctgcaacaagaattgaccctcagctgtcagcacagcaaacaggagcacaaccaattctggtggcgttaccaactggtaacatggagaattggggagagtcagctatggctggtagccctatgactgacacatctacagatccagacactgatgagaggaaccagatgtttgaacaaggacttgttgctgtccccacagcatctgattctagcgacaaatcaagggacaaactagatcagaagacacttcggcgtcttgcccaaaatcgtgaagctgccaggaaaagccgattacgaaaaaaggcatacatccaaaaccttgagagtagcagactgaaacttactcagttagagcaagagcttcagcgggctcgtcaacagggtatttttatttcgacatcaggagatcaacctcaatcaacaagtggaaatggagctttggcatttgacatggagtatgcacgctggttggaggagcacaataaacatgtaaatgagttgagggctgcagtcaatgcacatgctgacccctgctgagagatgtttcatgtggttaggtggcttccgatcatctgagcttcttaagttactggcaggtcacctagagcctcttactgatcagcagcttgttggtatatccaacctgcagcagtcctcccaacaagctgaagatgctctttctcaagggatggaagcattgcaacagtcgcttgcagaaactctagcatctggatccttgggccctgctggaccttctggcaatgttgcaaattacatgggacaaatggcgatggctatgggaaaacttggcactcttgagaactttctacgacaggctgataatctacggctgcaaacacttcaacaaatgcaacgcatcttaactacccgacaatcagcacgagccctactcgcaataagcaatacaaataatcagacgagggactactgccaggtcaatatcatcggagggaagctctgtaggaggcatcgaacttctcaatctcatcaaaacatgccggaaggtggcagcatgacgtatcttcctgcaccaagagcaatgttcagaacgccatcctcccatactactcggccccttgagatcgtgatctccaccattccctgcacgaacgaaatgaacattagtacatgatgcaccgagaagttgcaagttccacattaagggcatatttagtttgttgctaactatgtcacattttgcttaaggttagtcgttcgaattgaagaactaaatttagtcacaaaagtgtggtaaattagccagcgaaccaaatatgctctaaatactgctgattcatatgtgcaaaaaagaaccgacctttcctctccggccctcgtactccctccatctacatgatttagttgttttagatttgtcctaagtcaacctctatcagagggagtacacattagtgttggacggtgtgtgtgagctgagaagggttaagtatttgtatcattgttgtttgccaattgaacaatgcattttgatacgacaaactgctgctaaactaaaccatggttcgagcagatttagagtttgtttagttgtatgcttaagatacaaaaa

SEQ ID NO: 74927 - DNA, 2226 bp, Zea Mays
ctggagtggagtcctccatctcctcctcctcgcttcgcccaaacacaaccggctgctttgctttctcaacccaccagtcctcaatcacctcacaacacagcccctgtcagatcgtcccactgatcgggccgtgcaaaaccccccaaccttttcgacaggaccctgctggcgctacagtcttctcccggaggcagaaactctttgcttccgcctggctcgcgatgcttgtttgggtgcgcgggcctgcggcgaggtgaggcgacggcggcgccgggcggttgcatggtggccgatggagagtagacggggagggtcgggggcggcggcggaagatgcgggcggggcgatgccgagctttgggccaacgcagcacgccattcgcgcaggcgcagatgtgaacagcatgcaaccttctcgagttactgactttggggcacttgcacagtctgctggattccgaatagaagatcttgctaaccttaatgcaaatgccttgttcaatctgaagccaaattctcatacgattgacaacagtcctcttcagtttggaaattacggaaagtctatttctcctcatataaatactacagaagcaacaacagctgcaacaagaattgaccctcagctgtcagcacagcaaacaggagcacaaccaattctggtggcgttaccaactggtaacatggagaattggggagagtcagctatggctggtagccctatgactgacacatctacagatccagacactgatgagaggaaccagatgtttgaacaaggacttgttgctgtccccacagcatctgattctagcgacaaatcaagggacaaactagatcagaagacacttcggcgtcttgcccaaaatcgtgaagctgccaggaaaagccgattacgaaaaaaggcatacatccaaaaccttgagagtagcagactgaaacttactcagttagagcaagagcttcagcgggctcgtcaacagggtatttttatttcgacatcaggagatcaacctcaatcaacaagtggaaatggagctttggcatttgacatggagtatgcacgctggttggaggagcacaataaacatgtaaatgagttgagggctgcagtcaatgcacatgctggtgataatgatcttcgttgtattgttgatagcattatggtacattacgacgaaattttcaagctcaagggtgtggcagctaaagcagatgtttttcatgtgctgtctgggatgtggaagacccctgctgagagatgtttcatgtggttaggtggcttccgatcatctgagcttcttaagttactggcaggtcacctagagcctcttactgatcagcagcttgttggtatatccaacctgcagcagtcctcccaacaagctgaagatgctctttctcaagggatggaagcattgcaacagtcgcttgcagaaactctagcatctggatccttgggccctgctggaccttctggcaatgttgcaaattacatgggacaaatggcgatggctatgggaaaacttggcactcttgagaactttctacgacaggcaatacaaataatcagacgagggactactgccaggtcaatatcatcggagggaagctctgtaggaggcatcgaacttctcaatctcatcaaaacatgccggaaggtggcagcatgacgtatcttcctgcaccaagagcaatgttcagaacgccatcctcccatactactcggccccttgagatcgtgatctccaccattccctgcacgaacgaaatgaacattagtacatgatgcaccgagaagttgcaagttccacattaagggcatatttagtttgttgctaactatgtcacattttgcttaaggttagtcgttcgaattgaagaactaaatttagtcacaaaagtgtggtaaattagccagcgaaccaaatatgctctaaatactgctgattcatatgtgcaaaaaagaaccgacctttcctctccggccctcgtactccctccatctacatgatttagttgttttagatttgtcctaagtcaacctctatcagagggagtacacattagtgttggacggtgtgtgtgagctgagaagggttaagtatttgtatcattgttgtttgccaattgaacaatgcattttgatacgacaaactgctgctaaactaaaccatggttcgagcagatttagagtttgtttagttgtatgcttaagatacaaaaa

SEQ ID NO: 74928 - DNA, 2462 bp, Zea Mays
ctggagtggagtcctccatctcctcctcctcgcttcgcccaaacacaaccggctgctttgctttctcaacccaccagtcctcaatcacctcacaacacagcccctgtcagatcgtcccactgatcgggccgtgcaaaaccccccaaccttttcgacaggaccctgctggcgctacagtcttctcccggaggcagaaactctttgcttccgcctggctcgcgatgcttgtttgggtgcgcgggcctgcggcgaggtgaggcgacggcggcgccgggcggttgcatggtggccgatggagagtagacggggagggtcgggggcggcggcggaagatgcgggcggggcgatgccgagctttgggccaacgcagcacgccatgtatgttcccgcgccacaccgccttcttcatttacttgctcatggtttcttttctcccctcgtccaccggccctccatttggtatactgcgtgggatagattgcactgtgcatctcaagcagcaatcaatgcaattgaatgtcaggttaacatagaacggcgcagatgtgaacagcatgcaaccttctcgagttactgactttggggcacttgcacagtctgctggattccgaatagaagatcttgctaaccttaatgcaaatgccttgttcaatctgaagccaaattctcatacgattgacaacagtcctcttcagtttggaaattacggaaagtctatttctcctcatataaatactacagaagcaacaacagctgcaacaagaattgaccctcagctgtcagcacagcaaacaggagcacaaccaattctggtggcgttaccaactggtaacatggagaattggggagagtcagctatggctggtagccctatgactgacacatctacagatccagacactgatgagaggaaccagatgtttgaacaaggacttgttgctgtccccacagcatctgattctagcgacaaatcaagggacaaactagatcagaagacacttcggcgtcttgcccaaaatcgtgaagctgccaggaaaagccgattacgaaaaaaggcatacatccaaaaccttgagagtagcagactgaaacttactcagttagagcaagagcttcagcgggctcgtcaacagggtatttttatttcgacatcaggagatcaacctcaatcaacaagtggaaatggagctttggcatttgacatggagtatgcacgctggttggaggagcacaataaacatgtaaatgagttgagggctgcagtcaatgcacatgctggtgataatgatcttcgttgtattgttgatagcattatggtacattacgacgaaattttcaagctcaagggtgtggcagctaaagcagatgtttttcatgtgctgtctgggatgtggaagacccctgctgagagatgtttcatgtggttaggtggcttccgatcatctgagcttcttaagttactggcaggtcacctagagcctcttactgatcagcagcttgttggtatatccaacctgcagcagtcctcccaacaagctgaagatgctctttctcaagggatggaagcattgcaacagtcgcttgcagaaactctagcatctggatccttgggccctgctggaccttctggcaatgttgcaaattacatgggacaaatggcgatggctatgggaaaacttggcactcttgagaactttctacgacaggctgataatctacggctgcaaacacttcaacaaatgcaacgcatcttaactacccgacaatcagcacgagccctactcgcaataagcaatacaaataatcagacgagggactactgccaggtcaatatcatcggagggaagctctgtaggaggcatcgaacttctcaatctcatcaaaacatgccggaaggtggcagcatgacgtatcttcctgcaccaagagcaatgttcagaacgccatcctcccatactactcggccccttgagatcgtgatctccaccattccctgcacgaacgaaatgaacattagtacatgatgcaccgagaagttgcaagttccacattaagggcatatttagtttgttgctaactatgtcacattttgcttaaggttagtcgttcgaattgaagaactaaatttagtcacaaaagtgtggtaaattagccagcgaaccaaatatgctctaaatactgctgattcatatgtgcaaaaaagaaccgacctttcctctccggccctcgtactccctccatctacatgatttagttgttttagatttgtcctaagtcaacctctatcagagggagtacacattagtgttggacggtgtgtgtgagctgagaagggttaagtatttgtatcattgttgtttgccaattgaacaatgcattttgatacgacaaactgctgctaaactaaaccatggttcgagcagatttagagtttgtttagttgtatgcttaagatacaaaaa

SEQ ID NO: 74929 - DNA, 2258 bp, Zea Mays
gtcctccatctcctcctcctcgcttcgcccaaacacaaccggctgctttgctttctcaacccaccagtcctcaatcacctcacaacacagcccctgtcagatcgtcccactgatcgggccgtgcaaaaccccccaaccttttcgacaggaccctgctggcgctacagtcttctcccggaggcagaaactctttgcttccgcctggctcgcgatgcttgtttgggtgcgcgggcctgcggcgaggtgaggcgacggcggcgccgggcggttgcatggtggccgatggagagtagacggggagggtcgggggcggcggcggaagatgcgggcggggcgatgccgagctttgggccaacgcagcacgccatgcgcagatgtgaacagcatgcaaccttctcgagttactgactttggggcacttgcacagtctgctggattccgaatagaagatcttgctaaccttaatgcaaatgccttgttcaatctgaagccaaattctcatacgattgacaacagtcctcttcagtttggaaattacggaaagtctatttctcctcatataaatactacagaagcaacaacagctgcaacaagaattgaccctcagctgtcagcacagcaaacaggagcacaaccaattctggtggcgttaccaactggtaacatggagaattggggagagtcagctatggctggtagccctatgactgacacatctacagatccagacactgatgagaggaaccagatgtttgaacaaggacttgttgctgtccccacagcatctgattctagcgacaaatcaagggacaaactagatcagaagacacttcggcgtcttgcccaaaatcgtgaagctgccaggaaaagccgattacgaaaaaaggcatacatccaaaaccttgagagtagcagactgaaacttactcagttagagcaagagcttcagcgggctcgtcaacagggtatttttatttcgacatcaggagatcaacctcaatcaacaagtggaaatggagctttggcatttgacatggagtatgcacgctggttggaggagcacaataaacatgtaaatgagttgagggctgcagtcaatgcacatgctggtgataatgatcttcgttgtattgttgatagcattatggtacattacgacgaaattttcaagctcaagggtgtggcagctaaagcagatgtttttcatgtgctgtctgggatgtggaagacccctgctgagagatgtttcatgtggttaggtggcttccgatcatctgagcttcttaagttactggcaggtcacctagagcctcttactgatcagcagcttgttggtatatccaacctgcagcagtcctcccaacaagctgaagatgctctttctcaagggatggaagcattgcaacagtcgcttgcagaaactctagcatctggatccttgggccctgctggaccttctggcaatgttgcaaattacatgggacaaatggcgatggctatgggaaaacttggcactcttgagaactttctacgacaggctgataatctacggctgcaaacacttcaacaaatgcaacgcatcttaactacccgacaatcagcacgagccctactcgcaataagtcaatatcatcggagggaagctctgtaggaggcatcgaacttctcaatctcatcaaaacatgccggaaggtggcagcatgacgtatcttcctgcaccaagagcaatgttcagaacgccatcctcccatactactcggccccttgagatcgtgatctccaccattccctgcacgaacgaaatgaacattagtacatgatgcaccgagaagttgcaagttccacattaagggcatatttagtttgttgctaactatgtcacattttgcttaaggttagtcgttcgaattgaagaactaaatttagtcacaaaagtgtggtaaattagccagcgaaccaaatatgctctaaatactgctgattcatatgtgcaaaaaagaaccgacctttcctctccggccctcgtactccctccatctacatgatttagttgttttagatttgtcctaagtcaacctctatcagagggagtacacattagtgttggacggtgtgtgtgagctgagaagggttaagtatttgtatcattgttgtttgccaattgaacaatgcattttgatacgacaaactgctgctaaactaaaccatggttcgagcagatttagagtttgtttagttgtatgcttaagatacaaaaa

SEQ ID NO: 74930 - DNA, 291 bp, Zea Mays
atggcgacaacacgaaaggggacatcaccaggcttcacatttaacagcctcccctcacatgccatcagctggctcctcctcgtcctcatactcggcctcctcatcgtcatcagcagtcgcatcctggtactgctggtactccgacacgaggtcattcatattgctctcggcctcggtgaactccatctcgtccatgccctcgcccgtgtaccagtgcaagaaagccttcctcctgaacatggcagtgaactgctcgctcaccctccggaacatctcctggatggaagttga

SEQ ID NO: 74931 - DNA, 1907 bp, Zea Mays
cgttgacccgtcgatggcgttttcgtttggtgtagctgtcacggccgttcgtctccgccgctacagcatctctagtcttccgtcgtctcccttctttccccttcgctcgcttctcttctttgccgtccagtcgtcgtcgtctcctcgtgggctcgcggccgtggcgcattaaggattcgaacccactcgtcaaagagaatccatccgcaaaatcgaaagcaacagcagctgattattaaagccccgctttttcaaaagccgcaagggctatacccctagttgtaaattggcggaaaggaaattcgcctcctcttctccaattgcagctgcagttgcgtgctcgagaggggtgaagaacctagaagccctgccagcgcgcggcgccggcgccttgtttactctgcgacggcacgctgattgcattggtactgttcttctcctgatcaccacacatgacaagggtcatccatgactccggagatgacatgcagaaggaggcacttgatttggtctcatctgacgttaatttccccaagggccatttcccagactataggattggaccaaacaaccaaatcattgatccagaggagacacatgaggctgtacctctcaaggagattgttgcaaaggaaacagcgcagctgctagagcagcacaagcgtctttctgtgcgtgatctcaaggagaaatttgagaagggtctatctggcgcttccaagctttctgaagaggccaagcggcgagaagccgcttcattagacaggcaggttcttcttaagaagctcagagatgttttagacacactgaaaggccgtgtggctggtcgaaacagagacgatgctgaggaagctatctcactggtggaggcactagctgtccagttgacacaacgagaaggggagttaatttatgagaaggctgaagtaaaaaaattggctaacttccttaagcaggctactgaagatgcacgcaaagtggctgaagaggaaagggcccttgcactggctgaaattgaaaaggctagagctgcgatcgaaaaagttgagaaagcatggcgtgtacatgattttgcgtcaagtagcagagagaaggcggtacttattccaaaatgagcttggatgttcattttatttgcctctcgtatcatttattgccagttgccattgacccatatttattttgtatcttgatttttgtcctctaataatcaggaaatagaggaacttaggaaagaggtccgagaggctaggagaataaaaatgctacaccagccaagcaaggtcatggacatggagtttgagcttcaggcactgcggactctcatctcagagaagactcagctatgcaatcagctaaagaaagagcttgccatgatcaagaggttagaagacgatagttctggcctctttgagcttgaaggttctaatacccttggatcacagctttgtattatcccgcgagttgatggtgcttcaaacatcacgaactgtccaattcagtggtatcgtgtaatttctggaggcactagagaactcatatcaggagcaacaaaatttatgtatgccccagaaccgtttgatgttggccgattgttgcaagcagagatagttttgaatgcagacaaaattatagttcagacagatggccctgtagataacggacttgaacgttatgtggactcactaatgaaaaggacggatattgagttcaatgtagtagtaacccaaatgaatgggaaggattactcgtcgaattctgttcatgtatttcacattggaaagctgagaataaaacttcgaaaaggatggtccacaaaagcaagagagtcgtattccactacgatgaaggattgaaaaaacacatcctcaacaactcccaaacttcgagcatttgggaaaaccgac

SEQ ID NO: 74932 - DNA, 3401 bp, Zea Mays
tctagtcttccgtcgtctcccttctttccccttcgctcgcttctcttctttgccgtccagtcgtcgtcgtctcctcgtgggctcgcggccgtggcgcattaaggattcgaacccactcgtcaaagagaatccatccgcaaaatcgaaagcaacagcagctgattattaaagccccgctttttcaaaagccgcaagggctatacccctagttgtaaattggcggaaaggaaattcgcctcctcttctccaattgcagctgcagttgcgtgctcgagaggggtgaagaacctagaagccctgccagcgcgcggcgccggcgccttgtttactctgcgacggcacgctgattgcattggtactgttcttctcctgatcaccacacatgacaagggtcatccatgactccggagatgacatgcagaaggaggcacttgatttggtctcatctgacgttaatttccccaagggccatttcccagactataggattggaccaaacaaccaaatcattgatccagaggagacacatgaggctgtacctctcaaggagattgttgcaaaggaaacagcgcagctgctagagcagcacaagcgtctttctgtgcgtgatctcaaggagaaatttgagaagggtctatctggcgcttccaagctttctgaagaggccaagcggcgagaagccgcttcattagacaggcaggttcttcttaagaagctcagagatgttttagacacactgaaaggccgtgtggctggtcgaaacagagacgatgctgaggaagctatctcactggtggaggcactagctgtccagttgacacaacgagaaggggagttaatttatgagaaggctgaagtaaaaaaattggctaacttccttaagcaggctactgaagatgcacgcaaagtggctgaagaggaaagggcccttgcactggctgaaattgaaaaggctagagctgcgatcgaaaaagttgagaaagcatggcgtgtacatgattttgcgtcaagtagcagagagaaggcggaaatagaggaacttaggaaagaggtccgagaggctaggagaataaaaatgctacaccagccaagcaaggtcatggacatggagtttgagcttcaggcactgcggactctcatctcagagaagactcagctatgcaatcagctaaagaaagagcttgccatgatcaagaggttagaagacgatagttctggcctctttgagcttgaaggttctaatacccttggatcacagctttgtattatcccgcgagttgatggtgcttcaaacatcacgaactgtccaattcagtggtatcgtgtaatttctggaggcactagagaactcatatcaggagcaacaaaatttatgtatgccccagaaccgtttgatgttggccgattgttgcaagcagagatagttttgaatgcagacaaaattatagttcagacagatggccctgtagataacgctgcaggacttgaacgttatgtggactcactaatgaaaaggacggatattgagttcaatgtagtagtaacccaaatgaatgggaaggattactcgtcgaattctgttcatgtatttcacattggaaagctgagaataaaacttcgaaaaggatggtccacaaaagcaagagagtcgtattccactacgatgaagttatgcgggagccgtggtggtggtaatgctgcagctagggcagttttctggcaccctaggaaaggctcgtcctacactctagccttcgaaacagacagggacaggaatgctgcgattatgattgctcgcaagttcgcttcgaattgcaatatcgctctcgctggcccaggcgaccaagtccatgtcaacatcatcggatccgcggtggctgcgcacgccggcggggaagaggagtcgcgggcggcgcgcctccagtcttttttcgcctccgtgctctccgggctcttcggccaggccgaggccgaggacgaggacgaggacgaagagatgcccacgcgcaaccacaacgctgccgcggctgccgctccgcagcatcaccatcacaaccgaggtggtgctcccgctcttggaaagagcaaggccgtgcccggccgagctgatgccatgaaccggcgagcccccctcggcgatattggcaacctcgtcagcgtccgcccagccgaagggaaacctcagctgcaggagcagatcaatcgccccatcacgcgaagcttcggcgctcagctcgtgaagaacgtgcaggcgaatgccgcaatcaagaatgccgcaatcctacccgcgaggcatgcgccgaggcaggaaaggaaggctcctgccaagcagccgcctcctgaggatgtcatagtactcagctccgactctgaacagagcaggacgcagttggagagcagcgctagctccgtccggtcgaggaagaaggtcatcaacaccctttcttctgtgctctcggctcgctcaaaggctgcctgtggaatcactgataagagacggcaagtagcagtgatcgaagacatcgacaagttggacgtcaacaatgagctcgcagttgtggaatacattgaggacatctacacgttctacaagattgctcagcatgacagacggccatgtgattatatagacacccaagtcgagatcaaccctaagatgagggctatcctggctggttggataattgaagtacaccacaagttcgagctgatgccggaaactctctacttgaccatgtacatcatcgatcagtacctctcgctgcaaccagtcctgcgaagggagctgcagctggtcggtgtttcagctatgctgatcgcctgcaagtacgaggagatttgggccccagaggtgaacgatttcattcttatatcagacagtgcatacagcagggagcagatcctttcgatggagaagggaatcctgaatagcctggagtggaacctcactgtccctacagtatacatgttccttgttcgttttctgaaggcggcagccttgggcaacaaagttgagaaagagatggagaatatggtcttcttcttcgctgaactggcgctgatgcagtacggcttggtgacgcggctgccttcgctggtcgctgcttcggttgtctacgcagccaggctcactctcaagagggctcccctctggaccgacaccctcaagcaccacacgggcttcagagagtcagagacagagctaatcgagtgcacgaagttgctggtcagcgcacactcgtccgccgctgacagcaagctgaggtctgtatacaagaagtattccagtgagcagttcggaggtgtcgcgcttcgcccacccgcagccgcagtggagatcaagtgccaccagcccataatggaggtccataaggccttgtctcatcaagcgtggataagat

SEQ ID NO: 74933 - DNA, 941 bp, Zea Mays
cggcggcggcggccatgggcaaggaaggggccagcggcggcggcggcgacggcggcatgtcggcgtcggtgatccgcaaggtcctggtctcgtacatgtacgtggcggtgtggatcttcctctccttctccgtgatcgtctacaacaagtacatcctggaccccaagatgtacaactggcccttccccatctccctgaccatggtgcacatggccttctgctcgtccctcgccgtggcgctcgtccgcgtcctccgcgtcgtggacctcccgtcctcgcccgccatgacgtcgcagctctacctctcctccgtggtgcccatcggcgccctctactcgctctcgctctggttctccaactccgcgtacatctacctctccgtctccttcatccagatgctcaaggcgctcatgcccgtcgccgtctactccatcggggtgctcttcaagaaggagaccttcaggtcctccgccatgctcaaccccatcacctcgctctactacgtcgcgccctgctgcctcgccttcctcgtcgtgccctgggtcttcgtcgagctgcccaggctgcgcgccgtcgccggcggcttccagccggacctcttcgtcttcggcaccaactccctctgcgccttcgcgctcaacctcgccgtcttcctgctcgtcggcaagacgtcggccctcaccatgaacgtcgccggcgtcgtcaaggactggctgctcatcgccttctcctggtccgtcatccgcgacaccgtcacccccgtcaacctcttcggctacgggatcgccttcctcggggtgggatactacaaccacgtcaagctgcaggcgctcaaggccaaggaggcgcagaagaaggcggcgcaggccgacgaggaggccgggtcgctgctgcaggagcgcgactcgcacggcgaccgcaagactgacgaccaggcctag

SEQ ID NO: 74934 - DNA, 1794 bp, Zea Mays
gtttcctaagattctctcggctgctgtcgttcttcccgtgtctcctgctccattcttaccttccctgcttctccatctcaagagttcgccaccagcgatcttcccagccaccaccacgttaacatcctcgccctccgtcagccgcctcgccccttcccagtccgcgcccgtctcccgtgggcgggtggccgttcgcgccatggacgagtgggacgagactacgagaggagccaggaactgtagcgcgaaaatatcgaggggaaggcgtacgtggattcatgggacgaccggatgcgagagacctgtgcgctgctgaagcaggtgcgggagccgggctctcggggatcgtaacctcaaggactcggagaagcaggagatgtacggttgcacaaggaggaccccgcgacttacatcgtggagcggctagccaaggacttccgcgtcatgcgacagcgcgtgcacgccatcctctggcagtctggctcaaggagatggaggaggaagaggagaggaagaggggtcagccactcgacaactccatcgaaatccagctcgacagttgcccagagttcttcaattctcatgacagggaatttcacgtagcatcccttccatataaacctgacttcaaagtgatgtccgagggctgggatggcacaacacgagatcctgatgaagttctatatgaaatttcaatgaaggaagatcaaatattgtacgaggaatttgttcagcgcttggaattcaacaagaagaagctggagttccatcagagaatattctttatcttggcggacctaatattgcttctgaaatttacaacaaagaatatgcaaatgcacgtatttgtggagctgacaaatggagaaagccccttgcaaagtttttgaggcagcctcattttattgtgtgggataacagtgatctcatcactcatgaagtcatgggtggcttaaaaaatgtctatgctattggtgctggtatggtagctgcactaaccaacgagagtgcaaccagcaaatctgtttactttgcactttgcacatctgagatgatctacatcacacaccttctggaagaagaacctgaaaaacttgctggacccttattagctgacacttatgtcacattgttgaaaggtcgtaatgcatggtatgggcagaagttagctaaaggtgaattgacattagaaatgggtgacagtattaaaggaaaagggaccattcagggtgtctctgcagttgatgcgttttatgagcttcttagtcaggatagcttaagtgtcatgcatccagaagccaacagatctgttgcgccggttgagatgtgcccgatcctaaaagcactacataggattctgatcacgagggaccgtcctgctgattcgattcttcaggctataagagatgagacaatgtatgatccacgcgaaagaattgagatggcacaaggccattcactctaccgaccatctcttcttggtcaaccaaaaggagacgtgaaaacctagaagtcattttctttccctttcctttgttggctaggacttggagcatcttctaagttgctgtatgtttatgcacggtgtgcttgttgttgtaacttgtaacattagtggaatctgagaacatatttatttagcttgttcaatattagtagtcagtcttgtatgatgtagtgtagagcatgattttagggaaaaaaaaactaatccgatctctctctttttgagttaaaacaagatttctatgattttgcttagataaaatcagatttcagtattttcaagtgttc

SEQ ID NO: 74935 - DNA, 1953 bp, Zea Mays
cgcccccttctcacctacctgccacaatgccacatctcccccgtacgtcgcccaactcgctttcgcacggccgcgtcactgttctctctgcctcgtgggcactgggcagcaggcgccaatctggccgagctgatcgagagcccgaggcgacgtgtactggcgcaccaacccaaccggcaaccgcgacagggccggcgggccggcagcaagccccgactccctcgggctctccggccgtcgcggccgacgcttcgcctcgctgcgattcggcggccaaacccacccgaattcgcgtcgatccgagctcgtttcggccaaaagaaaagccaccgggttatgtagcctgcctcgttttcggcgagagaggaagaggcggaggagatcagggcaatgggcggggcggaggcgctgggccagccggacggccatgcgaacggggccgtggtggaggagaagctggacttgctgcggcggcagctggggaaggcggacggcgacccgctccggatcgtcggcgtcggggcgggcgcctggggcagcgtcttctgcgcgctgctgcaggacgcgtacggccacctccgcgacaaggcgcaggtccgcatctggcgccgcccgggccgcgccgtcgaccgcgccaccgccgagcacctcttcgacgtcatcaacgcgcgcgaggacgtcctgcgccgcctgatccgccgctgcgcctacctcaagtacgtcgaggcgcgcctcggcgaccgcacgctctacgccgacgagatactcagggacggcttctgcctcaacatgatcgacacgccgctctgcccgctcaaggtcgtcaccaacctgcaggaggccgtctgggacgctgacattgtcgtcaacggcctgccttccaccgacaccagggaggtgttcggggagatcaggagctggagttccatcagagaatattctttatcttggcggacctaatattgcttctgaaatttacaacaaagaatatgcaaatgcacgtatttgtggagctgacaaatggagaaagccccttgcaaagtttttgaggcagcctcattttattgtgtgggataacagtgatctcatcactcatgaagtcatgggtggcttaaaaaatgtctatgctattggtgctggtatggtagctgcactaaccaacgagagtgcaaccagcaaatctgtttactttgcactttgcacatctgagatgatctacatcacacaccttctggaagaagaacctgaaaaacttgctggacccttattagctgacacttatgtcacattgttgaaaggtcgtaatgcatggtatgggcagaagttagctaaaggtgaattgacattagaaatgggtgacagtattaaaggaaaagggaccattcagggtgtctctgcagttgatgcgttttatgagcttcttagtcaggatagcttaagtgtcatgcatccagaagccaacagatctgttgcgccggttgagatgtgcccgatcctaaaagcactacataggattctgatcacgagggaccgtcctgctgattcgattcttcaggctataagagatgagacaatgtatgatccacgcgaaagaattgagatggcacaaggccattcactctaccgaccatctcttcttggtcaaccaaaaggagacgtgaaaacctagaagtcattttctttccctttcctttgttggctaggacttggagcatcttctaagttgctgtatgtttatgcacggtgtgcttgttgttgtaacttgtaacattagtggaatctgagaacatatttatttagcttgttcaatattagtagtcagtcttgtatgatgtagtgtagagcatgattttagggaaaaaaaaactaatccgatctctctctttttgagttaaaacaagatttctatgattttgcttagataaaatcagatttcagtattttcaagtgttc

SEQ ID NO: 74936 - DNA, 2059 bp, Zea Mays
cttctcacctacctgccacaatgccacatctcccccgtacgtcgcccaactcgctttcgcacggccgcgtcactgttctctctgcctcgtgggcactgggcagcaggcgccaatctggccgagctgatcgagagcccgaggcgacgtgtactggcgcaccaacccaaccggcaaccgcgacagggccggcgggccggcagcaagccccgactccctcgggctctccggccgtcgcggccgacgcttcgcctcgctgcgattcggcggccaaacccacccgaattcgcgtcgatccgagctcgtttcggccaaaagaaaagccaccgggttatgtagcctgcctcgttttcggcgagagaggaagaggcggaggagatcagggcaatgggcggggcggaggcgctgggccagccggacggccatgcgaacggggccgtggtggaggagaagctggacttgctgcggcggcagctggggaaggcggacggcgacccgctccggatcgtcggcgtcggggcgggcgcctggggcagcgtcttctgcgcgctgctgcaggacgcgtacggccacctccgcgacaaggcgcaggtccgcatctggcgccgcccgggccgcgccgtcgaccgcgccaccgccgagcacctcttcgacgtcatcaacgcgcgcgaggacgtcctgcgccgcctgatccgccgctgcgcctacctcaagtacgtcgaggcgcgcctcggcgaccgcacgctctacgccgacgagatactcagggacggcttctgcctcaacatgatcgacacgccgctctgcccgctcaaggtcgtcaccaacctgcaggaggccgtctgggacgctgacattgtcgtcaacggcctgccttccaccgacaccagggaggtgttcggggagatcaggaggtactggaaggagaggattactgcccccatcatcatctccctcgccaaaggaattgaggcctcgctggatccactcccacggatcataactcccacgcagatgattagcaatctggagttccatcagagaatattctttatcttggcggacctaatattgcttctgaaatttacaacaaagaatatgcaaatgcacgtatttgtggagctgacaaatggagaaagccccttgcaaagtttttgaggcagcctcattttattgtgtgggataacagtgatctcatcactcatgaagtcatgggtggcttaaaaaatgtctatgctattggtgctggtatggtagctgcactaaccaacgagagtgcaaccagcaaatctgtttactttgcactttgcacatctgagatgatctacatcacacaccttctggaagaagaacctgaaaaacttgctggacccttattagctgacacttatgtcacattgttgaaaggtcgtaatgcatggtatgggcagaagttagctaaaggtgaattgacattagaaatgggtgacagtattaaaggaaaagggaccattcagggtgtctctgcagttgatgcgttttatgagcttcttagtcaggatagcttaagtgtcatgcatccagaagccaacagatctgttgcgccggttgagatgtgcccgatcctaaaagcactacataggattctgatcacgagggaccgtcctgctgattcgattcttcaggctataagagatgagacaatgtatgatccacgcgaaagaattgagatggcacaaggccattcactctaccgaccatctcttcttggtcaaccaaaaggagacgtgaaaacctagaagtcattttctttccctttcctttgttggctaggacttggagcatcttctaagttgctgtatgtttatgcacggtgtgcttgttgttgtaacttgtaacattagtggaatctgagaacatatttatttagcttgttcaatattagtagtcagtcttgtatgatgtagtgtagagcatgattttagggaaaaaaaaactaatccgatctctctctttttgagttaaaacaagatttctatgattttgcttagataaaatcagatttcagtattttcaagtgttc

SEQ ID NO: 74937 - DNA, 1262 bp, Zea Mays
ccgaaactcgaaagcgccgagtcactccatttacgtgtgccacctgcaccgtatgcttttcgcgcagtgtaaatttgtcagttccgatgtgggaaaagaaattttgcactgatgcttgtgctgtcccctgggctaaactgtgtgaggccaagagattgatgactctgtacaaaagtgtggttgattgggatgactcggctgcattagaagccttcaacgatgcaaaggcgcgcttctgcgctgtatatcatggtcaacattatgatatccctttgcctgacccggacatgtttattgatataatcaacccagatgagtatgttgatcttgaattggtagctgatctggagaagtcacgtcgtcgcgttcccagaaaagatgatggtgttcctgatgtatgggactcttttattttatctgacaagccagttccagttacaggatggggtgacacggataccagcttcactcacggccagcagctctctgtaaattgggactatcagctaaaacactcagttgaagcaaatcataaacatatgtcagcaaattgggattattctatcaagcgacctgctcaaatagtttgtcagcaaaactcagggaaacagcaggatcaaaccagcagccagggggagcagacgaattcttgcattagccactggatcatgaggggtggctcccaggatgcttggaagcatgattccggctggggtcctgcagctattcagaccgatctatgggacaaccgtcaaggtagctatgaggtgcctgacagcacgggtatgccatatggacactggactcactgcagaaggcgaaacgatgactcgggtagaagaaacaccaggaatagaggaggccccattagctcaaagccaatgaaatcgaagtatcaaacggatgaacacaacgttgcaatcaatgggtggtggaactgccgaataaggaatgatgtgtattattacccacatgggcaggctgattataccaagcagtcacacgcaatgtgagtaagaagctaggggggtttcggcattgggagaagacgggaagttcccctctctgccgtccgctactccaacagttgtaatggtggaggtcttcagttagtagatcttctgcaggttgtgtccccctacccctggccccccccttaagctgctgtagtctgtagatagtgctaattattagcctaatgattgctttgtttagcaattggcaatgtacatctgtctcggtaataaagagctaaatattat

SEQ ID NO: 74938 - DNA, 2601 bp, Zea Mays
catcttgcaagtgctagggtttagttctgcttggcatcaaggtgaagtgccagatgcaattggcattgaaggagtgagcatatcaatccatataccaaattctgcagttgaagaaaggccagaagaagaagaaaaatctggtcataccaaggcgattcaaagccttggacccttttcttttatatgatctactatctataccaactacagaagggaggcaactagaaaaaagatcgaggttgaactgcgttccacagcaagcgtctcgaggaagcgtcgacggactacatggacgcggagagagacatcaagcccttcgtcttccctaccgtgcccaccaccattcagcggaacttccacggccccggcgctcgtcagccaacggcacggccattggagcgctgtggcactcgagtgctaccgcaaactcatcgaccttgctctgcgccacggcttagtaggaagttctggggcgccggcgattatgacgcggtggcggggaggtctgcgccacagcctccgagtctacagaatcgcatgtgcgtccacccggaatttctccactccaacgcgacctcgcataaatggccgtttggagtatgtcttactttctttcccattgctatagccgtggcagagttgttggacaatgcggtggatgagatagaaactggtggtgctacaacgatattgctggacaaactcatcgacaaacggaatggatcaccagcattactaattcaagatgatggtggaggcatggatcctgattctttgaggcggtgcatgagctttggattttcagagaaacaatcagggtcttcgattggacaatacggaaatggattcaagactagcacaatgcggctcggggcagatgctattgttttcagtcgctgctgcaccaggagcagtgggcctacacaatccattggtctcctctcttacactttcttggtggaaacaggacatacaaatgttgtagttccaatggttgattataaatgcaatctaatgaatggccaaactcagcggttggagcgtcatggttcgaaacagttcttctcaaatttgtcggcgttgttgaaatggtccccttttgcaacagaagaagagctgatgcagaatttctgtgacattggtccacatggcaccaagattatagtgttcaatctgtggtccaacgacgatggtaatttggagctcgacttcgacacgaatccggaggatattatgatcagtggagcgccaaacccagaacaaatcagcaactctgttaggagggctaacgagaaccatctggcaaatcgactacgctattctcttagggtctatgcttctgtactgtatctacagctaccagattactttaggatcatgcttcgagggcgagaagttgagcgtcatcacattgcctctgacttgatatatcctgaacgcatcagttatagaccacaaagttgcggaataataagagaggctgaggttcttacaacaattgggttcttaaagggtgccccaaccattagcgtgcacggattcaacatctatcacaaaaaccgccttatcttgccattccatagagtgctgagtaccgcgagcagcaaaggcagaagcgtctctggagtgttggaggtagacttcatcaagcccacccatgacaaacaggactttgagaagtcgcagctgtttcagcggctgatgaaccgcctcaaggagatgactaacgagtactgggatctttacagtaacaagatcggatacgtgaaagtgccacgcgtgagagcagctcccactcctgctcctccagtgatgctggcaatagagaatggccccgccgaaccatcagaaaggagcgcgcctgctccgacgcaacccttgagatggcagcacggcaactccagctgcgtgaacgcagttccaatcgccatggcgccccctgcttttcacccagctcctgtcaaaacagagactgatgcaccaggagcgcctacgggctacgcctactcctactccccgtcctggccaagcgtgcaagccatgcaaatcgagaagataaaggaggaaccttccatggcggcgcctggcaccgattgggtagagacaagaaaaaggacgaacgacgatggcgccacgacggttgcgttattcaaaaggaggaaggctccgcaggagttggctggcagtggcagcagatccgctactgatcaggtatcccggtacgtgggagagggagagctgaatgaattctgcttcctgaagatggagaaccggatgctccgtggagagtgctcagaatttgagatggcagagaaggaactacgagtcaaggaacagaatctacggctcgagattgagatggcgcaggagcagttcaagagactactgggcgaatacgtctcgttctcatctatgccgacgcgtaaaccataggcaccgcttccgaagccaactcattagcgcaaaaggcgtgtgtacctgtacctagctctcagaaactcggcttcggttcattttctgtgtgacgaaaaggtctatatgggaaattgagctgaaaatggggggaaaatattcgccgtgttaattttctatagagatcgg

SEQ ID NO: 74939 - DNA, 2432 bp, Zea Mays
gaaaaatctggtcataccaaggcgattcaaagccttggacccttttcttttatatgatctactatctataccaactacagaagggaggcaactagaaaaaagatcgaggttgaactgcgttccacagcaagcgtctcgaggaagcgtcgacggactacatggacgcggagagagacatcaagcccttcgtcttccctaccgtgcccaccaccattcagcggaacttccacggccccggcgctcgtcagccaacggcacggccattggagcgctgtggcactcgagtgctaccgcaaactcatcgaccttgctctgcgccacggcttagtaggaagttctggggcgccggcgattatgacgcggtggcggggaggtctgcgccacagcctccgagtctacagaatcgcatgtgcgtccacccggaatttctccactccaacgcgacctcgcataaatggccgtttggagtatgtcttactttctttcccattgctatagccgtggcagagttgttggacaatgcggtggatgagatagaaactggtggtgctacaacgatattgctggacaaactcatcgacaaacggaatggatcaccagcattactaattcaagatgatggtggaggcatggatcctgattctttgaggcggtgcatgagctttggattttcagagaaacaatcagggtcttcgattggacaatacggaaatggattcaagactagcacaatgcggctcggggcagatgctattgttttcagtcgctgctgcaccaggagcagtgggcctacacaatccattggtctcctctcttacactttcttggtggaaacaggacatacaaatgttgtagttccaatgcggttggagcgtcatggttcgaaacagttcttctcaaatttgtcggcgttgttgaaatggtccccttttgcaacagaagaagagctgatgcagaatttctgtgacattggtccacatggcaccaagattatagtgttcaatctgtggtccaacgacgatggtaatttggagctcgacttcgacacgaatccggaggatattatgatcagtggagcgccaaacccagaacaaatcagcaactctgttaggagggctaacgagaaccatctggcaaatcgactacgctattctcttagggtctatgcttctgtactgtatctacagctaccagattactttaggatcatgcttcgagggcgagaagttgagcgtcatcacattgcctctgacttgatatatcctgaacgcatcagttatagaccacaaagttgcggaataataagagaggctgaggttcttacaacaattgggttcttaaagggtgccccaaccattagcgtgcacggattcaacatctatcacaaaaaccgccttatcttgccattccatagagtgctgagtaccgcgagcagcaaaggcagaagcgtctctggagtgttggaggtagacttcatcaagcccacccatgacaaacaggactttgagaagtcgcagctgtttcagcggctgatgaaccgcctcaaggagatgactaacgagtactgggatctttacagtaacaagatcggatacgtgaaagtgccacgcgtgagagcagctcccactcctgctcctccagtgatgctggcaatagagaatggccccgccgaaccatcagaaaggagcgcgcctgctccgacgcaacccttgagatggcagcacggcaactccagctgcgtgaacgcagttccaatcgccatggcgccccctgcttttcacccagctcctgtcaaaacagagactgatgcaccaggagcgcctacgggctacgcctactcctactccccgtcctggccaagcgtgcaagccatgcaaatcgagaagataaaggaggaaccttccatggcggcgcctggcaccgattgggtagagacaagaaaaaggacgaacgacgatggcgccacgacggttgcgttattcaaaaggaggaaggctccgcaggagttggctggcagtggcagcagatccgctactgatcaggtatcccggtacgtgggagagggagagctgaatgaattctgcttcctgaagatggagaaccggatgctccgtggagagtgctcagaatttgagatggcagagaaggaactacgagtcaaggaacagaatctacggctcgagattgagatggcgcaggagcagttcaagagactactgggcgaatacgtctcgttctcatctatgccgacgcgtaaaccataggcaccgcttccgaagccaactcattagcgcaaaaggcgtgtgtacctgtacctagctctcagaaactcggcttcggttcattttctgtgtgacgaaaaggtctatatgggaaattgagctgaaaatggggggaaaatattcgccgtgttaattttctatagagatcgg

SEQ ID NO: 74940 - DNA, 2391 bp, Zea Mays
atgtgcatgtcctcactaatcgctcccacgcggccacgccgcttgtcatttgagaacagcaagcgtctcgaggaagcgtcgacggactacatggacgcggagagagacatcaagcccttcgtcttccctaccgtgcccaccaccattcagcggaacttccacggccccggcgctcgtcagccaacggcacggccattggagcgctgtggcactcgagtgctaccgcaaactcatcgaccttgctctgcgccacggcttagtaggaagttctggggcgccggcgattatgacgcggtggcggggaggtctgcgccacagcctccgagtctacagaatcgcatgtgcgtccacccggaatttctccactccaacgcgacctcgcataaatggccgtttggagccgtggcagagttgttggacaatgcggtggatgagatagaaactggtggtgctacaacgatattgctggacaaactcatcgacaaacggaatggatcaccagcattactaattcaagatgatggtggaggcatggatcctgattctttgaggcggtgcatgagctttggattttcagagaaacaatcagggtcttcgattggacaatacggaaatggattcaagactagcacaatgcggctcggggcagatgctattgttttcagtcgctgctgcaccaggagcagtgggcctacacaatccattggtctcctctcttacactttcttggtggaaacaggacatacaaatgttgtagttccaatgcggttggagcgtcatggttcgaaacagttcttctcaaatttgtcggcgttgttgaaatggtccccttttgcaacagaagaagagctgatgcagaatttctgtgacattggtccacatggcaccaagattatagtgttcaatctgtggtccaacgacgatggtaatttggagctcgacttcgacacgaatccggaggatattatgatcagtggagcgccaaacccagaacaaatcagcaactctgttaggagggctaacgagaaccatctggcaaatcgactacgctattctcttagggtctatgcttctgtactgtatctacagctaccagattactttaggatcatgcttcgagggcgagaagttgagcgtcatcacattgcctctgacttgatatatcctgaacgcatcagttatagaccacaaagttgcggaataataagagaggctgaggttcttacaacaattgggttcttaaagggtgccccaaccattagcgtgcacggattcaacatctatcacaaaaaccgccttatcttgccattccatagagtgctgagtaccgcgagcagcaaaggcagaagcgtctctggagtgttggaggtagacttcatcaagcccacccatgacaaacaggactttgagaagtcgcagctgtttcagcggctgatgaaccgcctcaaggagatgactaacgagtactgcaccgatgcttacttcgcctcaaatgtcaccacgcaaatgtctcggtccttccacagggatctttacagtaacaagatcggatacgtgaaagtgccacgcgtgagagcagctcccactcctgctcctccagtgatgctggcaatagagaatggccccgccgaaccatcagaaaggagcgcgcctgctccgacgcaacccttgagatggcagcacggcaactccagctgcgtgaacgcagttccaatcgccatggcgccccctgcttttcacccagctcctgtcaaaacagagactgatgcaccaggagcgcctacgggctacgcctactcctactccccgtcctggccaagcgtgcaagccatgcaaatcgagaagataaaggaggaaccttccatggcggcgcctggcaccgattgggtagagacaagaaaaaggacgaacgacgatggcgccacgacggttgcgttattcaaaaggaggaaggctccgcaggagttggctggcagtggcagcagatccgctactgatcaggtatcccggtacgtgggagagggagagctgaatgaattctgcttcctgaagatggagaaccggatgctccgtggagagtgctcagaatttgagatggcagagaaggaactacgagtcaaggaacagaatctacggctcgagattgagatggcgcaggagcagttcaagagactactgggcgaatacgtctcgttctcatctatgccgacgcgtaaaccataggcaccgcttccgaagccaactcattagcgcaaaaggcgtgtgtacctgtacctagctctcagaaactcggcttcggttcattttctgtgtgacgaaaaggtctatatgggaaattgagctgaaaatggggggaaaatattcgccgtgttaattttctatagagatcgg

SEQ ID NO: 74941 - DNA, 2460 bp, Zea Mays
atgtgcatgtcctcactaatcgctcccacgcggccacgccgcttgtcatttgagaacagcaagcgtctcgaggaagcgtcgacggactacatggacgcggagagagacatcaagcccttcgtcttccctaccgtgcccaccaccattcagcggaacttccacggccccggcgctcgtcagccaacggcacggccattggagcgctgtggcactcgagtgctaccgcaaactcatcgaccttgctctgcgccacggcttagtaggaagttctggggcgccggcgattatgacgcggtggcggggaggtctgcgccacagcctccgagtctacagaatcgcatgtgcgtccacccggaatttctccactccaacgcgacctcgcataaatggccgtttggagtatgtcttactttctttcccattgctatagccgtggcagagttgttggacaatgcggtggatgagatagaaactggtggtgctacaacgatattgctggacaaactcatcgacaaacggaatggatcaccagcattactaattcaagatgatggtggaggcatggatcctgattctttgaggcggtgcatgagctttggattttcagagaaacaatcagggtcttcgattggacaatacggaaatggattcaagactagcacaatgcggctcggggcagatgctattgttttcagtcgctgctgcaccaggagcagtgggcctacacaatccattggtctcctctcttacactttcttggtggaaacaggacatacaaatgttgtagttccaatggttgattataaatgcaatctaatgaatggccaaactcagcggttggagcgtcatggttcgaaacagttcttctcaaatttgtcggcgttgttgaaatggtccccttttgcaacagaagaagagctgatgcagaatttctgtgacattggtccacatggcaccaagattatagtgttcaatctgtggtccaacgacgatggtaatttggagctcgacttcgacacgaatccggaggatattatgatcagtggagcgccaaacccagaacaaatcagcaactctgttaggagggctaacgagaaccatctggcaaatcgactacgctattctcttagggtctatgcttctgtactgtatctacagctaccagattactttaggatcatgcttcgagggcgagaagttgagcgtcatcacattgcctctgacttgatatatcctgaacgcatcagttatagaccacaaagttgcggaataataagagaggctgaggttcttacaacaattgggttcttaaagggtgccccaaccattagcgtgcacggattcaacatctatcacaaaaaccgccttatcttgccattccatagagtgctgagtaccgcgagcagcaaaggcagaagcgtctctggagtgttggaggtagacttcatcaagcccacccatgacaaacaggactttgagaagtcgcagctgtttcagcggctgatgaaccgcctcaaggagatgactaacgagtactgcaccgatgcttacttcgcctcaaatgtcaccacgcaaatgtctcggtccttccacagggatctttacagtaacaagatcggatacgtgaaagtgccacgcgtgagagcagctcccactcctgctcctccagtgatgctggcaatagagaatggccccgccgaaccatcagaaaggagcgcgcctgctccgacgcaacccttgagatggcagcacggcaactccagctgcgtgaacgcagttccaatcgccatggcgccccctgcttttcacccagctcctgtcaaaacagagactgatgcaccaggagcgcctacgggctacgcctactcctactccccgtcctggccaagcgtgcaagccatgcaaatcgagaagataaaggaggaaccttccatggcggcgcctggcaccgattgggtagagacaagaaaaaggacgaacgacgatggcgccacgacggttgcgttattcaaaaggaggaaggctccgcaggagttggctggcagtggcagcagatccgctactgatcaggtatcccggtacgtgggagagggagagctgaatgaattctgcttcctgaagatggagaaccggatgctccgtggagagtgctcagaatttgagatggcagagaaggaactacgagtcaaggaacagaatctacggctcgagattgagatggcgcaggagcagttcaagagactactgggcgaatacgtctcgttctcatctatgccgacgcgtaaaccataggcaccgcttccgaagccaactcattagcgcaaaaggcgtgtgtacctgtacctagctctcagaaactcggcttcggttcattttctgtgtgacgaaaaggtctatatgggaaattgagctgaaaatggggggaaaatattcgccgtgttaattttctatagagatcgg

SEQ ID NO: 74942 - DNA, 1406 bp, Zea Mays
gcaaatcgccccccaaaccaaccggggccggccgacacaagcagcatcccgtcggcggcgatggacctggcgtcgagcgacctcgcggcgctgggcgcggcggagctgatccgcgtctcggcgtcgatcccgcgcgcggctccgcgcaccttcgcgctgctcaccgcctgcctcgtcttcccgctctccttcgccgtgctcgcgcactccctcttcacccaccccatcctgctccgcatccggggcgccgcccactcggggttcgcgccgtggctcggcctcttcgcgtaccagttcatctacctcatcgtcctcttcaccttctccctcctctccaccgccgccgccgtcttcaccgtcgcctccctctacaccgggaagcccgcgtccgtctcctcctcgctcagcgcgctgcgccccatcctgccccgcctcctccgcaccttcctctgggtctccctcctcatgctcgcctaccacctcgccttcgcgctcgccgtcctcctgctcatcgtcgtcttcgcccccaacgcgtccgagtccgcgccgccctccctcgccttcgtcctcttcctcctcctcgtcgtcctcgtcttcctcgggatccacgtctacatctccgcgctgtggcacctcgccagcgtcgtctccgtgctcgagccgctctgcgggctcgctgccatggccaagagcaggcagctgctccagggccgcaccggcaccgcagccacgcttgtcgtctcctacttcgcggtctgtggcgcgacctcgttgctgttccgtgccgctgtcgttaagggacgcaccgaggaggggagcttcggcctggccttgcctggccggctgcttgtcggcgccgtgctggtgtgcgttcttgtctctgtcaatctgctaggactgctcgtgcagagtgtcttctactacgcctgcaaggccttccacagccagcagattgaccgcactgcattgtatgagcaccttggaggctaccttggggagtacgtgccactcaagagcaatatccagatggagaacctttgagagttggagcataggacaaggggttagcacatcggcggcgctccctggaggacctatcgaggccagccatggcgaaccacagcctccgtgcgttcctggttctcctcgtcgcgaaggtctgcttcgtcatggcgatggtggcgacggcggtgcagggcaggcctgggcctggacccacggccctggagtctgttcccgcgtgctgcttctaccaccccgagtgctgctacgacgctgccggccctccggctgatctagggtgacggtgattgttgtttcgatgcccgtaatgagctaatgctgtttctggctccgtcattgtactgatcgctcgcgtaataaaatgagagttatgagtatggttc

SEQ ID NO: 74943 - DNA, 411 bp, Zea Mays
gcctgttgttcacgaacgcccacacgatggtactggaactactactgctgctgctactagtatctttcaacgactggggtgaagctcacgtacgggtcacggtacctcgataatccggcaggcgttgttgacggttcctctgacggtgcccaaatccagcccgtagtcggcgctcagcgacgccatctgcttctcggtgtacttggcgaccgcatccacgttgaagccggagaacgcctccctgtttgtgagcagacaaaacattcaggcaaatacagatcaaaaaattcagcacagatgttgtttcacgacgtagcacttgatcaacatcatctctattactatcagcggcagcacagatgttccccccacctgtagacgtgtcttttcttgaggatggaagtccagtcg

SEQ ID NO: 74944 - DNA, 1676 bp, Zea Mays
ctcaaaaccacacaattcaacaactgggtgaagaagcaacaaatacatttgcgtagcagacatcgctgcccgtgtctgtgtctccattcacctcgctgctcagtctgacacggaaccgagcggaaaacccaggccagctcccgataagaaatcctcgagtcgaccagtcccccataggccgtagaccagagcagtagaccgccatggcgaaccgcagcaagcagctcgttaccaccgcactgccgctcgcggcggcagcagcagcctcgctcgccgtcgtgctcctgctctgctccacgggctcatcggaagccgacggatacctcgggcgcgtgggtgcgccgtggggccgtaccctcacggtcctcccattcagccccgcggacctgctgcccctcctgccgcggggcgtcgccatggccgcgctccgggcgctccgcggcgtctcggacatcttcccggtgttcgtcggcgccgcgtcggccggcgggtcgggctcggtgcccggcagcggggggacggtgagatggaagggggcctgcttctacgagaacgaggcgtggctggtgttccacaacgagagcgggtccaagtacggcggcggcacactccatatcaagggagaagatgttattgctatcctgccctgggaggaatggtgggagtttgaagtgacaaaggatgactcaaatcctcagattgcactgcttcctttgcatccagatctgcgggcaaaatttaatgagacagcagcttggatttatgcaaaaagcatggaggggaaaccttatgggtatcacaatatgatatttagctggattgataccatcagtgataattatccaccaccattagatgctcatgtggttgcttctgttatgactgtatggagcaagcttcaaccagagtatgctgctaatatgtggaaagaagcccttaacaaacggcttggaactaagggtcttgacctttctgaaatcatagtggaatcagagaaacgtgggataacatttgacaagttactatctgttcctgagaacgatagctgggtctatgaagatggtcagtcagcatcttgtgtggctttcgtccttatgatgtacaaggaggctggactctttgaccctattaccagctctattgaagttactgaattcacaataaaagatgcttatatcctcaacttttttgaggacaactcgacccgacttccggagtggtgcaacaaggatgacgatgtgaagcttcccttttgccagatcaagggcaagtaccggatggagctgcctggatacaacaccatgaaaccctatgcccacatgaacgagagatgtccatccctgcctccagattacaacaggactaagggctgctagtgctaaccagatatgcgtgtgcattttattcacgctcccttgtagccattgcttcagctgtaaatattatacatttatactagtataatagtactatgggggtatgtactgcttgcccttgagaagcgtgtattgattgtaggcaacttatgtgagacttcctcgaataaggaagaacatgaatcacacaaatgtacagtaaccatgcttgatctttttatcagtgtttacttatgtaacagtaaaaaatgtataatgtatgtgcgcctttggactgagctgattacatgatccccatgc

SEQ ID NO: 74945 - DNA, 2049 bp, Zea Mays
aagcaacaaatacatttgcgtagcagacatcgctgcccgtgtctgtgtctccattcacctcgctgctcagtctgacacggaaccgagcggaaaacccaggccagctcccgataagaaatcctcgagtcgaccagtcccccataggccgtagaccagagcagtagaccgccatggcgaaccgcagcaagcagctcgttaccaccgcactgccgctcgcggcggcagcagcagcctcgctcgccgtcgtgctcctgctctgctccacgggctcatcggaagccgacggatacctcgggcgcgtgggtgcgccgtggggccgtaccctcacggtcctcccattcagccccgcggacctgctgcccctcctgccgcggggcgtcgccatggccgcgctccgggcgctccgcggcgtctcggacatcttcccggtgttcgtcggcgccgcgtcggccggcgggtcgggctcggtgcccggcagcggggggacggtgagatggaagggggcctgcttctacgagaacgaggcgtggctggtgttccacaacgagagcgggtccaagtacggcggcggcacactccatatcaagacatccaaagcacacagctggacttgcatagatctgtatgtatttgcaacaccatacagagttacatgggattactactttctggggcgagagcacactcttgatatcaaagaatgggaaagcgaggctgagtatgagtatgtgaaacgtaatggtgtgtccatcttcctcatgccatctggaacaattggcacacttcgagcactctgggatgtcttccctctgttcacaaatactgcatgggtcgggagatttcttggttttatcgaagattcgcgggcgttggggtggttttgaaacactggagaagtgggttactggcgcttatgctggccatactgcggtttgcctgagggactccgatggaaagctttgggttggggaatctggtaatgaaaatgaacagggagaagatgttattgctatcctgccctgggaggaatggtgggagtttgaagtgacaaaggatgactcaaatcctcagattgcactgcttcctttgcatccagatctgcgggcaaaatttaatgagacagcagcttggatttatgcaaaaagcatggaggggaaaccttatgggtatcacaatatgatatttagctggattgataccatcagtgataattatccaccaccattagatgctcatgtggttgcttctgttatgactgtatggagcaagcttcaaccagagtatgctgctaatatgtggaaagaagcccttaacaaacggcttggaactaagggtcttgacctttctgaaatcatagtggaatcagagaaacgtgggataacatttgacaagttactatctgttcctgagaacgatagctgggtctatgaagatggtcagtcagcatcttgtgtggctttcgtccttatgatgtacaaggaggctggactctttgaccctattaccagctctattgaagttactgaattcacaataaaagatgcttatatcctcaacttttttgaggacaactcgacccgacttccggagtggtgcaacaaggatgacgatgtgaagcttcccttttgccagatcaagggcaagtaccggatggagctgcctggatacaacaccatgaaaccctatgcccacatgaacgagagatgtccatccctgcctccagattacaacaggactaagggctgctagtgctaaccagatatgcgtgtgcattttattcacgctcccttgtagccattgcttcagctgtaaatattatacatttatactagtataatagtactatgggggtatgtactgcttgcccttgagaagcgtgtattgattgtaggcaacttatgtgagacttcctcgaataaggaagaacatgaatcacacaaatgtacagtaaccatgcttgatctttttatcagtgtttacttatgtaacagtaaaaaatgtataatgtatgtgcgcctttggactgagctgattacatgatccccatgc

SEQ ID NO: 74946 - DNA, 1953 bp, Zea Mays
ctcggatctggccaattcggatttccatatccccctatcttcgcccgcgagctcctcaccgctcccccgagattagggggggagcgcaagtgcctgaagtaagcctaatcctaaccgccgccgtcatgacggcgcccaagctcaagctcctagctcttcctactctgctggtcctcatcctcctcctcctcctctccgccgcccggcggcgcgtccttctggagacgctcctcctccgcgccccggtcctcccgggcgacctcctcccgctcctgccctggcccgtggcgcagccgctgctccgccgcctcgcgctgcggggccccgccgacctgctcccggctttcgtcggggccgcgcgcgcgccggggtccgacgacgcctacccggtcgccgagtggaagggcgcctgcttctacgagaacagggcgtgggtggagttccgcaacgggaccggcggggggctcggaggcggcgtagtccatgtggagacatccaaagcacacagctggacttgcatagatctgtatgtatttgcaacaccatacagagttacatgggattactactttctggggcgagagcacactcttgatatcaaagaatgggaaagcgaggctgagtatgagtatgtgaaacgtaatggtgtgtccatcttcctcatgccatctggaacaattggcacacttcgagcactctgggatgtcttccctctgttcacaaatactgcatgggtcgggagatttcttggttttatcgaagattcgcgggcgttggggtggttttgaaacactggagaagtgggttactggcgcttatgctggccatactgcggtttgcctgagggactccgatggaaagctttgggttggggaatctggtaatgaaaatgaacagggagaagatgttattgctatcctgccctgggaggaatggtgggagtttgaagtgacaaaggatgactcaaatcctcagattgcactgcttcctttgcatccagatctgcgggcaaaatttaatgagacagcagcttggatttatgcaaaaagcatggaggggaaaccttatgggtatcacaatatgatatttagctggattgataccatcagtgataattatccaccaccattagatgctcatgtggttgcttctgttatgactgtatggagcaagcttcaaccagagtatgctgctaatatgtggaaagaagcccttaacaaacggcttggaactaagggtcttgacctttctgaaatcatagtggaatcagagaaacgtgggataacatttgacaagttactatctgttcctgagaacgatagctgggtctatgaagatggtcagtcagcatcttgtgtggctttcgtccttatgatgtacaaggaggctggactctttgaccctattaccagctctattgaagttactgaattcacaataaaagatgcttatatcctcaacttttttgaggacaactcgacccgacttccggagtggtgcaacaaggatgacgatgtgaagcttcccttttgccagatcaagggcaagtaccggatggagctgcctggatacaacaccatgaaaccctatgcccacatgaacgagagatgtccatccctgcctccagattacaacaggactaagggctgctagtgctaaccagatatgcgtgtgcattttattcacgctcccttgtagccattgcttcagctgtaaatattatacatttatactagtataatagtactatgggggtatgtactgcttgcccttgagaagcgtgtattgattgtaggcaacttatgtgagacttcctcgaataaggaagaacatgaatcacacaaatgtacagtaaccatgcttgatctttttatcagtgtttacttatgtaacagtaaaaaatgtataatgtatgtgcgcctttggactgagctgattacatgatccccatgc

SEQ ID NO: 74947 - DNA, 784 bp, Zea Mays
ctcaagcctccgcctcgtctcgacgccttacacccagtgccaaccgccgtgccctcaccctctctatctgcgccgtctctcactctctaccgccgccgccgccgccctacgccacgcaaaaagcgccacaagattcgcccctgctgaaaacgcactcgatggcgtccgcgacgggggtttcctcctcggagatggcggtggaccacgcgacggggccgggcgccgtggacaagccgcggttcgatgctctgacgccgaatgagatgagcggcgggaggccccagttccggaaagtgcccgtcccgcagcaccggttcgcgccgctcaagcgatgctggatggaaatctacacacccgtatacgagcatatgaagatcgatatacgcatgaatctcaaggcaaggagggtggagctaaagacaaggcaagacacaccggacgtgagcaaccttcagaaatgacgtgaagaccctgcgaggggagcatctgtcgcgtgctattggccgcctatcagggaaaggaggcaagaccaagtacgccattgagaactctaccaggacccgcatcgttatcgctgatacaaagatccatatacttggatcctttgttaacatcaaggtgactgaaaaggcacaagaattcaaaatatttgttgataaatagaggtataagcaagcattcatggagacacaagaaaatgaaagtggcatagctaagaaagcgaaacttcaggaaaatggaagccctggtagcttccaaaaattgggctggtatcgatacatga

SEQ ID NO: 74948 - DNA, 1039 bp, Zea Mays
ctgggcagagcccccgagccgagcagttggtttggtggcgcgcctttactgccgctgccgctcactttcccagggaggggttaattgcctccgccggcctcgctctcgcgtcgcgtccttcggatgccgcactgaccgcgaccaagtcacgcagctcagccgcgcgccgcgatgggcgagaggaggaggcgtgcgagcactgcttccctcgggggtggaggtggagctggaggtagcggtgctgtgcccgcgcggaacgaggaggacaaggccgcggagccgcctccaccgacgttgtggttcgcgctcaagcggtcgctgcactgccgctccgagctgtcggaggtccacgtgccgcgcgccaacaaggcctccggtccagtcgtcgcgagcggtggccacctgtcgtcgatcgtcaccaagcgcgcctccgcgcggtcggggtgctcgcgctccatcgccaacctgcgggacgtcatccacgggagcaagcgccacccggggcagccgcccagctgcagcccgcggtccatcggcagcagcgagttcctcaaccccatcgcgcacgaggtcgtgctcagcaccaactcccgctgcgagctcaagatcaccggcttcgggggctgcggcgggctggcggccgtggggaccggcgccgcggccgcgcacgacgcctgcggcgggggcgacggcggcgtggtgtcgtcgttcgtcggcacgctccgccccggcacgccgggccccgcgtgggccggagccgggcacggcctgccgtgcagcggctccgtgcggggcggggtgcgctgcacgccgccgcggtccccgtgcgtgctgctcgagaggaacggttccgtggtcagcggccaccgcgcgtcctcctgcgaggagaccgcaaaggacggcggcgccggcaagggttccggcgggctcagctgccacaggtgcggcgagcagttcagcaagtgggaggcgctggaggagcaccacctctccaggcatgcagcttgcaggaggtccaagccagccgcaccccagccct

SEQ ID NO: 74949 - DNA, 1450 bp, Zea Mays
ggacgtgaaacctccaaccatggccataccacaggtgcgcacccctctcccatcgaacttctctctcctacactgtccctcccagcctcccgggagccgccgtcgtgagtcgctcgcccatgttccttctccccctccggtcccgcctcatcgcccaacgagacctaggcccctcacctccacggcggcggatcgggggccggcgacggtgcgcgaggctacggaggcgatagcggctccccctcctccgacgtcgcctctccactctccccatccttcgtcatcgcgaccgcgtctcagtctgacggccacccgttgggtccaacccaaggtgtacccgctattcatgacgatgggtgttgctatgggcatatgcggacttcagctcttctggaacatcaccggcaacctggaagtcaggttcggatctataatcttcactccttttgcctattcgattcttgcaagagatgtgctgttccatctagagcagggtacgtagatctacttggtccgccgcctcgccttctccccctctccctcggcagccgccgcgagcggcccttcatcgacggcgtctgctccgacaatgccaccctcatgcctcgctcggatctctccgatcgcgtcccttctcacaacacagaccctcaggccgcttctctcgtcaatacctcgacagcactcctcgtcctcctcgcccttgcggtggccagtggagtggcggcagacggctcagaccaccggtacaagatgtacaggcttgtccccactgaacggcaacaatggcccctttcacaatcctagatgctaaagatggggtcgtttctgatttcctgagcctcagcacgatgttgtttccgaattttagtgcggacttgaatgggacaactggcgatatggttgattttcaatctacaggggatgtagggaatagcgcagccatcaccgagatgggcaacctggttcctgagccatcctacgaggaacagaaaaggctagattatggagtgttgctactatgaattgcttagatttcgatgcctggaccacagttgttgaggagacggacaaaaatgctgaggttgtgcatgctacaagattacttgtgttctgactgccaccatgtagcaacattgaggtcaccattggatcatggcactccaattttatgagatgctagcgagccaacacaacttgatttgtgcttctaatcatgactatggaccttcctcccttctcgtgctagccaacgcaacttgatctctgtatgtaaatatcttactgcagttcccaggtgcagtggctgctctgcttacgcccactggtaggttaatctggttcttagaattttctagccgcaaattgtattgtttagttacttggatagctgacgtcttttgatcaccaaaatatgtaattgatttcgtactgtccatgtccttgggat

SEQ ID NO: 74950 - DNA, 1374 bp, Zea Mays
ggacgtgaaacctccaaccatggccataccacaggtgcgcacccctctcccatcgaacttctctctcctacactgtccctcccagcctcccgggagccgccgtcgtgagtcgctcgcccatgttccttctccccctccggtcccgcctcatcgcccaacgagacctaggcccctcacctccacggcggcggatcgggggccggcgacggtgcgcgaggctacggaggcgatagcggctccccctcctccgacgtcgcctctccactctccccatccttcgtcatcgcgaccgcgtctcagtctgacggccacccgttgggtccaacccaaggtgtacccgctattcatgacgatgggtgttgctatgggcatatgcggacttcagctcttctggaacatcaccggcaacctggaagtcagggtacgtagatctacttggtccgccgcctcgccttctccccctctccctcggcagccgccgcgagcggcccttcatcgacggcgtctgctccgacaatgccaccctcatgcctcgctcggatctctccgatcgcgtcccttctcacaacacagaccctcaggccgcttctctcgtcaatacctcgacagcactcctcgtcctcctcgcccttgcggtggccagtggagtggcggcagacggctcagaccaccggtacaagatgtacaggcttgtccccactgaacggcaacaatggcccctttcacaatcctagatgctaaagatggggtcgtttctgatttcctgagcctcagcacgatgttgtttccgaattttagtgcggacttgaatgggacaactggcgatatggttgattttcaatctacaggggatgtagggaatagcgcagccatcaccgagatgggcaacctggttcctgagccatcctacgaggaaaaaaggctagattatggagtgttgctactatgaattgcttagatttcgatgcctggaccacagttgttgaggagacggacaaaaatgctgaggttgtgcatgctacaagattacttgtgttctgactgccaccatgtagcaacattgaggtcaccattggatcatggcactccaattttatgagatgctagcgagccaacacaacttgatttgtgcttctaatcatgactatggaccttcctcccttctcgtgctagccaacgcaacttgatctctgtatgtaaatatcttactgcagttcccaggtgcagtggctgctctgcttacgcccactggtaggttaatctggttcttagaattttctagccgcaaattgtattgtttagttacttggatagctgacgtcttttgatcaccaaaatatgtaattgatttcgtactgtccatgtccttgggat

SEQ ID NO: 74951 - DNA, 1342 bp, Zea Mays
ggacgtgaaacctccaaccatggccataccacaggtgcgcacccctctcccatcgaacttctctctcctacactgtccctcccagcctcccgggagccgccgtcgtgagtcgctcgcccatgttccttctccccctccggtcccgcctcatcgcccaacgagacctaggcccctcacctccacggcggcggatcgggggccggcgacggtgcgcgaggctacggaggcgatagcggctccccctcctccgacgtcgcctctccactctccccatccttcgtcatcgcgaccgcgtctcagtctgacggccacccgttgggtccaacccaaggtgtacccgctattcatgacgatgggtgttgctatgggcatatgcggacttcagctcttctggaacatcaccggcaacctggaagtcaggttcggatctataatcttcactccttttgcctattcgattcttgcaagagatgtgctgttccatctagagcagggtacgtagatctacttggtccgccgcctcgccttctccccctctccctcggcagccgccgcgagcggcccttcatcgacggcgtctgctccgacaatgccaccctcatgcctcgctcggatctctccgatcgcgtcccttctcacaacacagaccctcaggccgcttctctcgtcaatacctcgacagcactcctcgtcctcctcgcccttgcggtggccagtggagtggcggcagacggctcagaccaccggtacaagatgtacaggcttgtccccactgaacggcaacaatggcccctttcacaatcctagatgctaaagatggggtcgtttctgatttcctgagcctcagcacgatgttgtttccgaattttagtgcggacttgaatgggacaactggcgatatggttgattttcaatctacaggggatgtagggaatagcgcagccatcaccgagatgggcaacctggttcctgagccatcctacgaggaaatttcgatgcctggaccacagttgttgaggagacggacaaaaatgctgaggttgtgcatgctacaagattacttgtgttctgactgccaccatgtagcaacattgaggtcaccattggatcatggcactccaattttatgagatgctagcgagccaacacaacttgatttgtgcttctaatcatgactatggaccttcctcccttctcgtgctagccaacgcaacttgatctctgtatgtaaatatcttactgcagttcccaggtgcagtggctgctctgcttacgcccactgcgccagatgaaactggacattaattgttgtttttgagaatgcccatgggcagaattaaac

SEQ ID NO: 74952 - DNA, 1808 bp, Zea Mays
ggacgtgaaacctccaaccatggccataccacaggtgcgcacccctctcccatcgaacttctctctcctacactgtccctcccagcctcccgggagccgccgtcgtgagtcgctcgcccatgttccttctccccctccggtcccgcctcatcgcccaacgagacctaggcccctcacctccacggcggcggatcgggggccggcgacggtgcgcgaggctacggaggcgatagcggctccccctcctccgacgtcgcctctccactctccccatccttcgtcatcgcgaccgcgtctcagtctgacggccacccgttgggtccaacccaaggtgtacccgctattcatgacgatgggtgttgctatgggcatatgcggacttcagctcttctggaacatcaccggcaacctggaagtcaggttcggatctataatcttcactccttttgcctattcgattcttgcaagagatgtgctgttccatctagagcagggtacgtagatctacttggtccgccgcctcgccttctccccctctccctcggcagccgccgcgagcggcccttcatcgacggcgtctgctccgacaatgccaccctcatgcctcgctcggatctctccgatcgcgtcccttctcacaacacagaccctcaggccgcttctctcgtcaatacctcgacagcactcctcgtcctcctcgcccttgcggtggccagtggagtggcggcagacggctcagaccaccggtacaagatgtacaggcttgtccccactgaacggcaacaatggcccctttcacaatcctagatgctaaagatggggtcgtttctgatttcctgagcctcagcacgatgttgtttccgaattttagtgcggacttgaatgggacaactggcgatatggttgattttcaatctacaggggatgtagggaatagcgcagccatcaccgagatgggcaacctggttcctgagccatcctacgaggaaatttcgatgcctggaccacagttgttgaggagacggacaaaaatgctgaggttgtgcatgctacaagattacttgtgttctgactgccaccatgtagcaacattgaggtcaccattggatcatggcactccaattttatgagatgctagcgagccaacacaacttgatttgtgcttctaatcatgactatggaccttcctcccttctcgtgctagccaacgcaacttgatctctgtatgtaaatatcttactgcagttcccaggtgcagtggctgctctgcttacgcccactggacccaattattggaggaagtttattgttgacatacacaacggactatgttgcgcgccttcctactatagcttcttttgctagagcactgcaggtcaccgttggatcatggtgctccaattctatgaggtggtagcgagcacctggtcctccgcttctgaccatgactgtggaccttcctcccttctcgtgctagctaacacaagttgatctctgcttgtaaatatatgactgcagttcccacgtgcagtggttgcttagcccactggtaggatcatctgcttgttagactttcaagccgcaaaatgtgttgtttagttacttgggtagccgacgtcctttgatcaccaaaacatgtaatagatttcgtactgtctaggtcctcgccatcagacaatcaacataccattgctaaattcgtacgtccgaatttgtcgtttctttttcgtactgtacacaatatatttcatgatgtacttatgtatatatgcctgatacaacgcctgatagggcgctgtctttttcta

SEQ ID NO: 74953 - DNA, 1984 bp, Zea Mays
gtcggtccccgccatctctgtcgtcggcgtgcaggcctgatctagctagctagctagcatctcacgaagacgaagcagcagaagcaccccaaatcacaaaaaaatgtagaagctaaatcaagggaggcgcgcatcaaaatcgcagtcggcgccagcgtctcggcgctggcgcttcttctagcagtcgctggtctcctcatctggtcatggaggagaaggctaacaagaacagacggatcaagtaaatggagtagctcccgccccaccggccgccggtacgagggaagcagccacggtgacgacctggagctgccaatatttgatgtggggacgattgcagctgccacggatggttactcgatcgaaaacaagcttggcgagggtggatttggaccagtgtacaagggtaagctcgaggacggaatggaaatcgcagtgaagacactctcgaagacgtctgcacaagggcttgacgagttcaagaacgaggtcttgttgatagccaagctccagcatcgcaatcttgtccggcttcttgggtgcagcgtcagtgggcaagaaaggatgcttgtttacgagtacatggcaaacaagagcctggactatttcctgtttgagaaggacaacgttgtgctcgattggcaagtgcggtaccgtataatagaaggcattactcgaggtctactctacctccaccaggactcgagatacaggatcatccacagagatctgaaggcagctaatgtccttctggacaaggagatgacgcccaaaatctcagactttggcatggcgaggatatttggcaacgaagagacagaaatcaatacccgaaaagtggtcggcacgtacggttatatgtctccggagtatgcaatggatgggatcttctctgtcaagtcggacgtattcagctatggagtattgctgctggaaatcgtcagcggtaggaggaacagaggagtgtattcctattcaaacaaccaaagccttctaggccatgcatggagcttgtggaacgaggagaagagcatagagctagcagacgaaagaatgaatgggtcgttcaactcggacgaagtgcacaagtgcatcagagttgggctcttgtgcgtgcaggagaacccagacgaccgtccgctgatgtctcaggtgcttctgatgctggctagtaccgatgccacctcactgccaactcctaagcagcctggcttcgccgctaggagagttctgatggaaacagacacgtcgtcaaccaagccagactgcagcatatttgacagtgcaacaattaccatgcttgaaggtcgatagtagtagttatgagttatgactgaaatgaaacttaaactgctagggaaatgtgtattgtagagtaaatttggcggcctcttcagtatcttgtgtgcttaagcagcagaaaattatatgaatattgaataatagcaggcagcagctggtagaaactttgttgcttttagcgccgattagtgatacataatgctggacactaagaaatttataaattttgctaatgttacaaagcacttctgttatgatcggacgccactgcaggcggcggacaacaggagaggcggcggcgaccaacaataagtatgcagattagtctgataaggattagaagatttaggagataaggtttgttagaaagaaaagagaagatctcatacagattagttagatgatgtttaggagattaaagacataaagtttgttagagagaaaagagaggatcttagatttaatctctttagaaaaggactagaaggaagtataaatacttgtaaacaccactctatatgaattaagtagaaaattatttagcatatttcctctaaaggaagcacgtgtgttttcctctcctaaaaccgttgatcagtgtccaccgaagaatagcgcggtcacagtgcccttgtccgccgcgcccccgtcctgcgccagcccgcaatgccctatccctaca

SEQ ID NO: 74954 - DNA, 1419 bp, Zea Mays
tcgggagtacccgcactttcgcccatttcatttcaaaccaaaaccctctctccccttgccttccaccacaccccggatcaaatcgccacagaaaattcccagaaaaataacaagcacttgttcatcatcaaagtaaacgccgcagaaccctagcgaggcgttcctccaacgactcacctcccacccactcacccaccccatggcgaccaacccctccaacggcgccggcgccgacgtccctgcagccccggcggcggtgcggctctcggttgcggcgcaggcggccgcgatccagccctcttccccgcgcttcttcttctcctcgcttgccgggaccaacccggcctccccgcaccgtcgcatcgccatcgccgttgatctctccgacgagtccgccttcgcagtcaagtgggccgtgcagaactacctccgccccggggacgccgtcgtgctgctccacgtgcgccccacttccgtcctctacggcgccgactggggctccatcccggtctccgtcgctgacgaggacgacgctgccgaggacgccgccgccgccgccgagggcggtccctcggaggaggagctgcagaagaaacgggaggaggactacgacgccttcacctccaccaaggcgcaggacctcgcgcaaccgctggtcgacgcccagatccccttcaagatccacgtcgtcaaggaccacgacatgaaggagcgcctctgcctcgaggctgagcgccttggcctctccgccatgatcatggggagccgcggtttcggggcctcccggaaaggcagcaaggggcggcttgggagtgttagtgattactgcgtacaccactgtgtatgtcctgttgtggttgttcgctaccctgatgatgctgcagatgccggtggagatgcatcaggggtgacagatgagttgcacactgtaccagaggacgaacctgtttatcacgatgcggctgaagaacgaaggaaaacatgaggcttgtagtgaggcaatcctgtgtatctggaagatgggaccggctgtttatctttgcttctatatatcaactgcgtatcatgatcagctgtctgcttcccgttgagtttcatatcggagtcgtagatcatctgagttttttgttggtttgcttgtgagatgtagagtactcttcccgtgggtcgaaggtgtcttgcagatgcttgaactttatgttgtcgaacggtagttatctacacggtatcatcttctctgttaagcctgtttagtgtttactgtattggatactcgttaatagagaaccgctacttttcagtatttattatcacctgtatattggataaaattattgcttagcttatgcttgcatgctccatatttgtattctgtaagacttgtttgagaagaattcgtttgaaataaatttgtcaaaa

SEQ ID NO: 74955 - DNA, 2337 bp, Zea Mays
ggagacggcgaggtgagttctggagacttggagaggcattccgcatcggtatcccgtatccagcaaaggcggcaagccatggaggagggtctggtatcagtggacaagttctccggtggcagccaggcgtactttctgacgcacctccaccaggaccacacccgtggcctcggcgcggtgggcgggtggcgccacggcccgctctactgctctccgaccacggcgcgcctcctccccatccgcttcccgggaatcgacgcctccctcctccgcccgctagccccaggtgcctctgcctccatctatctgttctctccctcctcgggccagtccctctcccttcacgtcactgccatccccgcgctgcactgccccggtacgtcacccctcccgattcgcttgcttcactcttttctctgcacggctggcacggaactactgatcttcggctggtttttgcggctgacgcgtgcctccgcgcaggatcgctcatgtacctcttccgcggagacctcgggtgcatgctgtacacgggggacttccggtgggagctcggatgcgatgaagcgcggcgagcgaagcaggatttactggacgcgcttgacggggataccattgatgtgctctatctggacaacacctactgccacccatcgctcaacttccctccacgccccgtcgtcgctgagcaggtgattgatattattcggtcacatcctgatcacgaagttatcattggtgttgacactcttggaaaagaagacctcttgcttcatatatctagagcactacaaacgaaggttagacttattttctcaacatattccattttctacttttgagtcttggcaaaagattgagtgatgatgactaatttcttttaagagacaactaaagtagccatggctgatgctctatgtttcaacattaacttgttttttcagattagtatatgcaggctataactaagttgagctgcaaacaattgacatgctaactgctaatttaactgattcccaaaaatcacatgtccagcttcgtaactccagaatcttttccttcaattttctcatcagatctgggtttggccccagcgcctacagacaatacacctcctagggattgatgaaaaccgtgatatttttaccacacagaccagtttgactaggatccgtgctgttccaaggtacagtgtcaccattgataatcttgaagctctaaacacagtgtgccccactatagggatcttgccttctgctattccttgtctttggaagagcagtgaaggaaaggccaaatccaagggtaggtcatcagtgaagtctatcaggagctcagggagagagctggaggattttatgcatacagtgcgtccatggacagtcagcggcatcgtcagctcatcgttctgctatgtgaatccccgtcaccacttcagacatctttgtttagacaataatgttaatgatgaaactgacatgacgcccataaaaaataagggcagggataatgataagctgacaccaaagagatggcgaaatggttctgtgactccaaaagaaaggaaggtcaggatctccagttcaagtctgtatagaagcaaagttacaatgaaacggaaggagtgctgcggtgcaaggatcaatgacactgaagaacacattggtgttacctgactttgtcccttcccaagtaatgttatgttttcttttgtaaagattaacaactggatggtggaagtcttgaagcaatgagatgggatatgttgttccaagccaaacttcagcttgctggtattcaggaatctggacgtggtctttggctctctgctatctgttccttagaaccctgtcgtgctagcaagatgcattttggtccagattcggtttgggttgtacagtgctgttccttttgcgatggtgttcagcatttagattgctgaaacctttgatgcatgttagttgctactgatacatctatttgtagtattttcatatgtctgacatgatgtcgctactgcttcaaatatatataatgttcttacaacaatgcactatttggtccattgtttgtcccaatttgcccagcttctctggtgggctaaacccttggggtataccaagtaagaggaagcaaagaaaaatgagtttaagattgtgctaatgatgttactagttagggacaggtccaattcaaatgcaaattcaaatagcaggcaagcagaaggggaaaagaacaatttaaatctcagttctcatgctcagtgaaaataaaaccactctgcttctggagaatcgaccttcaattgaaagaaaactagtttatgatcaataaaat

SEQ ID NO: 74956 - DNA, 1108 bp, Zea Mays
gatgctataaactctttggtagcagcatggatgttaagttctatgatcccagcaattgctagcactgttgatacaattataagtgctgcagaaatgtggaaagcgcttgaagaaatgtattcgggagctggaaatgttatgttgatggtggagactgaagatcgcctccataatatcaaacagggggagcgaactgtggcggagtatgttcaggaattacagtgtttgtgggctgatgttgaccattatgatcctattgagctaccacactcagagtgtgttgtttgggcaaagaaatgggtggaaataagacgtgtgcttcaatttttaaggggtctaaacccagagtttgagggaagacgagcctccatgtttcatcaatccactcttcctagcctacaagaggcaatagctgctatatcccaggaggagtcacgactcaaagtgatgagggaaagtcctccagtgtcatctcaccctgtgttttcagctatgagaactaaagatgctagagagtgttacaattgtggtgatgttggacacattgctcgtaattgtactaaacctttcaagtttaaccgcgggagaggaagaggggctgctagaggtggtagaggtcgtggaggtagaagttgggcaagagctaatgcaacaactacaaaagaagaccttgagatctttatggagaatgaagctgaaacaaagtcgactgagcaacataaaattcctggaaataaaaatcaggagtcctacactagggattttgtcaacttcgcctacacagatgaaggagaggagaacagggaaaagacttgggacagctaccaggcgtagtggattatggtatatggaccatgaggagacagatgatacaagatgcactatgttgggcaacgaagttggaagagaaggaagttgtagtgatgcttttgcattgtagattcgggcatctctcttttgataagatatgcaaagtttttcccgatgtaatgtgtggggtggacaaaagcaagctattgtgtgatgcctgtgagtttgcaaaacacacgaggacatcttatataagtcgaggtatcaggaatatatctccttttgtgctagttcattc

SEQ ID NO: 74957 - DNA, 1341 bp, Zea Mays
acggtgctgcaggtgagatcttttcgattatcaccaggccagcttgttgagaaccccaaaaggggtggcatcgtagacgtggacggcgaggtaattgctagaggagaaggaacgtacggcaaaaaccaacatcaagatgtgatggcttatggccgtcctattcagctgacggtgcaccaagcatacagtgccaccgttggccttagatgcattccaactgccgccctttcatatcggaatgttgtgaccaagaatagaatatgacccacacggtcttcgttgtacagcaagcccatgacaataaagaattgcaattaggtaaaatgattttccacctaggctcacatattacatggtcaagatacagctatttcttaaactgcaacaattctggagagcatgaccgaatgcggtgagactgaaagtgagacgagggtcacaacaaagtcttcccaataattctaaaaatatactcctcccatattcatgaatgatgttgctgagttcagatgaaagtacaagcagccatcatcttcaacgatgggttgcagaactaaagcctttcaagcaagacgataagaaaagccatctcgaaaataaaattattttaagaacagcttcaaaagttgaacagcaaagagtacatgaaaatatcagattttgacaatatggttccaagaaaattggtgcttcaacaaaaatcaaagtaataacacaaaaaataaactcgagccattctaatgtcaaacaaagccttaaaccaataggaacggaccagatgcaaaccaacatgttggtgaaggtgcaaggtaaatttaaaaatgtaacaggggaaatggaatggtcgttttgaaaacggatacacggtgggagggttgttttgtaaaatcatcatgacggcttgcatggtttgcacctgatccattcccaaaaccaattgttttgctcaagtttccaattgtgccaagagaaacaatagagaacactagcaaatactctatcccaaattaatagacgttctagcccttaaattttatgtctatattcaaataaatgataatatatatatatatatatggtagatctatttatcaccctaggtgatggactcaacggtccatcaccttaaccactctggcgtgcttgcttgctcgcccgccccaacgcatgcgctctgtgcggctcgctcgcgcccggccagcaagccgaccgagcccgccctagctagatctaacggaccaagagtcatgatccattagatctagatccaaccacatatgtaatcgtggtttgttagggttttttataaacctacacaaggtggtggtggcagagtctaag

SEQ ID NO: 74958 - DNA, 1181 bp, Zea Mays
tgcggatagcctcatagactagctggccgtttccctccgggctcccgctgaacctactgctcgaccaccagtccggcagtcccccacgccagtacgccacgctcccatcgccatcacccaggaccccgtgctgcctggtgcctggactccaagaacccgccctcgaggcccaagcaccgcttctccccctctcactgtcactggtcaccacacgccacactacagagtccagatcacggccaccgcgatggctgcttagtgcgtccgcggcagctggagcctggagaatgggctgctgcttcagcaagaacccgaggacccgcccggtggccggagcctctgacttcccgcgccggtgcggacccgaggaccgcgacccgccgtcgccggaggaggaaacggtcaaggaggtactctcggagacaccgagcgctaaacccagggccaatcccaagctcgtcggcaatgccgtcgtccccgccgccgcggacgagcggaaagcggagaaggcgaagaagcaggacagcgtcgatgccgcggcgagcgacgtcggcagctgcgtgtcgctctcactcgccaccgacgaacggtccgaggcggcgtcggagtcgtcggtcgcgaccagctcggtggccgggccggagcgctcaccaaggacgaaaccggccaggaggcgcccagcgtccgccgatctggggccagcgcggcgcgagcgggaccgcgccgtcgcggcctcctacggcgtccgctcccgcagcgcgcgggcgtcggcgtccccgccgccgaggcacgtgccgcgggaccgctccgtccggcgttcgccctcgccgctggaagacgacgccgtcaccgcggcaagtgagcccagcatccccgacggtagcgacggtggcgatgttcaaagtggccgcggcggcgacgacggcaaagagtcgttggagaacccgctggtgtcattggaatgtttcatctttctgtagcgctgtgctgatgcagtgatgttgtaatctcgcgctattttccttcgaaagtattgggctaatgatccactttagatgctggtgctgtggtgcagcagtcagttgtttgtactgccgctgccaccttccgttaactttgtcaagtccaagagaaatgccagtagcttttggcttttcagaggcgtgcggtgtgcctgacaa

SEQ ID NO: 74959 - DNA, 3280 bp, Zea Mays
cccaccactgagcactcatgcagtaacggaccgtttggttcagagcttcccaggcagcttcgttgccaggcaaggatgtcatccccaggtgcccaaaatcggatgcctggcgacgcccacagtgcctgtcaaagctgcctgggagcaaagaaaacaggtcaatcaaggttgtttagagatgcctgccaacactgattgttctgaagatttattccaaagccatgaagaaatgcttgagaacgcagaattttggtcaaagtcaaactactcccctgtggagcatctggagtgccatatggaagttaacatggagctgaacgaaggagaacaaatgattgatcacacagaagctagccgatatgaattgtttagcaacgatctgcagagccaatcaagaacttccaacttggacaatgaacattttccaagggatgcatcaaaccacgctaatgttgaagcaactggacctccatatgatctctcaaatggatatttcacagccaaattctgaggctaatccacctgatggggttttagcggttcctttattgaggcatcagaaaattgccttgtcatggatggtgaaaaaggagactagtatctcgctttgctatggtggaattcttgcagatgatcagggccttggtaaaactgtatcagccatatcactgattcttactgagcgcccaccagttccacagtcatctactaagaacgagccatgtgaagctgtaactctagatgaagacgatgactgtattggacctcattcggaaaagctgatgcggacatgtagctctcaagtgacaagtaacacagtgaagcaagaaaatcctattgtagcggttaaggcaaggccagctgctggtactttggttgtttgcccaacaagtgttttgcgacagtgggcaggagaactgaagaacaaagttacaagtaaagctaatttatcttttctgatatatcatggtagcaatcgcaccaaggatcctaacgaacttaccaaatatgatgttgtgcttactacatattctatagtaagcatggaagtaccaaaacaatcaaatcctgatagtgatggagaagagaaagggaagcctgacccgtatggtgcacctgtgtcctcttcagggagcaaaaagagaaaggcatcctcttctaagaaaacaaaaaataaaagtgttgcagagagttgcttgcctgaaaaacctcttgcgaaagttgcttggtttagggttattcttgatgaagcacaaagcattaagaactaccgaactcaggttgccagggcttgctggggtttgcgagccaaaagaagatggtgtttgtctgggacacctatacagaatgctgttgaggatctctatagctacttcagatttctcagatacaatcccttacgctgtatataagcagttttgcactctgataaagattccaatcagtaggaacccaaataacggttacaagaagcttcaagctgttttaaagccggtaatgctacgccggactaaagcaaccatgcttgatggggaaccgatcatatccttaccacccaagactgtttcacttaagacggtggacttcactagcgaggagcgtggtttttataacactttagaagttgaatcacgagaacagttcaaggaatatgcagctgctggtactgtaaagcaaaattatgtcaacattctattgatgcttttgcggctaagacaggcatgcgatcaccctcacctagttagaggctatgactcctgttctagttggatgtcttcgttggagatggtgaagaaacttcccatggaacggcagcacaaattacttatttgcttgcaatcttgttctgcgttttgtgctctatgcaatgatgcgccagaagatcctgttgtcactctatgtggtcatgttttttgcaaccagtgcatactggagcaactcactggtgacgacagtgtatgcccagtgtctaattgcagagtccgactaaacacatcctcactcttctccagaggcactcttgaatgctctctgagtaaattagcctctgatttcaagtctgatgatacatgtatggaaatgatacatgctgaaaagcgccctgggatggattcatcctacgcatcttcaaaattgagagctgcattagatattcttctctcattgcctaaaatagatcccactattgatagcaaatgttcaatcgggattgaatctgagaagtttgatggaaagggtatttcagaacaaactgacaccaagttgacagagaaggccattgttttctctcaatggactagaatgctagacttgcttgaagtccatttgaaagcttctcatgtgacatatcgaaggcttgatggaacaatgtctgttgctgcacgggataaagctgtgaacgacttcaatatggttccagaggttactgttatgatcatgtcactcaaagctgcaagtcttggcttgaatatggttgctgcctgccacgtacttatgctagatctttggtggaacccaaccaccgaggaccaagctgtggatagggcacaccgtattggtcaaaaacggcctgtcacggtatcaagattaactataaaagacaccgtggaagatcgtattcttgctctccaggagaaaaagcgggagatggttgcttctgcgtttggagaagacaaatctggttcccgacagactcgattgaccgttgaagacctgaattatctgtttatggtgtagaatcgctcctgagagtgaacagttttgctcattggattggtgttagacgtggtagataaaaatgttctctgaaaaaataacaaaatgctttcatttagggattattagttcttgtagcttgtacagttgcagagatttaggggttgctagcgacgtgtcttccaattctttttgcacgggaagcagtaagatgctgaactaggtgaattcttcagatagctgctatagtgcctgttaacttggggggtgttttctatgtactaatttctagttcctccattttattttcttttacttcctaaattgtcaaacacagatactaaaatagagataatctctcttttagtctatgtgtttagcaatttaggggctaaaagggactaaaatagagagactaaagacaccccttaatgtaatgaagataacgacaatgaagctcagatgatatatatgtacatattcttctcgtatccgataaaccatcgagaatattgggccatattacggagggcttgttctcaaccatctgaatcactctggcaga

SEQ ID NO: 74960 - DNA, 4245 bp, Zea Mays
cccaccactgagcactcatgcagtaacggaccgtttggttcagagcttcccaggcagcttcgttgccaggcaaggatgtcatccccaggtgcccaaaatcggatgcctggcgacgcccacagtgcctgtcaaagctgcctgggagcaaagaaaacaggtcaatcaaggttgtttagagatgcctgccaacactgattgttctgaagatttattccaaagccatgaagaaatgcttgagaacgcagaattttggtcaaagtcaaactactcccctgtggagcatctggagtgccatatggaagttaacatggagctgaacgaaggagaacaaatgattgatcacacagaagctagccgatatgaattgtttagcaacgatctgcagagccaatcaagaacttccaacttggacaatgaacattttccaagggatgcatcaaaccacgctaatgttgaagcaactggacctccatatgatctctcaaatggtggtatatccacagagcactcagattggagtgaaattaaatgggggagtacagatgagatgcttggtaatactggtcaggatgatgaccatttcactccgatgggcatgttttgtcttaccaataacacagatattcttgatctttcttgcattgagtccaacatgggtgagagaacggaaagcattcgcaatggcaacagtagttgccttactatgcaggaagaacatttacaggcagaatgtggaggatatcctcatccagattatatatctgttgatatgattgatgaaagatcactgcatgatttgccacatgggttatcacaaaacaatgagcagtatgagatggagcagctcccacagaatatatgtgaaagtggttctatgcagatggcctctccggaccaatattgttcctctccggaccaatattgtgatgatacatctttatcagatttttacatggatgtatcctccccagagtcaatatcctgtgagcagaaccagcctgaagatatttttttcaagagcgagtctagcactgactcttctccagtaccctctagcagaaattccaccacagaggatgctgataaatacttaggtcaaccatcaaaacagttgctggactccaaaatcgttcctttcagcaaccaacacacgtttaagaacatggaatatcaaaaacctctggtattggataaacaatatgcatatagaagcaacaactcttctattcacaattcaacaaaaggttgcttcagtagagatggggacatggtttctgatttatgtgtgctagagggtaataggaatcctgctcctgctcacctatggccttatcaggggaagttccatcataattttcagcaacctgtgtatggtaattccatcattcctgcatttggtggtacgagatacaaaccacacgatgaaagaaccactctgcgccttgcattgcaggatatttcacagccaaattctgaggctaatccacctgatggggttttagcggttcctttattgaggcatcagaaaattgccttgtcatggatggtgaaaaaggagactagtatctcgctttgctatggtggaattcttgcagatgatcagggccttggtaaaactgtatcagccatatcactgattcttactgagcgcccaccagttccacagtcatctactaagaacgagccatgtgaagctgtaactctagatgaagacgatgactgtattggacctcattcggaaaagctgatgcggacatgtagctctcaagtgacaagtaacacagtgaagcaagaaaatcctattgtagcggttaaggcaaggccagctgctggtactttggttgtttgcccaacaagtgttttgcgacagtgggcaggagaactgaagaacaaagttacaagtaaagctaatttatcttttctgatatatcatggtagcaatcgcaccaaggatcctaacgaacttaccaaatatgatgttgtgcttactacatattctatagtaagcatggaagtaccaaaacaatcaaatcctgatagtgatggagaagagaaagggaagcctgacccgtatggtgcacctgtgtcctcttcagggagcaaaaagagaaaggcatcctcttctaagaaaacaaaaaataaaagtgttgcagagagttgcttgcctgaaaaacctcttgcgaaagttgcttggtttagggttattcttgatgaagcacaaagcattaagaactaccgaactcaggttgccagggcttgctggggtttgcgagccaaaagaagatggtgtttgtctgggacacctatacagaatgctgttgaggatctctatagctacttcagatttctcagatacaatcccttacgctgtatataagcagttttgcactctgataaagattccaatcagtaggaacccaaataacggttacaagaagcttcaagctgttttaaagccggtaatgctacgccggactaaagcaaccatgcttgatggggaaccgatcatatccttaccacccaagactgtttcacttaagacggtggacttcactagcgaggagcgtggtttttataacactttagaagttgaatcacgagaacagttcaaggaatatgcagctgctggtactgtaaagcaaaattatgtcaacattctattgatgcttttgcggctaagacaggcatgcgatcaccctcacctagttagaggctatgactcctgttctagttggatgtcttcgttggagatggtgaagaaacttcccatggaacggcagcacaaattacttatttgcttgcaatcttgttctgcgttttgtgctctatgcaatgatgcgccagaagatcctgttgtcactctatgtggtcatgttttttgcaaccagtgcatactggagcaactcactggtgacgacagtgtatgcccagtgtctaattgcagagtccgactaaacacatcctcactcttctccagaggcactcttgaatgctctctgagtaaattagcctctgatttcaagtctgatgatacatgtatggaaatgatacatgctgaaaagcgccctgggatggattcatcctacgcatcttcaaaattgagagctgcattagatattcttctctcattgcctaaaatagatcccactattgatagcaaatgttcaatcgggattgaatctgagaagtttgatggaaagggtatttcagaacaaactgacaccaagttgacagagaaggccattgttttctctcaatggactagaatgctagacttgcttgaagtccatttgaaagcttctcatgtgacatatcgaaggcttgatggaacaatgtctgttgctgcacgggataaagctgtgaacgacttcaatatggttccagaggttactgttatgatcatgtcactcaaagctgcaagtcttggcttgaatatggttgctgcctgccacgtacttatgctagatctttggtggaacccaaccaccgaggaccaagctgtggatagggcacaccgtattggtcaaaaacggcctgtcacggtatcaagattaactataaaagacaccgtggaagatcgtattcttgctctccaggagaaaaagcgggagatggttgcttctgcgtttggagaagacaaatctggttcccgacagactcgattgaccgttgaagacctgaattatctgtttatggtgtagaatcgctcctgagagtgaacagttttgctcattggattggtgttagacgtggtagataaaaatgttctctgaaaaaataacaaaatgctttcatttagggattattagttcttgtagcttgtacagttgcagagatttaggggttgctagcgacgtgtcttccaattctttttgcacgggaagcagtaagatgctgaactaggtgaattcttcagatagctgctatagtgcctgttaacttggggggtgttttctatgtactaatttctagttcctccattttattttcttttacttcctaaattgtcaaacacagatactaaaatagagataatctctcttttagtctatgtgtttagcaatttaggggctaaaagggactaaaatagagagactaaagacaccccttaatgtaatgaagataacgacaatgaagctcagatgatatatatgtacatattcttctcgtatccgataaaccatcgagaatattgggccatattacggagggcttgttctcaaccatctgaatcactctggcaga

SEQ ID NO: 74961 - DNA, 4322 bp, Zea Mays
cccaccactgagcactcatgcagtaacggaccgtttggttcagagcttcccaggcagcttcgttgccaggcaaggatgtcatccccaggtgcccaaaatcggatgcctggcgacgcccacagtgcctgtcaaagctgcctgggagcaaagaaaacaggtcaatcaaggttgtttagagatgcctgccaacactgattgttctgaagatttattccaaagccatgaagaaatgcttgagaacgcagaattttggtcaaagtcaaactactcccctgtggagcatctggagtgccatatggaagttaacatggagctgaacgaaggagaacaaatgattgatcacacagaagctagccgatatgaattgtttagcaacgatctgcagagccaatcaagaacttccaacttggacaatgaacattttccaagggatgcatcaaaccacgctaatgttgaagcaactggacctccatatgatctctcaaatggtatgtaccttcggaaaaaaactatatactctggttggagacacaaatgaacactcgcatgctgttttcctcttcaggtggtatatccacagagcactcagattggagtgaaattaaatgggggagtacagatgagatgcttggtaatactggtcaggatgatgaccatttcactccgatgggcatgttttgtcttaccaataacacagatattcttgatctttcttgcattgagtccaacatgggtgagagaacggaaagcattcgcaatggcaacagtagttgccttactatgcaggaagaacatttacaggcagaatgtggaggatatcctcatccagattatatatctgttgatatgattgatgaaagatcactgcatgatttgccacatgggttatcacaaaacaatgagcagtatgagatggagcagctcccacagaatatatgtgaaagtggttctatgcagatggcctctccggaccaatattgttcctctccggaccaatattgtgatgatacatctttatcagatttttacatggatgtatcctccccagagtcaatatcctgtgagcagaaccagcctgaagatatttttttcaagagcgagtctagcactgactcttctccagtaccctctagcagaaattccaccacagaggatgctgataaatacttaggtcaaccatcaaaacagttgctggactccaaaatcgttcctttcagcaaccaacacacgtttaagaacatggaatatcaaaaacctctggtattggataaacaatatgcatatagaagcaacaactcttctattcacaattcaacaaaaggttgcttcagtagagatggggacatggtttctgatttatgtgtgctagagggtaataggaatcctgctcctgctcacctatggccttatcaggggaagttccatcataattttcagcaacctgtgtatggtaattccatcattcctgcatttggtggtacgagatacaaaccacacgatgaaagaaccactctgcgccttgcattgcaggatatttcacagccaaattctgaggctaatccacctgatggggttttagcggttcctttattgaggcatcagaaaattgccttgtcatggatggtgaaaaaggagactagtatctcgctttgctatggtggaattcttgcagatgatcagggccttggtaaaactgtatcagccatatcactgattcttactgagcgcccaccagttccacagtcatctactaagaacgagccatgtgaagctgtaactctagatgaagacgatgactgtattggacctcattcggaaaagctgatgcggacatgtagctctcaagtgacaagtaacacagtgaagcaagaaaatcctattgtagcggttaaggcaaggccagctgctggtactttggttgtttgcccaacaagtgttttgcgacagtgggcaggagaactgaagaacaaagttacaagtaaagctaatttatcttttctgatatatcatggtagcaatcgcaccaaggatcctaacgaacttaccaaatatgatgttgtgcttactacatattctatagtaagcatggaagtaccaaaacaatcaaatcctgatagtgatggagaagagaaagggaagcctgacccgtatggtgcacctgtgtcctcttcagggagcaaaaagagaaaggcatcctcttctaagaaaacaaaaaataaaagtgttgcagagagttgcttgcctgaaaaacctcttgcgaaagttgcttggtttagggttattcttgatgaagcacaaagcattaagaactaccgaactcaggttgccagggcttgctggggtttgcgagccaaaagaagatggtgtttgtctgggacacctatacagaatgctgttgaggatctctatagctacttcagatttctcagatacaatcccttacgctgtatataagcagttttgcactctgataaagattccaatcagtaggaacccaaataacggttacaagaagcttcaagctgttttaaagccggtaatgctacgccggactaaagcaaccatgcttgatggggaaccgatcatatccttaccacccaagactgtttcacttaagacggtggacttcactagcgaggagcgtggtttttataacactttagaagttgaatcacgagaacagttcaaggaatatgcagctgctggtactgtaaagcaaaattatgtcaacattctattgatgcttttgcggctaagacaggcatgcgatcaccctcacctagttagaggctatgactcctgttctagttggatgtcttcgttggagatggtgaagaaacttcccatggaacggcagcacaaattacttatttgcttgcaatcttgttctgcgttttgtgctctatgcaatgatgcgccagaagatcctgttgtcactctatgtggtcatgttttttgcaaccagtgcatactggagcaactcactggtgacgacagtgtatgcccagtgtctaattgcagagtccgactaaacacatcctcactcttctccagaggcactcttgaatgctctctgagtaaattagcctctgatttcaagtctgatgatacatgtatggaaatgatacatgctgaaaagcgccctgggatggattcatcctacgcatcttcaaaattgagagctgcattagatattcttctctcattgcctaaaatagatcccactattgatagcaaatgttcaatcgggattgaatctgagaagtttgatggaaagggtatttcagaacaaactgacaccaagttgacagagaaggccattgttttctctcaatggactagaatgctagacttgcttgaagtccatttgaaagcttctcatgtgacatatcgaaggcttgatggaacaatgtctgttgctgcacgggataaagctgtgaacgacttcaatatggttccagaggttactgttatgatcatgtcactcaaagctgcaagtcttggcttgaatatggttgctgcctgccacgtacttatgctagatctttggtggaacccaaccaccgaggaccaagctgtggatagggcacaccgtattggtcaaaaacggcctgtcacggtatcaagattaactataaaagacaccgtggaagatcgtattcttgctctccaggagaaaaagcgggagatggttgcttctgcgtttggagaagacaaatctggttcccgacagactcgattgaccgttgaagacctgaattatctgtttatggtgtagaatcgctcctgagagtgaacagttttgctcattggattggtgttagacgtggtagataaaaatgttctctgaaaaaataacaaaatgctttcatttagggattattagttcttgtagcttgtacagttgcagagatttaggggttgctagcgacgtgtcttccaattctttttgcacgggaagcagtaagatgctgaactaggtgaattcttcagatagctgctatagtgcctgttaacttggggggtgttttctatgtactaatttctagttcctccattttattttcttttacttcctaaattgtcaaacacagatactaaaatagagataatctctcttttagtctatgtgtttagcaatttaggggctaaaagggactaaaatagagagactaaagacaccccttaatgtaatgaagataacgacaatgaagctcagatgatatatatgtacatattcttctcgtatccgataaaccatcgagaatattgggccatattacggagggcttgttctcaaccatctgaatcactctggcaga

SEQ ID NO: 74962 - DNA, 3699 bp, Zea Mays
gtacagatgagatgcttggtaatactggtcaggatgatgaccatttcactccgatgggcatgttttgtcttaccaataacacagatattcttgatctttcttgcattgagtccaacatgggtgagagaacggaaagcattcgcaatggcaacagtagttgccttactatgcaggaagaacatttacaggcagaatgtggaggatatcctcatccagattatatatctgttgatatgattgatgaaagatcactgcatgatttgccacatgggttatcacaaaacaatgagcagtatgagatggagcagctcccacagaatatatgtgaaagtggttctatgcagatggcctctccggaccaatattgttcctctccggaccaatattgtgatgatacatctttatcagatttttacatggatgtatcctccccagagtcaatatcctgtgagcagaaccagcctgaagatatttttttcaagagcgagtctagcactgactcttctccagtaccctctagcagaaattccaccacagaggatgctgataaatacttaggtcaaccatcaaaacagttgctggactccaaaatcgttcctttcagcaaccaacacacgtttaagaacatggaatatcaaaaacctctggtattggataaacaatatgcatatagaagcaacaactcttctattcacaattcaacaaaaggttgcttcagtagagatggggacatggtttctgatttatgtgtgctagagggtaataggaatcctgctcctgctcacctatggccttatcaggggaagttccatcataattttcagcaacctgtgtatggtaattccatcattcctgcatttggtggtacgagatacaaaccacacgatgaaagaaccactctgcgccttgcattgcaggatatttcacagccaaattctgaggctaatccacctgatggggttttagcggttcctttattgaggcatcagaaaattgccttgtcatggatggtgaaaaaggagactagtatctcgctttgctatggtggaattcttgcagatgatcagggccttggtaaaactgtatcagccatatcactgattcttactgagcgcccaccagttccacagtcatctactaagaacgagccatgtgaagctgtaactctagatgaagacgatgactgtattggacctcattcggaaaagctgatgcggacatgtagctctcaagtgacaagtaacacagtgaagcaagaaaatcctattgtagcggttaaggcaaggccagctgctggtactttggttgtttgcccaacaagtgttttgcgacagtgggcaggagaactgaagaacaaagttacaagtaaagctaatttatcttttctgatatatcatggtagcaatcgcaccaaggatcctaacgaacttaccaaatatgatgttgtgcttactacatattctatagtaagcatggaagtaccaaaacaatcaaatcctgatagtgatggagaagagaaagggaagcctgacccgtatggtgcacctgtgtcctcttcagggagcaaaaagagaaaggcatcctcttctaagaaaacaaaaaataaaagtgttgcagagagttgcttgcctgaaaaacctcttgcgaaagttgcttggtttagggttattcttgatgaagcacaaagcattaagaactaccgaactcaggttgccagggcttgctggggtttgcgagccaaaagaagatggtgtttgtctgggacacctatacagaatgctgttgaggatctctatagctacttcagatttctcagatacaatcccttacgctgtatataagcagttttgcactctgataaagattccaatcagtaggaacccaaataacggttacaagaagcttcaagctgttttaaagccggtaatgctacgccggactaaagcaaccatgcttgatggggaaccgatcatatccttaccacccaagactgtttcacttaagacggtggacttcactagcgaggagcgtggtttttataacactttagaagttgaatcacgagaacagttcaaggaatatgcagctgctggtactgtaaagcaaaattatgtcaacattctattgatgcttttgcggctaagacaggcatgcgatcaccctcacctagttagaggctatgactcctgttctagttggatgtcttcgttggagatggtgaagaaacttcccatggaacggcagcacaaattacttatttgcttgcaatcttgttctgcgttttgtgctctatgcaataagatcctgttgtcactctatgtggtcatgttttttgcaaccagtgcatactggagcaactcactggtgacgacagtgtatgcccagtgtctaattgcagagtccgactaaacacatcctcactcttctccagaggcactcttgaatgctctctgagtaaattagcctctgatttcaagtctgatgatacatgtatggaaatgatacatgctgaaaagcgccctgggatggattcatcctacgcatcttcaaaattgagagctgcattagatattcttctctcattgcctaaaatagatcccactattgatagcaaatgttcaatcgggattgaatctgagaagtttgatggaaagggtatttcagaacaaactgacaccaagttgacagagaaggccattgttttctctcaatggactagaatgctagacttgcttgaagtccatttgaaagcttctcatgtgacatatcgaaggcttgatggaacaatgtctgttgctgcacgggataaagctgtgaacgacttcaatatggttccagaggttactgttatgatcatgtcactcaaagctgcaagtcttggcttgaatatggttgctgcctgccacgtacttatgctagatctttggtggaacccaaccaccgaggaccaagctgtggatagggcacaccgtattggtcaaaaacggcctgtcacggtatcaagattaactataaaagacaccgtggaagatcgtattcttgctctccaggagaaaaagcgggagatggttgcttctgcgtttggagaagacaaatctggttcccgacagactcgattgaccgttgaagacctgaattatctgtttatggtgtagaatcgctcctgagagtgaacagttttgctcattggattggtgttagacgtggtagataaaaatgttctctgaaaaaataacaaaatgctttcatttagggattattagttcttgtagcttgtacagttgcagagatttaggggttgctagcgacgtgtcttccaattctttttgcacgggaagcagtaagatgctgaactaggtgaattcttcagatagctgctatagtgcctgttaacttggggggtgttttctatgtactaatttctagttcctccattttattttcttttacttcctaaattgtcaaacacagatactaaaatagagataatctctcttttagtctatgtgtttagcaatttaggggctaaaagggactaaaatagagagactaaagacaccccttaatgtaatgaagataacgacaatgaagctcagatgatatatatgtacatattcttctcgtatccgataaaccatcgagaatattgggccatattacggagggcttgttctcaaccatctgaatcactctggcaga

SEQ ID NO: 74963 - DNA, 3710 bp, Zea Mays
agatgagatgcttggtaatactggtcaggatgatgaccatttcactccgatgggcatgttttgtcttaccaataacacagatattcttgatctttcttgcattgagtccaacatgggtgagagaacggaaagcattcgcaatggcaacagtagttgccttactatgcaggaagaacatttacaggcagaatgtggaggatatcctcatccagattatatatctgttgatatgattgatgaaagatcactgcatgatttgccacatgggttatcacaaaacaatgagcagtatgagatggagcagctcccacagaatatatgtgaaagtggttctatgcagatggcctctccggaccaatattgttcctctccggaccaatattgtgatgatacatctttatcagatttttacatggatgtatcctccccagagtcaatatcctgtgagcagaaccagcctgaagatatttttttcaagagcgagtctagcactgactcttctccagtaccctctagcagaaattccaccacagaggatgctgataaatacttaggtcaaccatcaaaacagttgctggactccaaaatcgttcctttcagcaaccaacacacgtttaagaacatggaatatcaaaaacctctggtattggataaacaatatgcatatagaagcaacaactcttctattcacaattcaacaaaaggttgcttcagtagagatggggacatggtttctgatttatgtgtgctagagggtaataggaatcctgctcctgctcacctatggccttatcaggggaagttccatcataattttcagcaacctgtgtatggtaattccatcattcctgcatttggtggtacgagatacaaaccacacgatgaaagaaccactctgcgccttgcattgcaggatatttcacagccaaattctgaggctaatccacctgatggggttttagcggttcctttattgaggcatcagaaaattgccttgtcatggatggtgaaaaaggagactagtatctcgctttgctatggtggaattcttgcagatgatcagggccttggtaaaactgtatcagccatatcactgattcttactgagcgcccaccagttccacagtcatctactaagaacgagccatgtgaagctgtaactctagatgaagacgatgactgtattggacctcattcggaaaagctgatgcggacatgtagctctcaagtgacaagtaacacagtgaagcaagaaaatcctattgtagcggttaaggcaaggccagctgctggtactttggttgtttgcccaacaagtgttttgcgacagtgggcaggagaactgaagaacaaagttacaagtaaagctaatttatcttttctgatatatcatggtagcaatcgcaccaaggatcctaacgaacttaccaaatatgatgttgtgcttactacatattctatagtaagcatggaagtaccaaaacaatcaaatcctgatagtgatggagaagagaaagggaagcctgacccgtatggtgcacctgtgtcctcttcagggagcaaaaagagaaaggcatcctcttctaagaaaacaaaaaataaaagtgttgcagagagttgcttgcctgaaaaacctcttgcgaaagttgcttggtttagggttattcttgatgaagcacaaagcattaagaactaccgaactcaggttgccagggcttgctggggtttgcgagccaaaagaagatggtgtttgtctgggacacctatacagaatgctgttgaggatctctatagctacttcagatttctcagatacaatcccttacgctgtatataagcagttttgcactctgataaagattccaatcagtaggaacccaaataacggttacaagaagcttcaagctgttttaaagccggtaatgctacgccggactaaagcaaccatgcttgatggggaaccgatcatatccttaccacccaagactgtttcacttaagacggtggacttcactagcgaggagcgtggtttttataacactttagaagttgaatcacgagaacagttcaaggaatatgcagctgctggtactgtaaagcaaaattatgtcaacattctattgatgcttttgcggctaagacaggcatgcgatcaccctcacctagttagaggctatgactcctgttctagttggatgtcttcgttggagatggtgaagaaacttcccatggaacggcagcacaaattacttatttgcttgcaatcttgttctgcgttttgtgctctatgcaattgcaggatgcgccagaagatcctgttgtcactctatgtggtcatgttttttgcaaccagtgcatactggagcaactcactggtgacgacagtgtatgcccagtgtctaattgcagagtccgactaaacacatcctcactcttctccagaggcactcttgaatgctctctgagtaaattagcctctgatttcaagtctgatgatacatgtatggaaatgatacatgctgaaaagcgccctgggatggattcatcctacgcatcttcaaaattgagagctgcattagatattcttctctcattgcctaaaatagatcccactattgatagcaaatgttcaatcgggattgaatctgagaagtttgatggaaagggtatttcagaacaaactgacaccaagttgacagagaaggccattgttttctctcaatggactagaatgctagacttgcttgaagtccatttgaaagcttctcatgtgacatatcgaaggcttgatggaacaatgtctgttgctgcacgggataaagctgtgaacgacttcaatatggttccagaggttactgttatgatcatgtcactcaaagctgcaagtcttggcttgaatatggttgctgcctgccacgtacttatgctagatctttggtggaacccaaccaccgaggaccaagctgtggatagggcacaccgtattggtcaaaaacggcctgtcacggtatcaagattaactataaaagacaccgtggaagatcgtattcttgctctccaggagaaaaagcgggagatggttgcttctgcgtttggagaagacaaatctggttcccgacagactcgattgaccgttgaagacctgaattatctgtttatggtgtagaatcgctcctgagagtgaacagttttgctcattggattggtgttagacgtggtagataaaaatgttctctgaaaaaataacaaaatgctttcatttagggattattagttcttgtagcttgtacagttgcagagatttaggggttgctagcgacgtgtcttccaattctttttgcacgggaagcagtaagatgctgaactaggtgaattcttcagatagctgctatagtgcctgttaacttggggggtgttttctatgtactaatttctagttcctccattttattttcttttacttcctaaattgtcaaacacagatactaaaatagagataatctctcttttagtctatgtgtttagcaatttaggggctaaaagggactaaaatagagagactaaagacaccccttaatgtaatgaagataacgacaatgaagctcagatgatatatatgtacatattcttctcgtatccgataaaccatcgagaatattgggccatattacggagggcttgttctcaaccatctgaatcactctggcaga

SEQ ID NO: 74964 - DNA, 3631 bp, Zea Mays
cagatattcttgatctttcttgcattgagtccaacatgggtgagagaacggaaagcattcgcaatggcaacagtagttgccttactatgcaggaagaacatttacaggcagaatgtggaggatatcctcatccagattatatatctgttgatatgattgatgaaagatcactgcatgatttgccacatgggttatcacaaaacaatgagcagtatgagatggagcagctcccacagaatatatgtgaaagtggttctatgcagatggcctctccggaccaatattgttcctctccggaccaatattgtgatgatacatctttatcagatttttacatggatgtatcctccccagagtcaatatcctgtgagcagaaccagcctgaagatatttttttcaagagcgagtctagcactgactcttctccagtaccctctagcagaaattccaccacagaggatgctgataaatacttaggtcaaccatcaaaacagttgctggactccaaaatcgttcctttcagcaaccaacacacgtttaagaacatggaatatcaaaaacctctggtattggataaacaatatgcatatagaagcaacaactcttctattcacaattcaacaaaaggttgcttcagtagagatggggacatggtttctgatttatgtgtgctagagggtaataggaatcctgctcctgctcacctatggccttatcaggggaagttccatcataattttcagcaacctgtgtatggtaattccatcattcctgcatttggtggtacgagatacaaaccacacgatgaaagaaccactctgcgccttgcattgcaggatatttcacagccaaattctgaggctaatccacctgatggggttttagcggttcctttattgaggcatcagcagaaaattgccttgtcatggatggtgaaaaaggagactagtatctcgctttgctatggtggaattcttgcagatgatcagggccttggtaaaactgtatcagccatatcactgattcttactgagcgcccaccagttccacagtcatctactaagaacgagccatgtgaagctgtaactctagatgaagacgatgactgtattggacctcattcggaaaagctgatgcggacatgtagctctcaagtgacaagtaacacagtgaagcaagaaaatcctattgtagcggttaaggcaaggccagctgctggtactttggttgtttgcccaacaagtgttttgcgacagtgggcaggagaactgaagaacaaagttacaagtaaagctaatttatcttttctgatatatcatggtagcaatcgcaccaaggatcctaacgaacttaccaaatatgatgttgtgcttactacatattctatagtaagcatggaagtaccaaaacaatcaaatcctgatagtgatggagaagagaaagggaagcctgacccgtatggtgcacctgtgtcctcttcagggagcaaaaagagaaaggcatcctcttctaagaaaacaaaaaataaaagtgttgcagagagttgcttgcctgaaaaacctcttgcgaaagttgcttggtttagggttattcttgatgaagcacaaagcattaagaactaccgaactcaggttgccagggcttgctggggtttgcgagccaaaagaagatggtgtttgtctgggacacctatacagaatgctgttgaggatctctatagctacttcagatttctcagatacaatcccttacgctgtatataagcagttttgcactctgataaagattccaatcagtaggaacccaaataacggttacaagaagcttcaagctgttttaaagccggtaatgctacgccggactaaagcaaccatgcttgatggggaaccgatcatatccttaccacccaagactgtttcacttaagacggtggacttcactagcgaggagcgtggtttttataacactttagaagttgaatcacgagaacagttcaaggaatatgcagctgctggtactgtaaagcaaaattatgtcaacattctattgatgcttttgcggctaagacaggcatgcgatcaccctcacctagttagaggctatgactcctgttctagttggatgtcttcgttggagatggtgaagaaacttcccatggaacggcagcacaaattacttatttgcttgcaatcttgttctgcgttttgtgctctatgcaatgatgcgccagaagatcctgttgtcactctatgtggtcatgttttttgcaaccagtgcatactggagcaactcactggtgacgacagtgtatgcccagtgtctaattgcagagtccgactaaacacatcctcactcttctccagaggcactcttgaatgctctctgagtaaattagcctctgatttcaagtctgatgatacatgtatggaaatgatacatgctgaaaagcgccctgggatggattcatcctacgcatcttcaaaattgagagctgcattagatattcttctctcattgcctaaaatagatcccactattgatagcaaatgttcaatcgggattgaatctgagaagtttgatggaaagggtatttcagaacaaactgacaccaagttgacagagaaggccattgttttctctcaatggactagaatgctagacttgcttgaagtccatttgaaagcttctcatgtgacatatcgaaggcttgatggaacaatgtctgttgctgcacgggataaagctgtgaacgacttcaatatggttccagaggttactgttatgatcatgtcactcaaagctgcaagtcttggcttgaatatggttgctgcctgccacgtacttatgctagatctttggtggaacccaaccaccgaggaccaagctgtggatagggcacaccgtattggtcaaaaacggcctgtcacggtatcaagattaactataaaagacaccgtggaagatcgtattcttgctctccaggagaaaaagcgggagatggttgcttctgcgtttggagaagacaaatctggttcccgacagactcgattgaccgttgaagacctgaattatctgtttatggtgtagaatcgctcctgagagtgaacagttttgctcattggattggtgttagacgtggtagataaaaatgttctctgaaaaaataacaaaatgctttcatttagggattattagttcttgtagcttgtacagttgcagagatttaggggttgctagcgacgtgtcttccaattctttttgcacgggaagcagtaagatgctgaactaggtgaattcttcagatagctgctatagtgcctgttaacttggggggtgttttctatgtactaatttctagttcctccattttattttcttttacttcctaaattgtcaaacacagatactaaaatagagataatctctcttttagtctatgtgtttagcaatttaggggctaaaagggactaaaatagagagactaaagacaccccttaatgtaatgaagataacgacaatgaagctcagatgatatatatgtacatattcttctcgtatccgataaaccatcgagaatattgggccatattacggagggcttgttctcaaccatctgaatcactctggcaga

SEQ ID NO: 74965 - DNA, 765 bp, Zea Mays
gacggctcgacgccacgccctccacttctctcccgggcggccacgacacacacacctttgacctttcccgccaggtcacaccgtctcgcaaaaccatcgcataccaccacctatgacctatcccacaaatattcgccgcccttttccccacgtctagtcatctcccaccacccgaaaacgccggaacccgattccattctttggcgccctgttttatagagggtggagctgccgatcgcctcacgttttgtagcccagaaacatgtgccatccaggactgccgccgagctgcgcggtcaggcggcgggagcagcaggcggccgtggcaccgtcgctctcaccgtctgtgccatgggcgcgccacggtgcgccgcaccactactgcgtgtgctcgcccacggcgcaccggggctcgttcaggtgccgatggcaccgcagcggcttcgagtgggggcgccggcggccgttcgcgaacacaccggggcgtgctgaagccgggccggcgatgcacgcgcggatggcggcgccttgacggttctccggacggcgtccggcacgggctgtcagtcccaaactgtatattggtatggtgtgtagaagatgctgtttgtgttggtctctccgctcctcatggcgccttctagttcttagtgcactggatatgtaactgtaactgtaactgtacataatgcatagctgtcagaagaaatgcatacagacatgcgaacatacatgactttatttatacagccccctatatctgcc

SEQ ID NO: 74966 - DNA, 207 bp, Zea Mays
cttgaacataacattccaaaaatgtcttcgatagtaggtgtggtacaaactttgcaaaaaaatctgattcaagcttagaaagagcttcaagtttctcagcgacaggccattttttatcttccaatatcagagagacatagtatgaagcttgagaataaggttgtcggaaattgaaattctggtagtccttgacagaagtttcctgag

SEQ ID NO: 74967 - DNA, 2942 bp, Zea Mays
cacaaaacacacaccactccctagaccctgtgaaggttacgcgcaagctctaagccaaagctctgaagatgcttggcaccagccgtaatccaacacccaatctcatcaaggaagacgcatctgatagagcttagcgaaggggtctccccatcaaagacagctttgttgcggtggatccataaacaccaggcccctaagataatgatgctgttcatgccctttctcttgcttttatgaatcttcttacttgtttttcgccaccaatcagcaaaggagatctcatctccagatggagagagattaccaacattcaatccaaacagaatggaatgccagaactgtcttgcaaagacacatgtacacaaaatatgttgtatggtttcctgctcttgatcacatagtaggcaagacactgggtggtccagacctctcttctccaatctatctgaagtccaacatttgttccgaatggccagccataagaaaaacttgcacttagggggagcccaagatttccaaagcctcttccaaggttcaaacgtaatagctcccaaaaataaagccctgtaacaagacctagaagaaaactgaccagaggaagtatgcagccaggtgtgaatatccgcctcctgagttaacacaatagtgctaacagcatcccaaatcagcaaaaattgttggatccccatccaggaaagaggtgtcaagatgtcactgatccattgctgtcctccaagagcctgggccactgttctagtggagacaataattttatcaaccttggaaacgacatcaggagcaaaatcattgatgcagccgccatttatccatctatcagtccaaaataaagtgttgtttccgttgcccaccgcagtaataaccgaagcatgaaagaacttcctgacctgcaacggcacaggcagcataagcccatgccagggcctgtttgaatctgttttctccagccacagccatttagcttgcagagcccaactctgataatacaaatttgggaccccaagcccacaaaatagaagcggccttgtaacgacatcccaagagactaaacaattacctccattcacgtcctttctgcctctccataagaaccctctgcgaatcttatcaatcgatttgatcacccacttgggaatactcatggcaatgaggagataaatagggatggcagagagaacaaaacgcaccaacgtcgtcctgccagcgagattaagtagccgagccttccaattggggagtctatctgctatcttctcaacccagtccataagatctgcctttctgagctttctatctgatattggaagacccaaataattacaggggaaggacgccgagctgcaaagaagaaggttgcaaccctgctgcacagcctggtcgctacatttaattgggatggcgcaactcttgttcatattacacaccagtccagacgctgaaccaaagcagtccaatattaccttaacacaattcagatcttccactataggtttaacaaacagaaccacatcgtcagcataaatagaaattctgtttcggacattcccttccagaaggttatggagcagccccttatcttcagctagcagaaacatactactaaggacgtccattattagcacaaatagcattggggaaaggggatcaccttggcgaagccctctccgatgcctaataggaataccaggagacccattcagcagcacctgggtggaagatccctatttgggctaaactcataagaaatcttagcacactgccttttggaaacgtgcatattgctctatttcatcataatcatggaactatacagggtgtgcttcttcagagaataatttttggcaggtgaaataccaaacagtactgggaatcgagatgaatactaacattactggtttatggtatggactgtgaatgcttgttttgtcaagcactacaattgctttagttggaacgggaaaacctaaccctaattgggttgggagtgcatatatataagctgagtaattggatcaagcccattacactgagggtatgcaagtaattacacagggactagccctgaaaccctaacaatactctaacaacttttgggttgcagccaccaacaaagtgtagtcccccctcaaaaaaagaagtgatcacctatttaggaattagttacatggcatagagtcaatgttgaggcccgaaattgcggtttgggcaagtgatttttgttgggatatttggttgagtcaagatggcattgattttgacaatgcaagaataaactatcatatgtaggttatctttagaagcgacacactggacacaattctgaccgttgcttcaaaaggagacccaaacatgcatgagatggacatgacacacattaagacaacagttgtggatatttttgctagacaaatatgtgtgcctattaaaattccccttaacgaaaattcagggttgctttatggctaaactctcgctagctttacccccatctcctttttgtttctttaaatctgtctttcttgtatactttgtattggaagctgaacccataccctaatcaggggttgggagtgacattaatagagagagtaactgggccaaggcccattacacaggggtataacggtcattacacagggaataacacaaaccctagacgggtagtctaacacccccccgcagtcacaactctatcctgtacagatgttgagactggatcggaagtctaaaaagacactcgacggtaaccccttggtgaagatgtcggcgaactgaagcgtggtggggacgctgagaacgcggacgtcgccggcagcgacacgctcgcggacgaagtgcaggtcgatctccacatgcttcgtgcgctgatgctgcacggggttggtggagaggtagaccgcgctgacgttgtcgcagtagacgag

SEQ ID NO: 74968 - DNA, 553 bp, Zea Mays
taggattaccacgaattaattgaacttgagtagggttaaggaaaataagagatcttagaataaccttaaccatttcatggtcatcccattttatactcccgaggttgcgcacttggttcaccaaggtcttgagccggttgtacatgtgttgtggctcctcccccttgcgaagccggaaccgaccgagctccccctcgatcgtttcccgcttggtgatctttgtgagctcgtctccctcgtgcgcggttttgagcacatcccaaacctccttggcgctcttcaacccttgaactttgttatactcctctctacttaaagaggcgaggagtatcgttgtcgcttgagagttgaagtgctcgatttgggccacctcatcctcatcataatctttatcccctacggacggtacctgtgcaccaaactcaacaacatcccataaacttttgtggagtgaggttagatgaaatcgcattaaatcactccacctagcataatcttcaccatcaaaagttggtggtttgcctaatgggacggaaagaagaggtgcatgttt

SEQ ID NO: 74969 - DNA, 1237 bp, Zea Mays
catgcctaagtttggtaaaagtttgttcatcaagtggcttggtaaagatatcggctagttgatttttagtgttaatgtaagaaatctcgatatctcccttttgttggtgatccctaagaaaatgataccgaatggctatgtgcttagtgcgactatgctcgacgggattgtcggccattttgattgcactctcattatcacatagcaaagggactttggttaatttgtaaccgtagtcccgcagggtttgcctcatccaaagcaattgcgcgcaacaatggcctgcggcaatgtactcggcttcggcggtggaaagagcaaccgaattttgcttctttgaagcccaagacaccaaggatctttccaagaactggcaagtccccgatgtgctcttcctattgattttgcaccccgcccaatcggcatccgaataaccaatcaagtcaaaagtggatccccgagggtaccaaaggccaaacttaggagtataagccaaatatctcaagattcgttttacggccgtaaggtgggattccttagggtcggattggaatcttgcacacatgcaaacggagagcataatgtccggtcgagatgcacataaatatagcaaagatcctatcatcgatcggtataccttttaatccacggacttacctcccgtgtcgaggtcgagatgcccattagttcccatgggtgtcttgatgggtttggcatccttcattccaaacttggttagaatgtcttgagtgtacttcgtttggctgatgaaggtgccctcttgaagttgtttgacttggaatcctagaaaatacttcaactcccccatcatagacatctcgaacttttgtgtcatgatcctactaaactcttcacatgtagattcgttagtagacccaaatataatatcatcaacataaatttggcatacaaacaaatcattctcaagtgttttggtaaagagcgtaggatcggcttttccgactttgaatccatttgcaataagaaaatctctaaggcattcataccatgctcttggggcttgtttgagcccataaagcgccttagagagcttatagacatggttaggatactcactgtcttcaaagccgggaggttgctcaatatagacctcttccttgattggtccattgaggaagacacttttcacgtccatttgataaagcttaaagccatggtaagtagcataggccaataatatacgaattgactcaag

SEQ ID NO: 74970 - DNA, 442 bp, Zea Mays
aagatatgcatggattgtttctttcttatttgacattttggaccacgcttgcaccacatgttttgtttttgcaaactattttgtaaatacttttcaaagtttttttgcaaatagtcaaaggtaaatgaataagattttgcaaagcatttttaagatttgaaattttctccccctgtttcaaatgcttttccttttgactaaacaaaactccccctcaatgagatcctcctcttagtgttcaagagggttttgatttatcattttgaaatactattttctcccccttttgaacacgataggataccaattgaaaaaatattcaacactgatttttttttgaaatttgaattaggtggtggtgcggtccttttgctttgggctcatttctccccctttttggcatgaatcgcaaaaacggaatcattagagccctcgaagtgct

SEQ ID NO: 74971 - DNA, 972 bp, Zea Mays
ccttccttggcgcaccggacactgtccggtgtacaccggacagtccggtgaattatagcggagtcgcctctggaaattcccgaaggtggtgagtttgagctggagtcctctggtgcaccggacactgtccggtgctcccagaccagagggccttcggttcccactttgctcttctgttgaatccaaaacttcgtctttttattggctgagtgtgaaccttttacacctgtgtaatccatacacttgggcaaacctagttagtccaaatgtttgtgttgggcaattcaaccaccaaaattaattagggactaggtgtaagcctaattccctttcacaccgcttgtgcttgctctttatggacttgctacgggcctcttagcctctagctgaattgatgagacgactctagtagcacttcgcatatcctcgactccctatgagagaattctatactaggtttcaaataaatttctttgtgagtctagggtccggcctaaggtcgtggttgttctcacgtaggtaggttatagtgtcattgtatataagtgaggcaggagttcgagagttttctcgatctgcttgagaagatcttctaatcaaagtgccccggggctatcttatccccataggtcgagtttttttataataggcacacacattttttccttattttcttttttctctcttgaaagcgccggcacatcattatattaagaaggaaaaatattaggccttagagggccagacacaacacaagaactagacaccttttttggcagtgaaaggttgtagggtaaggccctacaacacgatttattgaatcaaaaagatgacaaagtgttagactacccgtctagggtttgtgttattccctgtgtaatgaccgttatacccctgtgtaatgggccttggcccagttactctctctatttaatgtcactcccaacccctgattagggtatgggttcagct

SEQ ID NO: 74972 - DNA, 267 bp, Zea Mays
gaccgttgtaacactgcagggcacggaccgagcggtaaaactgggtggagacccaggcgaagaagtgtgtgagggtggggaacgtgtcagacttcaaccgaagaggaaaagtccaaagaaaatgggaaaattcatccaaaatcaccaaatagtatttataaccagaaagactgagtacaggggacgtccagagatcacaatgaaccaggtcggcgtgcagggtgggggccgcacccagggaggtggcccagccggctgctagagagg

SEQ ID NO: 74973 - DNA, 774 bp, Zea Mays
ccgaagttgggtagccggcggctgatgggaaggagagaaaaaagaaactggctctataccatgaggaaaaccctaaccctaacaggggctgggtgctgtattaatagacttgagtggggtggcaaagacaatagtggtggctgaggtgccgatggcgccgaggggggggctgagaggataccttgggcttagggttggacgaaatgctcgtggctcgtcggctcgctcgattcgtggtcagcccggctcggatcgactcgtttgaattttttacgtgctgagctgacatcctagctcggttcgttaacgagccaactcgcgagctaaacgagctatcacatttcagcaaaacgaaactatatgtatatcatttacgtaacaattgatgaacatgttatatgtatgtgtggtgtctatagactatgagttaaaataatgattgatgaactgtatctatgtgttaaattggtctatgcgaatataattgtgggttaaactgatgagcatgtctgtgaattgatgagtgttaatttggtgttacattgatgtggtctgtgaaattatgagcataattactattttccattgttaaattagtttagaattaactagaaattgattattatatacatattagttttttttgctctacatcgcgagcttaatgagccagctcgagtcgagctagctcgttagcataacgagctagcccgaattcgaacgagccgagccaagctggctcgatatctagtcctacttgggctgggcattgtc

SEQ ID NO: 74974 - DNA, 2432 bp, Zea Mays
aaagacaggctccccaaggtcacagagggaggccaccatgcctttcatccggtggcagtactcggtgacagagaggtccactagatgaaggtcctgaacgcggcagcaagatggagagcacgagcctcatggttgccaaagaactactcctcgatggcaacccaggcctggcgagcagtgccaccacgctcatgaacgacatcatgcggctcaacagtgactgacccaaggatccaggagaggaccacactatccatctgacaccagtaggggataacaagagatgttgtttcggtgaagatgtggtcgtcaagggcgtagcgctgcagcgtgaggaggacaaggtcgcgctagcaggtgctggaggaagcaaggtcgaaaaagacaggaaccaaggagcgaatgttctgaacacctgccttctgtgcacaaaggatggcgatggaaacctcatacatcgaggaggcgtcgaccatcggataggtcgaggagggatcgaggtcggaagagacaagcagatggctctcaacctcggcaagctaccttccgagagtatgagcagtggtgcgttcgtgctctaggcaagggtggtgacgcgttcacactgccagatagcatccacaacagttttagcagttgtgagggccacaaccaaggtggagtgagtagtcacgatgtcggacgtggagcagtgtggggcgcccggggcaggggggccatgcctaggcctgtgttggccaaacctaggtcgacaaggacagttcaggaggcgattgaggataatggctggattaatgatattcctgggagtttatctgttggtgcacttgcagacttcctgcgtatttggaatttggtggcacatgttgatctggacccccataaggaggacaaacatatttttcggttggctgctaatggcaaatattcgactaaagccgcttatgaggggctcttcattggatctgtggagtttgaaccttttgagcggatttggaaaacttgggctccgcccaaatgtcgattcttcttgtggctggtggctcacaagaaatgttggacaacagatagacttgagaagcgggggctggatcatccggaaaaatgtcctttatgtgagcaggaaagggagacaattgaccatctgcttgtgaattgtgttttctcaagagaatgttggttcctccttctaaggcaattcgggctgcagggtttggccccccaaccaacggatattaattttatggagtggtggcatcaaacaaatgaagctattcaggggtccttcagagatggcctaaactccctcattatgctgggcgcttggattttgtggaatcaccggaacagatgcatctttgatggcctttcccctaatgttgctaatttcctaatccatgtgggggatgagcgccgtctgtgggagactgccggggccaaggggttgacatcccttgttgcctccctatctcatgtagcctagagtttttatagatgagtcagtctatgctagtttcgttcaggccgccgtaaggcgtcagttgtaccccggtctatgttagaccttgtttatttcttcctttaatataatgatacgcagctctcctgcgtgttcgagaaaaaccgtcaagccaccggcagctaggcctgtgcctaggccgggagtggccaggccaacgatgcctaggctagggccgaccaggctaggggcgcctagcccggcagaggccaaaccaccactcgcaatggtaggggcagacaactagaggctggggatggtggtggggttggggtggaaggaatcccagcatctaccaaagaccaatgagggaggagaggagagcccgtagggggagaggagggccgtcgaccatggtggtggcatccctagtgggcaggcgacggctagggaaggtgcaaaagaaaaaactccaatgttggagagtaaaaaccctaagtcattaatagtgatctttgtattacatatacctaacactagtgggttacattggctggactcaaggtgcataacactgagacagatacaaacagtctaacagaaaaaaatcttacaatggggtttacttcttgtattctagctaaaaaagataatgattcggatggcagactgtagagtgtaccttactctttcaggtgatagttgatcgagtatcatatttattctttgtggtgcatactttgatggcaatgctgctccaaccagccattcttctggtggaaacaactgcaatacagtttacaagtatttgaaactgaagtctaaggataacaatgagcagatgaagttacagttcaaacagtaatgaaattgtactcagtagaatgtttgttgattagtgttgtcaataaaagagaataccacaagacaatatattacctacagagataaatttatattagaaataactgca

SEQ ID NO: 74975 - DNA, 1815 bp, Zea Mays
ggatcccatcctctaaacaccgtcatcactggcaaaatattcttgtagacatagaagagacgatcctcccaccagcaaacattcaaaaatgagccatgctgcagatatgactcatgtaatcacacctataatactcatttcaactatgtggtcaataggggtggactaaaattggagtggtaagggtcagcacaccagcaataacatgaactttctgctcctcactatcagcaatgcagtgacctatatccatacaacccatggtaccaatggactatgtcactgctcagactcacttattagatatatgtgggtgcaagtgcatacaatacagttatggacccttgtaggaccaactcatctcaaattaactaattattagatgaatttggatatctcatatcataggacaaagttactcaagtataaaatagtaaatcactttcagaaaagatgtaaaccaacacagacttctgattcttgattgcatgaaaaagttgctcatttaagaacattcttggttgcctagcgtggaggcgcaggaggcagaacaaggggtaggcagaaccatggtaggcaacctaccccttaccttcttcatattagtagagataaaagtttgagtggcaagtacaaacccaaatgttgataacaatttgttaatattaacaacttccttcacccgaaaccatatttttatcttccatttccatatttctcatttggtagcagttgatgatctttatagcaaccctatgtcatgtaaggttatgctctgcaatcttcacttttccaaatgtaccaatacctaaatttcttcctaggctgtagttcgttaatgcttcagaatgttcaccccctctagggaaaatgtaaacaaatattccatccatcctaatttataatttgtttgattttttaaatgatggcttcaaatgtgcaatgtaaataagggttctctaagatacatgatttccccaaaattaaaacaaccaatgttcaacgaattttctgagattgcagctaatttcagtcgaaaattagtcatgtctaagtgtatagagatatggtagattaatatatagtataaacctgcacgtactcattaggaaaaaaatgtaaatacatgtgtgaaattatctaacaattcttcaaatggtatttgtccacggtaggtaggctaggtgttcccttagtttttgtgcaaaatatggaggatgaatcactcgatgactattgaagtaaagaatacaaaacaattgtgttgttttagttttttttttgctgaaccttgtgaactgctagtaagatatttagtcaaagcttatttgcatccatcggagagccaatgcaaatagtaaaaaaaatcagcaccaagtccagctaaaagatgggtaacacgttatcagtatacctaggaagttttagaaacatctacatgaacagaacaaatgaatgaataatgataatgaaatataatgcccaccacaaagacattagagtcaacaggtacatgtttgaactaatcatagctgtccaactcggcagcgttaattatgacattgtgtgcgacatttgggccaaggccagtccacaaagctccaataccttcctggaaacatgaaatattttaaggacaacgaaaaaagaaataatcttgtacacttactgcccatgatggttaaagtaacatgtctgattattgtagcatatacattaagggctccagaataactcctcttgactgtgttagcctttccatcagcttgcaacctaactttaacgagatcagttggatttgccacaacaatagct

SEQ ID NO: 74976 - DNA, 1046 bp, Zea Mays
agacaagtttgctatgtgcggcaatcagaaagatgtgtagttaattgaagttaaagtggagggagaaaaatgtaccaacctgtggcaagcgcagcaagaatcttgcttagtaaactgacatcacccacaacagcacatctgacgaagaaagccttcacctgcaagtttatagaagagaaattccccttcattgttgtgaggaagtcacattgaatcgaaggagaagacaactgaaagaatgtggaggagtacagacaggatcatacaagctgatgtggaggccatcatagagaaactgacagtggaggccagggatgacgcccttctagagcgcgacaaccccttcctctctggcgatgcacatgattgtggctagtgtccctccaccagcagcagttgtggctgttgcagccacaggtggtggtggtaatggtgccttcctttgcagctggatctgcactttggctatgtcgaaaggaatggtaaatcaaagctggctccaagcccaaatcgttgacacttctgtttgagatcaaataaacatcctccaactttctttgaagaagcaaatggcaacgttagcctagctagtagccccaaactaatagtttttaagttgcaaaaaataaaataagaatatcatgccacttgcaagccaaacaaatccctcttcaatttgcctcaatggctcatcaaaacagagctactgcaagccccagtcactactcactatgcttgaggtagggagcgagagagtagtcccaatttcagtggcttttcagtggctcctcctctgcctctcagacggatggatgccatgcgatgctcgcgagaggctataaaaaagaaactaaagaatgcaggtgtgcggacggtacctccgcgaagcatgcgacgaaggcactgctgaaaaagatggcggtgaaggaggaggcagtcgccatgcgtcctggtctcgccgcgcggcggccgctcgtggtggtggggtttggtaggggatacgaagaatccagctctttgctggctggagccctggaatggacaag

SEQ ID NO: 74977 - DNA, 1598 bp, Zea Mays
tttcggaccgacaattcaaccccacacgcagtgataaccccgcggttaataaaagaatccctccccacactctctcccgtctctcgcctcgcctccccgacgcgagcgagcccaacacgcaaaacggaacgcttcctcctcgcacctccgccttatccgatggcgtccctcaccaccaccacgtcctcaccggccgccctcccggcggctaccaccgccacagcggcatcgtccatatccccccacgccggttcgaagcggccgctcctcgcgggggacgacgcgccctggcgcgccaccgctgccaccgccgcggggcaggggatccgacccgtcccgcgcatccaccatgcccccgtcctcagcgttgctacgcaggaagactacgccgcctacgccctcgacatcatgaagcatccgaatccgataggggaggggctggccatggaggcgttcgcggaagccgccgggccggagtgcatcgtgcccggacagcaagcgcctctaaggctcatggggctcaaggtttggccccttgatatagatatgaagttcctagagccatttggacgggagttacattcaatgaaaaaattcatggacaagtcgtgcagtgttatggactcatctatggctaacaagtaggcacatggcacatcagttccgaccaatacggctattgttgtatccatctgcttgctgaagttacaagacccgaaaaataggaaattggaagaagggccatggagggaagccgcagtgttttgcatatattgcccaccttcacctgagagaagatatcgggcgcgcaataatgattagtgagcagtcctgtatggagcctgggtgcagcctctgccagtattaagtgatctacgtgttatacattttttatgttcatgaaacattgatccattgataaaatatatcgtcaggtggcaaggggtcgatttgggggaaaatatcttacgcaatttatttatttgttctgttgctaggtcaatttatttatttgttctcgggcgcaggccaccacaacatgtggtgacgaagtctgaattccttcgagttagcatttgtgaagcgtgtttggttctgcgggaaagtttgtgcgagcctgtttgtacccgtgttatcctgtaattttcagatcaatgttcttgcaggctctggagactttcaggccacacaatcctcctgccagttcacgcatggtatcgaggcgcggatggcgatggtgacaagcataattgtgcaaagatggcaacacggatagatgagcgacatctgaacgggagcgttgaaatcggtgcactaatccacgggaattggcaaccctcagcttctggatttcaagttccggttgtcattcaacggtgcctgccccctgttgggataaaaaggccgatgatgttttttctgcattgaacgcagcaagttgcgactcgatgcgtgcacattgagggcggttgaggaaaattcgatctggtcccgatgtccatggcagcagcaccggcgtggctaggaaggatacaggtcagctgtctgtctggactctggacagctttaccagtgaaaaattaaacgtgttctacgat

SEQ ID NO: 74978 - DNA, 601 bp, Zea Mays
cctggcttcatactctatgttgtttggccccttgatatagatatgaagttcctagagccatttggacgggagttacattcaatgaaaaaattcatggacaagtcgtgcagtgttatggactcatctatggctaacaagtaggcacatggcacatcagttccgaccaatacggctattgttgtatccatctgcttgctgaagttacaagacccgaaaaataggaaattggaagaagggccatggagggaagccgcagtgttttgcatatattgcccaccttcacctgagagaagatatcgggcgcgcaataatgattagtgagcagtcctgtatggagcctgggtgcagcctctgccagtattaagtgatctacgtgttatacattttttatgttcatgaaacattgatccattgataaaatatatcgtcaggtggcaaggggtcgatttgggggaaaatatcttacgcaatttatttatttgttctgttgctaggtcaatttatttatttgttctcgggcgcaggccaccacaacatgtggtgacgaagtctgaattccttcgagttagcatttgtgaagcgtgtttggttctgcgggaaa

SEQ ID NO: 74979 - DNA, 1383 bp, Zea Mays
catatcaggcaggcaatgaactagccattgtgccagttcaggtcctcgtagagttaatggcgatggagaggggatttggctcttgttgggcccatggtctctggtctcgtagcttttgaatagtatatgcagatgcaaatgcaatagctgtttttgctaactaattgtgcaatggttgaattgtttagatcatacatgttcttatgctctgctcaaaaagagaagatagtttcattgttacaatggtagttactctgtactgatttgaagaccgaattgtcgattctcttcttcattattgccttccttagaaagttacttgggtaaatatcatgcttcctattctaatattactgttctgcaatctgcacttccgcagttcatggacaagtcgtgcagtgttatggactcatctatggctaacaagtaggcacatggcacatcagttccgaccaatacggctattgttgtatccatctgcttgctgaagttacaagacccgaaaaataggaaattggaagaagggccatggagggaagccgcagtgttttgcatatattgcccaccttcacctgagagaagatatcgggcgcgcaataatgattagtgagcagtcctgtatggagcctgggtgcagcctctgccagtattaagtgatctacgtgttatacattttttatgttcatgaaacattgatccattgataaaatatatcgtcaggtggcaaggggtcgatttgggggaaaatatcttacgcaatttatttatttgttctgttgctaggtcaatttatttatttgttctcgggcgcaggccaccacaacatgtggtgacgaagtctgaattccttcgagttagcatttgtgaagcgtgtttggttctgcgggaaagtttgtgcgagcctgtttgtacccgtgttatcctgtaattttcagatcaatgttcttgcaggctctggagactttcaggccacacaatcctcctgccagttcacgcatggtatcgaggcgcggatggcgatggtgacaagcataattgtgcaaagatggcaacacggatagatgagcgacatctgaacgggagcgttgaaatcggtgcactaatccacgggaattggcaaccctcagcttctggatttcaagttccggttgtcattcaacggtgcctgccccctgttgggataaaaaggccgatgatgttttttctgcattgaacgcagcaagttgcgactcgatgcgtgcacattgagggcggttgaggaaaattcgatctggtcccgatgtccatggcagcagcaccggcgtggctaggaaggatacaggtcagctgtctgtctggactctggacagctttaccagtgaaaaattaaacgtgttctacgat

SEQ ID NO: 74980 - DNA, 1338 bp, Zea Mays
attgctataagaattcgcgtgacatcaaccagataaataaacagctattattcgatccaaaacataaaatacgagggtcaaatcctcctttcgggaattctcgtctcgctcggctcctctgggcccacagcggccagcaaactgcctccgtcctccctgcgggctgtgccgcctcttcttcgcgtcggcgccgccctcctcccttctcttctgctgctgatggaactggatcctcgcctctacgagaacgtctctgtcagcgacaatgatgtccgaaacatagttctatcttatcttatgcacaactgttttaaagagacggcagaggcattcctatctagcaccgggttgaatttacctgtcgactatagtgtggatgtggataagcgtaaagcaatttttaattttgtgctagaagggaatgcccttaaagccatagagctgacagaagaaatggcacctaacttgctagagaatgatatggatctacattttgatcttcttagtctccacttcattgagctagttcgctccaaaaaattcacagaagctcttgactttggccagaaaaaattgacatcatttcagaaggttaccaagtatattgagaaactagaggactttatggccctcctggcttatgaagagccggagaagtcacctatgtttcatctactaagcccagagcacaggcagaatgttgcagagggcttgaatcgggctgtccttgcatattcatcgttggagagggtggtccagcaagcgactgtggttagacaatacctacagcaggaagttggcaaggcctttctgagcaagtaaatgtgcaaatggtcacttcttcagaacagggtaaccacctctccaggccatcatgtacatgtacccttgtggagtgcatacacgatgaagtagtttatacagttgaggtgttgttgacaccacttatacagttgcaatggtgttgtactttgaaaaggagggtgctgtatgctgtctgcttccttgatttacattctgttttacttgtctctctgccttagacatggcgaaagcatgtatgtatgacctgttgagctattctgtgcgttcgttcggtgaactcagttcgagtcggtttgtaattggtcttttttattactaccgccatgtgcagaggctaaaggtccgaactctggatgcgtaagcgtaacgggttattctgtccatggtactcctatttgcgatttccatatataagggactgtgaattcttcatcacttgtagatgttgatataattttttcagaaaaaaaaatgttcagaggagtttgaatcaaactcaaactttaatttgga

SEQ ID NO: 74981 - DNA, 1315 bp, Zea Mays
ataaacagctattattcgatccaaaacataaaatacgagggtcaaatcctcctttcgggaattctcgtctcgctcggctcctctgggcccacagcggccagcaaactgcctccgtcctccctgcgggctgtgccgcctcttcttcgcgtcggcgccgccctcctcccttctcttctgctgctgatggaactggatcctcgcctctacgagaacgtctctgtcagcgacaatgatgtccgaaacatagttctatcttatcttatgcacaactgttttaaagagacggcagaggcattcctatctagcaccgggttgaatttacctgtcgactatagtgtggatgtggataagcgtaaagcaatttttaattttgtgctagaagggaatgcccttaaagccatagagctgacagaagaaatggcacctaacttgctagagaatgatatggatctacattttgatcttcttagtctccacttcattgagctagttcgctccaaaaaattaagctcttgactttggccagaaaaaattgacatcatttcagaaggttaccaagtatattgagaaactagaggactttatggccctcctggcttatgaagagccggagaagtcacctatgtttcatctactaagcccagagcacaggcagaatgttgcagagggcttgaatcgggctgtccttgcacatgctaatcttccagcatattcatcgttggagagggtggtccagcaagcgactgtggttagacaatacctacagcaggaagttggcaaggcctttctgagcaagtaaatgtgcaaatggtcacttcttcagaacagggtaaccacctctccaggccatcatgtacatgtacccttgtggagtgcatacacgatgaagtagtttatacagttgaggtgttgttgacaccacttatacagttgcaatggtgttgtactttgaaaaggagggtgctgtatgctgtctgcttccttgatttacattctgttttacttgtctctctgccttagacatggcgaaagcatgtatgtatgacctgttgagctattctgtgcgttcgttcggtgaactcagttcgagtcggtttgtaattggtcttttttattactaccgccatgtgcagaggctaaaggtccgaactctggatgcgtaagcgtaacgggttattctgtccatggtactcctatttgcgatttccatatataagggactgtgaattcttcatcacttgtagatgttgatataattttttcagaaaaaaaaatgttcagaggagtttgaatcaaactcaaactttaatttgga

SEQ ID NO: 74982 - DNA, 1259 bp, Zea Mays
gtcaaatcctcctttcgggaattctcgtctcgctcggctcctctgggcccacagcggccagcaaactgcctccgtcctccctgcgggctgtgccgcctcttcttcgcgtcggcgccgccctcctcccttctcttctgctgctgatggaactggatcctcgcctctacgagaacgtctctgtcagcgacaatgatgtccgaaacatagttctatcttatcttatgcacaactgttttaaagagacggcagaggcattcctatctagcaccgggttgaatttacctgtcgactatagtgtggatgtggataagcgtaaagaagggaatgcccttaaagccatagagctgacagaagaaatggcacctaacttgctagagaatgatatggatctacattttgatcttcttagtctccacttcattgagctagttcgctccaaaaaattcacagaagctcttgactttggccagaaaaaattgacatcatttcagaaggttaccaagtatattgagaaactagaggactttatggccctcctggcttatgaagagccggagaagtcacctatgtttcatctactaagcccagagcacaggcagaatgttgcagagggcttgaatcgggctgtccttgcacatgctaatcttccagcatattcatcgttggagagggtggtccagcaagcgactgtggttagacaatacctacagcaggaagttggcaaggcctttctgagcaagtaaatgtgcaaatggtcacttcttcagaacagggtaaccacctctccaggccatcatgtacatgtacccttgtggagtgcatacacgatgaagtagtttatacagttgaggtgttgttgacaccacttatacagttgcaatggtgttgtactttgaaaaggagggtgctgtatgctgtctgcttccttgatttacattctgttttacttgtctctctgccttagacatggcgaaagcatgtatgtatgacctgttgagctattctgtgcgttcgttcggtgaactcagttcgagtcggtttgtaattggtcttttttattactaccgccatgtgcagaggctaaaggtccgaactctggatgcgtaagcgtaacgggttattctgtccatggtactcctatttgcgatttccatatataagggactgtgaattcttcatcacttgtagatgttgatataattttttcagaaaaaaaaatgttcagaggagtttgaatcaaactcaaactttaatttgga

SEQ ID NO: 74983 - DNA, 1195 bp, Zea Mays
cctcctttcgggaattctcgtctcgctcggctcctctgggcccacagcggccagcaaactgcctccgtcctccctgcgggctgtgccgcctcttcttcgcgtcggcgccgccctcctcccttctcttctgctgctgatggaactggatcctcgcctctacgagaacgtctctgtcagcgacaatgatgtccgaaacatagttctatcttatcttatgcacaactgttttaaagagacggcagaggcattcctatctagcaccgggttgaatttacctgtcgactatagtgtggatgtggataagcgtaaagagaatgatatggatctacattttgatcttcttagtctccacttcattgagctagttcgctccaaaaaattcacagaagctcttgactttggccagaaaaaattgacatcatttcagaaggttaccaagtatattgagaaactagaggactttatggccctcctggcttatgaagagccggagaagtcacctatgtttcatctactaagcccagagcacaggcagaatgttgcagagggcttgaatcgggctgtccttgcacatgctaatcttccagcatattcatcgttggagagggtggtccagcaagcgactgtggttagacaatacctacagcaggaagttggcaaggcctttctgagcaagtaaatgtgcaaatggtcacttcttcagaacagggtaaccacctctccaggccatcatgtacatgtacccttgtggagtgcatacacgatgaagtagtttatacagttgaggtgttgttgacaccacttatacagttgcaatggtgttgtactttgaaaaggagggtgctgtatgctgtctgcttccttgatttacattctgttttacttgtctctctgccttagacatggcgaaagcatgtatgtatgacctgttgagctattctgtgcgttcgttcggtgaactcagttcgagtcggtttgtaattggtcttttttattactaccgccatgtgcagaggctaaaggtccgaactctggatgcgtaagcgtaacgggttattctgtccatggtactcctatttgcgatttccatatataagggactgtgaattcttcatcacttgtagatgttgatataattttttcagaaaaaaaaatgttcagaggagtttgaatcaaactcaaactttaatttgga

SEQ ID NO: 74984 - DNA, 1233 bp, Zea Mays
ctcgtctcgctcggctcctctgggcccacagcggccagcaaactgcctccgtcctccctgcgggctgtgccgcctcttcttcgcgtcggcgccgccctcctcccttctcttctgctgctgatggaactggatcctcgcctctacgagaacgtctctgtcagcgacaatgatgtccgaaacatagttctatcttatcttatgcacaactgttttaaagagacggcagaggcattcctatctagcaccgggttgaatttacctgtcgactatagtgtggatgtggataagcgtaaagggaatgcccttaaagccatagagctgacagaagaaatggcacctaacttgctagagaatgatatggatctacattttgatcttcttagtctccacttcattgagctagttcgctccaaaaaattcacagaagctcttgactttggccagaaaaaattgacatcatttcagaaggttaccaagtatattgagaaactagaggactttatggccctcctggcttatgaagagccggagaagtcacctatgtttcatctactaagcccagagcacaggcagaatgttgcagagggcttgaatcgggctgtccttgcacatgctaatcttccagcatattcatcgttggagagggtggtccagcaagcgactgtggttagacaatacctacagcaggaagttggcaaggcctttctgagcaagtaaatgtgcaaatggtcacttcttcagaacagggtaaccacctctccaggccatcatgtacatgtacccttgtggagtgcatacacgatgaagtagtttatacagttgaggtgttgttgacaccacttatacagttgcaatggtgttgtactttgaaaaggagggtgctgtatgctgtctgcttccttgatttacattctgttttacttgtctctctgccttagacatggcgaaagcatgtatgtatgacctgttgagctattctgtgcgttcgttcggtgaactcagttcgagtcggtttgtaattggtcttttttattactaccgccatgtgcagaggctaaaggtccgaactctggatgcgtaagcgtaacgggttattctgtccatggtactcctatttgcgatttccatatataagggactgtgaattcttcatcacttgtagatgttgatataattttttcagaaaaaaaaatgttcagaggagtttgaatcaaactcaaactttaatttgga

SEQ ID NO: 74985 - DNA, 765 bp, Zea Mays
cggctcctctgggcccacagcggccagcaaactgcctccgtcctccctgcgggctgtgccgcctcttcttcgcgtcggcgccgccctcctcccttctcttctgctgctgatggaactggatcctcgcctctacgagaacgtctctgtcagcgacaatgatgtccgaaacatagttctatcttatcttatgcacaactgttttaaagagacggcagaggcattcctatctagcaccgggttgaatttacctgtcgactatagtgtggatgtggataagcgtaaaggtatttatttgcagcaatttttaattttgtgctagaagggaatgcccttaaagccatagagctgacagaagaaatggcacctaacttgctagagaatgatatggatctacattttgatcttcttagtctccacttcattgagctagttcgctccaaaaaattcacagaagctcttgactttggccagaaaaaattgacatcatttcagaaggttaccaagtatattgagaaactagaggactttatggccctcctggcttatgaagagccggagaagtcacctatgtttcatctactaagcccagagcacaggcagaatgttgcagagggcttgaatcgggctgtccttgcacatgctaatcttccagcatattcatcgttggagagggtggtccagcaagcgactgtggttagacaatacctacagcaggaagttggcaagttttggtgatctacatcttgctgcatacatgacatttgg

SEQ ID NO: 74986 - DNA, 1260 bp, Zea Mays
ctgggcccacagcggccagcaaactgcctccgtcctccctgcgggctgtgccgcctcttcttcgcgtcggcgccgccctcctcccttctcttctgctgctgatggaactggatcctcgcctctacgagaacgtctctgtcagcgacaatgatgtccgaaacatagttctatcttatcttatgcacaactgttttaaagagacggcagaggcattcctatctagcaccgggttgaatttacctgtcgactatagtgtggatgtggataagcgtaaagcaatttttaattttgtgctagaagggaatgcccttaaagccatagagctgacagaagaaatggcacctaacttgctagagaatgatatggatctacattttgatcttcttagtctccacttcattgagctagttcgctccaaaaaattaagctcttgactttggccagaaaaaattgacatcatttcagaaggttaccaagtatattgagaaactagaggactttatggccctcctggcttatgaagagccggagaagtcacctatgtttcatctactaagcccagagcacaggcagaatgttgcagagggcttgaatcgggctgtccttgcacatgctaatcttccagcatattcatcgttggagagggtggtccagcaagcgactgtggttagacaatacctacagcaggaagttggcaaggattcttacccaccattttctttgaaggcctttctgagcaagtaaatgtgcaaatggtcacttcttcagaacagggtaaccacctctccaggccatcatgtacatgtacccttgtggagtgcatacacgatgaagtagtttatacagttgaggtgttgttgacaccacttatacagttgcaatggtgttgtactttgaaaaggagggtgctgtatgctgtctgcttccttgatttacattctgttttacttgtctctctgccttagacatggcgaaagcatgtatgtatgacctgttgagctattctgtgcgttcgttcggtgaactcagttcgagtcggtttgtaattggtcttttttattactaccgccatgtgcagaggctaaaggtccgaactctggatgcgtaagcgtaacgggttattctgtccatggtactcctatttgcgatttccatatataagggactgtgaattcttcatcacttgtagatgttgatataattttttcagaaaaaaaaatgttcagaggagtttgaatcaaactcaaactttaatttgga

SEQ ID NO: 74987 - DNA, 1175 bp, Zea Mays
cggccagcaaactgcctccgtcctccctgcgggctgtgccgcctcttcttcgcgtcggcgccgccctcctcccttctcttctgctgctgatggaactggatcctcgcctctacgagaacgtctctgtcagcgacaatgatgtccgaaacatagttctatcttatcttatgcacaactgttttaaagagacggcagaggcattcctatctagcaccgggttgaatttacctgtcgactatagtgtggatgtggataagcgtaaagagaatgatatggatctacattttgatcttcttagtctccacttcattgagctagttcgctccaaaaaattcacagaagctcttgactttggccagaaaaaattgacatcatttcagaaggttaccaagtatattgagaaactagaggactttatggccctcctggcttatgaagagccggagaagtcacctatgtttcatctactaagcccagagcacaggcagaatgttgcagagggcttgaatcgggctgtccttgcacatgctaatcttccagcatattcatcgttggagagggtggtccagcaagcgactgtggttagacaatacctacagcaggaagttggcaaggattcttacccaccattttctttgaaggcctttctgagcaagtaaatgtgcaaatggtcacttcttcagaacagggtaaccacctctccaggccatcatgtacatgtacccttgtggagtgcatacacgatgaagtagtttatacagttgaggtgttgttgacaccacttatacagttgcaatggtgttgtactttgaaaaggagggtgctgtatgctgtctgcttccttgatttacattctgttttacttgtctctctgccttagacatggcgaaagcatgtatgtatgacctgttgagctattctgtgcgttcgttcggtgaactcagttcgagtcggtttgtaattggtcttttttattactaccgccatgtgcagaggctaaaggtccgaactctggatgcgtaagcgtaacgggttattctgtccatggtactcctatttgcgatttccatatataagggactgtgaattcttcatcacttgtagatgttgatataattttttcagaaaaaaaaatgttcagaggagtttgaatcaaactcaaactttaatttgga

SEQ ID NO: 74988 - DNA, 2277 bp, Zea Mays
ccaccttccattcctcttcctctctctctctctctcccgtgctccggtagctatagctcttggacctccaagaagcacacggccggagtgatcagtgaagaaacggccggagtgatcagtgaagaaagagaaagcataagaccgggctggtggcaatataatgacgcggtgcctcatgttcatgccgccgctgttcctcgtgtcctccctcatctccaccgtggggctgccggtggagccgcccgcggagctcctgcagctcggaggcgacgtcagcggcgggcgcctcagcgtggacgcgtccgacatcgcggaggcgtcgcgggacttcgggggcctctcccgcgccgagcccatggcggtgttccagccgcgcgcggccggcgacgtggcgggcctggtccgcgccgcgttcgggtcggcgcgcgggttccgcgtgtcggcgcggggccacggccactccatcagcggccaggcgcaggcgcccggcggcgtggtcgtggacatgggccacggcggcgccgtggcgcgggcgcttcccgtgcactcgccggcgctgggcgggcactacgtggacgtctggggcggcgagctgtgggtggacgtgctcaactggacgctgtcgcacggcgggctcgcgccgcggtcgtggacggactacctgtacctgtccgtgggcggcaccctctccaacgccggcatcagcgggcaggcgttccaccacgggccccagatcagcaatgtctacgagctcgacgtcgtcacagggaagggagaggtggtgacctgctcggagacggagaacccggacctattcttcggcgtgctgggcgggctgggccagttcggcatcatcacaagggcgcgcatcgccctggaacgtgctccccaaagggttcggtggatccgggcgctctactccaacttcaccgagttcacggcggaccaggagcgcctcatctccctgggcagccgccggttcgactacgtggagggcttcgtcgtcgccgccgagggcctcatcaacaactggaggtcctccttcttctcgccgcagaacccggtgaagctcagctcgctcaagcaccactccggcgtcctctactgcctcgaggtcaccaagaactacgacgacgccaccgccgggtcggtcgagcaggtccgccctcgccgccgcctttctttgtttatgtggccggcgtgctctgatatactaagttgtttgggaaaccgccccatttcggggtggcgagcagcgagagctaatcattggagccgtgcccagacgagtatggctggctgctactagatcttggtccatcggtagagcaagtattttattttattttgcaggggcggcggcggcggcggcggcggcaaacgacagcacgggggaagggaaacatatactaacgaaatttggaattcttttttcgttcaggatgtggatgcgctgttgggcgagctgaacttcatcccaggcacggtgttcacgacggacctgccgtacgtggacttcctggaccgcgtgcacaaggcggagctgaagctgcgcgccaaggggatgtgggaggtgccgcacccgtggctgaacctcttcgtgccggcgtcccgcatcgccgacttcgaccgcggcgtcttccgtggcgtgctggggggcggcaccgccggcgccggcggtcccatcctcatctaccccatgaacaagcacaggtgggacccgaggagctcggtggtgaccccggacgaggacgtgttctacctggtggcgttcctgcggtcggcgctgccgggcgcgccggagagcctggaggcgctggcgcggcagaaccggcgggtcctcgacttctgcgcggaggccggcatcggcgccaagcagtacctgcccaaccacaaggcgccgggcgagtgggcggagcacttcggcgccgcgcggtgggagcggttcgccaggctcaaggcccagttcgacccgcgggccatcctggccgccgggcagggcatcttccggccgccgggctcgccgccgctcgtcgccgactcgtgatcggtactactgactgattattaggcgcgttttagtgtaggtagtagctacagcggtaaccgtacaggattatttagtttgttgttattattattattattatttagctccggttgatgtacaaatgtgggtcacgtgattctgtacatgtacatgggagtcaaatatgaatgtcgccaagtgatgctcttctcttctaatggttaaatacaggtgcctgactctctctg

SEQ ID NO: 74989 - DNA, 1130 bp, Zea Mays
gtttgtttagccccgtgcgggggatctctcgttcggtggatccgggcgctctactccaacttcaccgagttcacggcggaccaggagcgcctcatctccctgggcagccgccggttcgactacgtggagggcttcgtcgtcgccgccgagggcctcatcaacaactggaggtcctccttcttctcgccgcagaacccggtgaagctcagctcgctcaagcaccactccggcgtcctctactgcctcgaggtcaccaagaactacgacgacgccaccgccgggtcggtcgagcaggatgtggatgcgctgttgggcgagctgaacttcatcccaggcacggtgttcacgacggacctgccgtacgtggacttcctggaccgcgtgcacaaggcggagctgaagctgcgcgccaaggggatgtgggaggtgccgcacccgtggctgaacctcttcgtgccggcgtcccgcatcgccgacttcgaccgcggcgtcttccgtggcgtgctggggggcggcaccgccggcgccggcggtcccatcctcatctaccccatgaacaagcacaggtgggacccgaggagctcggtggtgaccccggacgaggacgtgttctacctggtggcgttcctgcggtcggcgctgccgggcgcgccggagagcctggaggcgctggcgcggcagaaccggcgggtcctcgacttctgcgcggaggccggcatcggcgccaagcagtacctgcccaaccacaaggcgccgggcgagtgggcggagcacttcggcgccgcgcggtgggagcggttcgccaggctcaaggcccagttcgacccgcgggccatcctggccgccgggcagggcatcttccggccgccgggctcgccgccgctcgtcgccgactcgtgatcggtactactgactgattattaggcgcgttttagtgtaggtagtagctacagcggtaaccgtacaggattatttagtttgttgttattattattattattatttagctccggttgatgtacaaatgtgggtcacgtgattctgtacatgtacatgggagtcaaatatgaatgtcgccaagtgatgctcttctcttctaatggttaaatacaggtgcctgactctctctg

SEQ ID NO: 74990 - DNA, 1063 bp, Zea Mays
ctaaaactcgtttgctgttctgttctacactaaatagatcctgtgatgtgtgccgcgcctcttcatatgcatctggtgtacaaaactcgtgcattctctattaatcaaaataatatctattagtgatcgatacagaaaaaaaagaacaaattagtgaatgtacgccctgtaatatattctatctgaaagtaaatatcaatttccgatgttgaagctggcaagatactggaatcgtctaccagacattttgcttgcttgctaacttgttctgcattcggcaagccattgaccctgaagattccacagaaatgggttgctacatgagcaaagggtcagctgatatcttggactcaacactgtgagcaacctcttcatcttttgtcctgtctagaggtgccctatatgtcgtccataagttcttccgagttcattccgggagagccaacagtattatcacggcttgtggaatcagaatcagaatcagaagttacaacaatatttgcatgatcttgacttccagactcgctctcaaaagcctcatcctgttggcttgcgactgggtgagagatcaatataatagaacttgattggtcttggacgctagattctatggcagattcaccatgatgatcaagactctcagaagtctgctctataaagttatcctcttcatcagagtatgatatcccaaatttctgcgcatgagtcaatcctggacaaactccctatcaaaaaggatatgttaaggttagagaaaagaaaaataaacataatttaatagcgtgcagtctgaattttgggcgtgcgtgtagtgttaatgtattagatgaagagccaaaaacatagctctcttagcaagactagcatccaatcaaaaagaatgaaaccagaaaaacatgatgctcttgttcatgcaacaaaataacaaagacactggatcaaggtagaaaactagcttcagatgccatattcacacaccacgttgagacagaaagccaactaccctccttgctgtatattcattgctttctaactccaattaattgataactgcaaccagctg

SEQ ID NO: 74991 - DNA, 2588 bp, Zea Mays
atgcacgttatccatggcgcctcgaggagaccccggcgaatgctggcccttggatccaaccgagctagcatgcatgcgcattcgctgccttccaaacggaggaaggggaaattaacaacgcgattacgcgaagccttcaaaaagccagccccctcctctcccttccaggcaacccaaccacaggccacagcgcagcggtgtgtgtgggtgtgtgtctgcgccagagaccaaacaccaacctccccccaccctcgacccatccccacctcgccgccgccgccgccgccgcacggtctccttccccgaggagctggtgttggtgcccgcgctgcaggtggggcgcagcccattgaagacattgctaataaggtattgaagatggatggtgggagtgctgagaagattgctggaggtgaagatgaagggactacatctccagtcccagagaaggttcaagtaggccattctccacagtacaaggttgaacgcaagttggggaaaggtggttttgggcaagtatatgttggcagaaggatttctgggggaacagagcgcactggacctgatgcttacgaggttgctttgaaatttgagcaccgaaacagcaagggctgcaattatggccctccatatgagtggcaagtttatagtgctctgaacgggtgttatggtgtaccatgggttcattacaaaggtcgacaaggagattattatgttctggatgacacctaatatggttgcttgcattgctgtagaggcaatttctatacttgagaaacttcatgcaaaagggtttgttcatggagacgttaaacccgagaattttctacttggccagcctggatcccctgacgagaaaaaactttttctgattgatcttgggttagcatctagatggaaggaatcagggtcatctggacaacatgttgaatatgatcagaaaccagatattttcagaggtacaataagatacgctagtgtccatgcacatttaggacgtactggtagcagaagggatgatctggaatcattagcatatacattgatatttcttcttagaggaaggttgccgtggcaaggttatcagggcgagaacaagagttttcttgtttgcaagaagaaaatggctacctctccagatctattatgctgtttttgcccaactccattcaaacttttcctggagactgtgacaaacatgaaatttgatgaagaaccaaattactcaaagcttatttcccttttcgatgaattgattgagccccagcatttgaggcctattagaattgatggtgcattgaaggctggacaaaaacgtggaagattacatgtaaatccagaagaagatgagcaaccgaagaagaaagttcgacttggaagcccagcaaatcagtggatttcagtttataatgctagaaggcccatgaagcagagataccattacaatgtagcagatgccaggcttcatcaacacatagagaaggggactggtttcacatcccaagtatatgaactgtcacccatattccttcataaggattggattatggagcagtgggaaaataactactacatcagtgccatagctggtgcaatgaatgggagttccttggtggtcatgtcaaaaggaactccttacactcagcagtcttacaaagttagtgaatcattcccctacaagtggatcaacaagaaatggaaagaaggttttcatgttacatcaatgacaactgcaggaagccgctggggtgtagttatgtcaaggaactctggatactctgaacaggtagtggagttggattttctttatcctagtgaaggtattcaccgacgatgggagaacggatatagaataacttctacagcagctactggcgatcaagctgctttcatattgagtatacctaaaagaaagttaatggatgagacacaagaaactcttagaacatctgcttttccaagcaaccatgtgaaggagaaatgggccaagaacctttacattgcttcaatatgctatggccggacagtgtcatgaggcttgctcggctgcatccctagttgggaagagcatgttctgatgagtatatattgggaaaaaagcagcaatctttgttgctgctctctattaatctctgtatgtgtaggtaacccgttcaagatgaagcaccttacagtggccagagtaggagctcaagaaagaaccgagaggaaggtggaaagcaatcggccaataagcagacgaggagtatgtgatctggctagtagcgggtacaggcgctaatggcgtcaaatgttttgtatcagcatgttttgcttttgcttcgctcctgaccgctgtgcaaagagtagacagcttgtttctttcggaggcaagtcatctgagaaccatcgtgtatagcgtatgatgtcattgtattttctttagtggaggccaagttccatctttccggaactcccaaaatgctaagttattatgcgaggaaacaagtgtactgataaaatcggtgtatcaattccattattcgacaattctcacctgcattaattaatgcaatgctgcattacttatcaccctgggctttttattt

SEQ ID NO: 74992 - DNA, 2625 bp, Zea Mays
atgcacgttatccatggcgcctcgaggagaccccggcgaatgctggcccttggatccaaccgagctagcatgcatgcgcattcgctgccttccaaacggaggaaggggaaattaacaacgcgattacgcgaagccttcaaaaagccagccccctcctctcccttccaggcaacccaaccacaggccacagcgcagcggtgtgtgtgggtgtgtgtctgcgccagagaccaaacaccaacctccccccaccctcgacccatccccacctcgccgccgccgccgccgccgcacggtctccttccccgaggagctggtgttggtgcccgcgctgcaggtggggcgcagcccattgaagacattgctaataaggtattgaagatggatggtgggagtgctgagaagattgctggaggtgaagatgaagggactacatctccagtcccagagaaggttcaagtaggccattctccacagtacaaggttgaacgcaagttggggaaaggtggttttgggcaagtatatgttggcagaaggatttctgggggaacagagcgcactggacctgatgcttacgaggttgctttgaaatttgagcaccgaaacagcaagggctgcaattatggccctccatatgagtggcaagtttatagtgctctgaacgggtgttatggtgtaccatgggttcattacaaaggtcgacaaggagattattatgttctggtgatggatattctagggcccagcctttgggatgtctggaattcatttgggcagttgatgacacctaatatggttgcttgcattgctgtagaggcaatttctatacttgagaaacttcatgcaaaagggtttgttcatggagacgttaaacccgagaattttctacttggccagcctggatcccctgacgagaaaaaactttttctgattgatcttgggttagcatctagatggaaggaatcagggtcatctggacaacatgttgaatatgatcagaaaccagatattttcagaggtacaataagatacgctagtgtccatgcacatttaggacgtactggtagcagaagggatgatctggaatcattagcatatacattgatatttcttcttagaggaaggttgccgtggcaaggttatcagggcgagaacaagagttttcttgtttgcaagaagaaaatggctacctctccagatctattatgctgtttttgcccaactccattcaaacttttcctggagactgtgacaaacatgaaatttgatgaagaaccaaattactcaaagcttatttcccttttcgatgaattgattgagccccagcatttgaggcctattagaattgatggtgcattgaaggctggacaaaaacgtggaagattacatgtaaatccagaagaagatgagcaaccgaagaagaaagttcgacttggaagcccagcaaatcagtggatttcagtttataatgctagaaggcccatgaagcagagataccattacaatgtagcagatgccaggcttcatcaacacatagagaagggtaatgaagatggattgttcattagttcagtagcatcttcagccaatctttgggctctcattatggatgcagggactggtttcacatcccaagtatatgaactgtcacccatattccttcataaggaactccttacactcagcagtcttacaaagttagtgaatcattcccctacaagtggatcaacaagaaatggaaagaaggttttcatgttacatcaatgacaactgcaggaagccgctggggtgtagttatgtcaaggaactctggatactctgaacaggtagtggagttggattttctttatcctagtgaaggtattcaccgacgatgggagaacggatatagaataacttctacagcagctactggcgatcaagctgctttcatattgagtatacctaaaagaaagttaatggatgagacacaagaaactcttagaacatctgcttttccaagcaaccatgtgaaggagaaatgggccaagaacctttacattgcttcaatatgctatggccggacagtgtcatgaggcttgctcggctgcatccctagttgggaagagcatgttctgatgagtatatattgggaaaaaagcagcaatctttgttgctgctctctattaatctctgtatgtgtaggtaacccgttcaagatgaagcaccttacagtggccagagtaggagctcaagaaagaaccgagaggaaggtggaaagcaatcggccaataagcagacgaggagtatgtgatctggctagtagcgggtacaggcgctaatggcgtcaaatgttttgtatcagcatgttttgcttttgcttcgctcctgaccgctgtgcaaagagtagacagcttgtttctttcggaggcaagtcatctgagaaccatcgtgtatagcgtatgatgtcattgtattttctttagtggaggccaagttccatctttccggaactcccaaaatgctaagttattatgcgaggaaacaagtgtactgataaaatcggtgtatcaattccattattcgacaattctcacctgcattaattaatgcaatgctgcattacttatcaccctgggctttttattt

SEQ ID NO: 74993 - DNA, 2644 bp, Zea Mays
atgcacgttatccatggcgcctcgaggagaccccggcgaatgctggcccttggatccaaccgagctagcatgcatgcgcattcgctgccttccaaacggaggaaggggaaattaacaacgcgattacgcgaagccttcaaaaagccagccccctcctctcccttccaggcaacccaaccacaggccacagcgcagcggtgtgtgtgggtgtgtgtctgcgccagagaccaaacaccaacctccccccaccctcgacccatccccacctcgccgccgccgccgccgccgcacggtctccttccccgaggagctggtgttggtgcccgcgctgcaggtggggcgcagcccattgaagacattgctaataaggtattgaagatggatggtgggagtgctgagaagattgctggaggtgaagatgaagggactacatctccagtcccagagaaggttcaagtaggccattctccacagtacaaggttgaacgcaagttggggaaaggtggttttgggcaagtatatgttggcagaaggatttctgggggaacagagcgcactggacctgatgcttacgaggttgctttgaaatttgagcaccgaaacagcaagggctgcaattatggccctccatatgagtggcaagtttatagtgctctgaacgggtgttatggtgtaccatgggttcattacaaaggtcgacaaggagattattatgttctggtgatggatattctagggcccagcctttgggatgtctggaattcatttgggcagttgatgacacctaatatggttgcttgcattgctgtagaggcaatttctatacttgagaaacttcatgcaaaagggtttgttcatggagacgttaaacccgagaattttctacttggccagcctggatcccctgacgagaaaaaactttttctgattgatcttgggttagcatctagatggaaggaatcagggtcatctggacaacatgttgaatatgatcagaaaccagatattttcagaggtacaataagatacgctagtgtccatgcacatttaggacgtactggtagcagaagggatgatctggaatcattagcatatacattgatatttcttcttagaggaaggttgccgtggcaaggttatcagggcgagaacaagagttttcttgtttgcaagaagaaaatggctacctctccagatctattatgctgtttttgcccaactccattcaaacttttcctggagactgtgacaaacatgaaatttgatgaagaaccaaattactcaaagcttatttcccttttcgatgaattgattgagccccagcatttgaggcctattagaattgatggtgcattgaaggctggacaaaaacgtggaagattacatgtaaatccagaagaagatgagcaaccgaagaagaaagttcgacttggaagcccagcaaatcagtggatttcagtttataatgctagaaggcccatgaagcagagataccattacaatgtagcagatgccaggcttcatcaacacatagagaaggggactggtttcacatcccaagtatatgaactgtcacccatattccttcataaggattggattatggagcagtgggaaaataactactacatcagtgccatagctggtgcaatgaatgggagttccttggtggtcatgtcaaaaggaactccttacactcagcagtcttacaaagttagtgaatcattcccctacaagtggatcaacaagaaatggaaagaaggttttcatgttacatcaatgacaactgcaggaagccgctggggtgtagttatgtcaaggaactctggatactctgaacaggtagtggagttggattttctttatcctagtgaaggtattcaccgacgatgggagaacggatatagaataacttctacagcagctactggcgatcaagctgctttcatattgagtatacctaaaagaaagttaatggatgagacacaagaaactcttagaacatctgcttttccaagcaaccatgtgaaggagaaatgggccaagaacctttacattgcttcaatatgctatggccggacagtgtcatgaggcttgctcggctgcatccctagttgggaagagcatgttctgatgagtatatattgggaaaaaagcagcaatctttgttgctgctctctattaatctctgtatgtgtaggtaacccgttcaagatgaagcaccttacagtggccagagtaggagctcaagaaagaaccgagaggaaggtggaaagcaatcggccaataagcagacgaggagtatgtgatctggctagtagcgggtacaggcgctaatggcgtcaaatgttttgtatcagcatgttttgcttttgcttcgctcctgaccgctgtgcaaagagtagacagcttgtttctttcggaggcaagtcatctgagaaccatcgtgtatagcgtatgatgtcattgtattttctttagtggaggccaagttccatctttccggaactcccaaaatgctaagttattatgcgaggaaacaagtgtactgataaaatcggtgtatcaattccattattcgacaattctcacctgcattaattaatgcaatgctgcattacttatcaccctgggctttttattt

SEQ ID NO: 74994 - DNA, 2663 bp, Zea Mays
atgcacgttatccatggcgcctcgaggagaccccggcgaatgctggcccttggatccaaccgagctagcatgcatgcgcattcgctgccttccaaacggaggaaggggaaattaacaacgcgattacgcgaagccttcaaaaagccagccccctcctctcccttccaggcaacccaaccacaggccacagcgcagcggtgtgtgtgggtgtgtgtctgcgccagagaccaaacaccaacctccccccaccctcgacccatccccacctcgccgccgccgccgccgccgcacggtctccttccccgagcctcttgaggttcttccaggagctggtgttggtgcccgcgctgcaggtggggcgcagcccattgaagacattgctaataaggtattgaagatggatggtgggagtgctgagaagattgctggaggtgaagatgaagggactacatctccagtcccagagaaggttcaagtaggccattctccacagtacaaggttgaacgcaagttggggaaaggtggttttgggcaagtatatgttggcagaaggatttctgggggaacagagcgcactggacctgatgcttacgaggttgctttgaaatttgagcaccgaaacagcaagggctgcaattatggccctccatatgagtggcaagtttatagtgctctgaacgggtgttatggtgtaccatgggttcattacaaaggtcgacaaggagattattatgttctggtgatggatattctagggcccagcctttgggatgtctggaattcatttgggcagttgatgacacctaatatggttgcttgcattgctgtagaggcaatttctatacttgagaaacttcatgcaaaagggtttgttcatggagacgttaaacccgagaattttctacttggccagcctggatcccctgacgagaaaaaactttttctgattgatcttgggttagcatctagatggaaggaatcagggtcatctggacaacatgttgaatatgatcagaaaccagatattttcagaggtacaataagatacgctagtgtccatgcacatttaggacgtactggtagcagaagggatgatctggaatcattagcatatacattgatatttcttcttagaggaaggttgccgtggcaaggttatcagggcgagaacaagagttttcttgtttgcaagaagaaaatggctacctctccagatctattatgctgtttttgcccaactccattcaaacttttcctggagactgtgacaaacatgaaatttgatgaagaaccaaattactcaaagcttatttcccttttcgatgaattgattgagccccagcatttgaggcctattagaattgatggtgcattgaaggctggacaaaaacgtggaagattacatgtaaatccagaagaagatgagcaaccgaagaagaaagttcgacttggaagcccagcaaatcagtggatttcagtttataatgctagaaggcccatgaagcagagataccattacaatgtagcagatgccaggcttcatcaacacatagagaaggggactggtttcacatcccaagtatatgaactgtcacccatattccttcataaggattggattatggagcagtgggaaaataactactacatcagtgccatagctggtgcaatgaatgggagttccttggtggtcatgtcaaaaggaactccttacactcagcagtcttacaaagttagtgaatcattcccctacaagtggatcaacaagaaatggaaagaaggttttcatgttacatcaatgacaactgcaggaagccgctggggtgtagttatgtcaaggaactctggatactctgaacaggtagtggagttggattttctttatcctagtgaaggtattcaccgacgatgggagaacggatatagaataacttctacagcagctactggcgatcaagctgctttcatattgagtatacctaaaagaaagttaatggatgagacacaagaaactcttagaacatctgcttttccaagcaaccatgtgaaggagaaatgggccaagaacctttacattgcttcaatatgctatggccggacagtgtcatgaggcttgctcggctgcatccctagttgggaagagcatgttctgatgagtatatattgggaaaaaagcagcaatctttgttgctgctctctattaatctctgtatgtgtaggtaacccgttcaagatgaagcaccttacagtggccagagtaggagctcaagaaagaaccgagaggaaggtggaaagcaatcggccaataagcagacgaggagtatgtgatctggctagtagcgggtacaggcgctaatggcgtcaaatgttttgtatcagcatgttttgcttttgcttcgctcctgaccgctgtgcaaagagtagacagcttgtttctttcggaggcaagtcatctgagaaccatcgtgtatagcgtatgatgtcattgtattttctttagtggaggccaagttccatctttccggaactcccaaaatgctaagttattatgcgaggaaacaagtgtactgataaaatcggtgtatcaattccattattcgacaattctcacctgcattaattaatgcaatgctgcattacttatcaccctgggctttttattt

SEQ ID NO: 74995 - DNA, 2851 bp, Zea Mays
atgcacgttatccatggcgcctcgaggagaccccggcgaatgctggcccttggatccaaccgagctagcatgcatgcgcattcgctgccttccaaacggaggaaggggaaattaacaacgcgattacgcgaagccttcaaaaagccagccccctcctctcccttccaggcaacccaaccacaggccacagcgcagcggtgtgtgtgggtgtgtgtctgcgccagagaccaaacaccaacctccccccaccctcgacccatccccacctcgccgccgccgccgccgccgcacggtctccttccccgagatttgaatgcgttaggaagtgcatggggagaaaggatgccagagttgcgtagtggagtccggcagtctcggttgagggcaaagaaggttgaggatcttgtggttcaagaccctactgacaacttggttgtggcggcacctacggtggcaggaagacgtgttccagtgattaacttggatcctgaccagcctcttgaggttcttccaggagctggtgttggtgcccgcgctgcaggtggggcgcagcccattgaagacattgctaataaggtattgaagatggatggtgggagtgctgagaagattgctggaggtgaagatgaagggactacatctccagtcccagagaaggttcaagtaggccattctccacagtacaaggttgaacgcaagttggggaaaggtggttttgggcaagtatatgttggcagaaggatttctgggggaacagagcgcactggacctgatgcttacgaggttgctttgaaatttgagcaccgaaacagcaagggctgcaattatggccctccatatgagtggcaagtttatagtgctctgaacgggtgttatggtgtaccatgggttcattacaaaggtcgacaaggagattattatgttctggtgatggatattctagggcccagcctttgggatgtctggaattcatttgggcagttgatgacacctaatatggttgcttgcattgctgtagaggcaatttctatacttgagaaacttcatgcaaaagggtttgttcatggagacgttaaacccgagaattttctacttggccagcctggatcccctgacgagaaaaaactttttctgattgatcttgggttagcatctagatggaaggaatcagggtcatctggacaacatgttgaatatgatcagaaaccagatattttcagaggtacaataagatacgctagtgtccatgcacatttaggacgtactggtagcagaagggatgatctggaatcattagcatatacattgatatttcttcttagaggaaggttgccgtggcaaggttatcagggcgagaacaagagttttcttgtttgcaagaagaaaatggctacctctccagatctattatgctgtttttgcccaactccattcaaacttttcctggagactgtgacaaacatgaaatttgatgaagaaccaaattactcaaagcttatttcccttttcgatgaattgattgagccccagcatttgaggcctattagaattgatggtgcattgaaggctggacaaaaacgtggaagattacatgtaaatccagaagaagatgagcaaccgaagaagaaagttcgacttggaagcccagcaaatcagtggatttcagtttataatgctagaaggcccatgaagcagagataccattacaatgtagcagatgccaggcttcatcaacacatagagaaggggactggtttcacatcccaagtatatgaactgtcacccatattccttcataaggattggattatggagcagtgggaaaataactactacatcagtgccatagctggtgcaatgaatgggagttccttggtggtcatgtcaaaaggaactccttacactcagcagtcttacaaagttagtgaatcattcccctacaagtggatcaacaagaaatggaaagaaggttttcatgttacatcaatgacaactgcaggaagccgctggggtgtagttatgtcaaggaactctggatactctgaacaggtagtggagttggattttctttatcctagtgaaggtattcaccgacgatgggagaacggatatagaataacttctacagcagctactggcgatcaagctgctttcatattgagtatacctaaaagaaagttaatggatgagacacaagaaactcttagaacatctgcttttccaagcaaccatgtgaaggagaaatgggccaagaacctttacattgcttcaatatgctatggccggacagtgtcatgaggcttgctcggctgcatccctagttgggaagagcatgttctgatgagtatatattgggaaaaaagcagcaatctttgttgctgctctctattaatctctgtatgtgtaggtaacccgttcaagatgaagcaccttacagtggccagagtaggagctcaagaaagaaccgagaggaaggtggaaagcaatcggccaataagcagacgaggagtatgtgatctggctagtagcgggtacaggcgctaatggcgtcaaatgttttgtatcagcatgttttgcttttgcttcgctcctgaccgctgtgcaaagagtagacagcttgtttctttcggaggcaagtcatctgagaaccatcgtgtatagcgtatgatgtcattgtattttctttagtggaggccaagttccatctttccggaactcccaaaatgctaagttattatgcgaggaaacaagtgtactgataaaatcggtgtatcaattccattattcgacaattctcacctgcattaattaatgcaatgctgcattacttatcaccctgggctttttattt

SEQ ID NO: 74996 - DNA, 1921 bp, Zea Mays
gccatttctcacccttcaccttgattcatcattcacgccagtacgccacgcctccgcgttccacgttccttctcgtctctacgtcaccgtaacctcctccacccatccccgttctcacgcggctcgctcagggctcgagcgtctccccatcggaaccctaatcctctctttccctactcgcggaagccaactccaccggcaggggaagcggaagggaagcacctcggccccggcaagatggtgctcgcacagctgggcgggagcatctcccgcgccctggcgcagatgagcaacgccacggtgatcgatgagaaggtgctcaacgagtgcctcaacgagatctcgcgcgcgctcctacaggccgatgtccagttcaagatggtccgcgacatgcaggctaacatcaagcgcatcgtcaacctcgaggcgcttgccgcaggcaccaacaagcgccgcatcatgcagcaggctgtcttcacggaactctgcaccatgttagatcccgggaagccttctttcactcccaaaaagggcaagccaagcgtagtcatgttcgttggtctgcaaggttctggtaaaactactacttgtacaaaatatgcttattatcatcagaagaaaggattcaaaccagcactggtttgtgctgatacatttagggctggtgcttttgatcagttaaagcaaaatgcaacgaaggccaagattcccttttatggaagctacatggaatctgatccagtgaaaattgctgttgagggtgtggagaggttcaagaaagaaaactgtgatctcatcattgtggacacaagtggaaggcacaaacaagaagcagcactctttgaagaaatgcggcaagtttcggaagcaacaggtcgcagcaacaaaaagtcctgttatattcattggaactggcgagcacattgacgagtttgaagtttttgatgtgaagccatttgttagtcgcctgttaggaatgggagattgggcaggctttatggacaagattcatgaagtcgtacctacggatcaacaacctgagcttctgcagaaactgtctgaaggaagctttactctcaggcttatgtatgagcagttccaaaacattctgaaaatgggtcctattggacaggtcttctctatgttgcctgggtttagcgccgaactaatgccaaaaggacatgagaaggaaagccaggctaagattaagcgctacatgacaatgatggattccatgactgatgcagagcttgacagcacaaatcctaagctgatgactgaatcacggatcattcggattgcacgggggtctggtcgtcctgtcagggatgtcatcgacatgctggaagagtataagcggcttgctaaaatctggggcaagatgaagggtctcaagatcccaaagaaaggggagatgagtgcactgtcccgcaacatgaatgttcagcacatgagcaaggtccttcctccgcagatgcttaaacagattggtggcatgggcggtctgcagtctctgatgaaacagatgggatcgaaggagatgagcggaatgtttggaggcatgggtggcgagcggtaattttacgtcctgtttttggtggatcgtcgctgtgaacttgtgatgctaaattgagagggtttagtgctgcggtctgatcatcgtcagaggtttccatgaagatcagcctgcgccatgttatggaacaggcttgctgtagctccccatgcctgaaatttaatttatatgattatgaacagtacatttgtcctcgaaaaaatgtataagatataatatttgacaaatggaatatgcttatgtagtcttccagtcttgttatgccgttgggttggcaaggatgcgccatgaagcttcgtgccagggcgagcctgtttgaattgtgcgctttgtgttgggtggaag

SEQ ID NO: 74997 - DNA, 1731 bp, Zea Mays
cagtaatccaactcataaacttcaattacttaacctcttacatatattagtatttttttcttgaagacacaagagagctgcgcataattatattataagaaagaaaaaaggatgaaggggcattacaaacaaacaaaccacacacacccagatcagtgtgcctttgtacaaagagaacaccacgaccaaatctcaaactacacttggtacaagccacaagggctgtgaggttctggtaaaactactacttgtacaaaatatgcttattatcatcagaagaaaggattcaaaccagcactggtttgtgctgatacatttagggctggtgcttttgatcagttaaagcaaaatgcaacgaaggccaagattcccttttatggaagctacatggaatctgatccagtgaaaattgctgttgagggtgtggagaggttcaagaaagaaaactgtgatctcatcattgtggacacaagtggaaggcacaaacaagaagcagcactctttgaagaaatgcggcaagtttcggaagcaacaaaaccagacctggtgatttttgtgatggacagtagtattggtcaggctgcatttgatcaagcacaggcatttaaacaaagtgtttctgttggtgctgtgattattacaaaaatggatggtcacgcaaaaggcggtggtgcccttagcgcggtcgcagcaacaaaaagtcctgttatattcattggaactggcgagcacattgacgagtttgaagtttttgatgtgaagccatttgttagtcgcctgttaggaatgggagattgggcaggctttatggacaagattcatgaagtcgtacctacggatcaacaacctgagcttctgcagaaactgtctgaaggaagctttactctcaggcttatgtatgagcagttccaaaacattctgaaaatgggtcctattggacaggtcttctctatgttgcctgggtttagcgccgaactaatgccaaaaggacatgagaaggaaagccaggctaagattaagcgctacatgacaatgatggattccatgactgatgcagagcttgacagcacaaatcctaagctgatgactgaatcacggatcattcggattgcacgggggtctggtcgtcctgtcagggatgtcatcgacatgctggaagagtataagcggcttgctaaaatctggggcaagatgaagggtctcaagatcccaaagaaaggggagatgagtgcactgtcccgcaacatgaatgttcagcacatgagcaaggtccttcctccgcagatgcttaaacagattggtggcatgggcggtctgcagtctctgatgaaacagatgggatcgaaggagatgagcggaatgtttggaggcatgggtggcgagcggtaattttacgtcctgtttttggtggatcgtcgctgtgaacttgtgatgctaaattgagagggtttagtgctgcggtctgatcatcgtcagaggtttccatgaagatcagcctgcgccatgttatggaacaggcttgctgtagctccccatgcctgaaatttaatttatatgattatgaacagtacatttgtcctcgaaaaaatgtataagatataatatttgacaaatggaatatgcttatgtagtcttccagtcttgttatgccgttgggttggcaaggatgcgccatgaagcttcgtgccagggcgagcctgtttgaattgtgcgctttgtgttgggtggaag

SEQ ID NO: 74998 - DNA, 1233 bp, Zea Mays
tgtatatgcaatatggtaaaattcacaaaaataaagaaaccagacctggtgatttttgtgatggacagtagtattggtcaggctgcatttgatcaagcacaggcatttaaacaaagtgtttctgttggtgctgtgattattacaaaaatggatggtcacgcaaaaggcggtggtgcccttagcgcggtcgcagcaacaaaaagtcctgttatattcattggaactggcgagcacattgacgagtttgaagtttttgatgtgaagccatttgttagtcgcctgttaggaatgggagattgggcaggctttatggacaagattcatgaagtcgtacctacggatcaacaacctgagcttctgcagaaactgtctgaaggaagctttactctcaggcttatgtatgagcagttccaaaacattctgaaaatgggtcctattggacaggtcttctctatgttgcctgggtttagcgccgaactaatgccaaaaggacatgagaaggaaagccaggctaagattaagcgctacatgacaatgatggattccatgactgatgcagagcttgacagcacaaatcctaagctgatgactgaatcacggatcattcggattgcacgggggtctggtcgtcctgtcagggatgtcatcgacatgctggaagagtataagcggcttgctaaaatctggggcaagatgaagggtctcaagatcccaaagaaaggggagatgagtgcactgtcccgcaacatgaatgttcagcacatgagcaaggtccttcctccgcagatgcttaaacagattggtggcatgggcggtctgcagtctctgatgaaacagatgggatcgaaggagatgagcggaatgtttggaggcatgggtggcgagcggtaattttacgtcctgtttttggtggatcgtcgctgtgaacttgtgatgctaaattgagagggtttagtgctgcggtctgatcatcgtcagaggtttccatgaagatcagcctgcgccatgttatggaacaggcttgctgtagctccccatgcctgaaatttaatttatatgattatgaacagtacatttgtcctcgaaaaaatgtataagatataatatttgacaaatggaatatgcttatgtagtcttccagtcttgttatgccgttgggttggcaaggatgcgccatgaagcttcgtgccagggcgagcctgtttgaattgtgcgctttgtgttgggtggaag

SEQ ID NO: 74999 - DNA, 1267 bp, Zea Mays
attccttaagggcagcgcatggttaggcaccaaatccccagcgcatccttaagagaatgggatttggaagaaaccagacctggtgatttttgtgatggacagtagtattggtcaggctgcatttgatcaagcacaggcatttaaacaaagtgtttctgttggtgctgtgattattacaaaaatggatggtcacgcaaaaggcggtggtgcccttagcgcggtcgcagcaacaaaaagtcctgttatattcattggaactggcgagcacattgacgagtttgaagtttttgatgtgaagccatttgttagtcgcctgttaggaatgggagattgggcaggctttatggacaagattcatgaagtcgtacctacggatcaacaacctgagcttctgcagaaactgtctgaaggaagctttactctcaggcttatgtatgagcagttccaaaacattctgaaaatgggtcctattggacaggtcttctctatgttgcctgggtttagcgccgaactaatgccaaaaggacatgagaaggaaagccaggctaagattaagcgctacatgacaatgatggattccatgactgatgcagagcttgacagcacaaatcctaagctgatgactgaatcacggatcattcggattgcacgggggtctggtcgtcctgtcagggatgtcatcgacatgctggaagagtataagcggcttgctaaaatctggggcaagatgaagggtctcaagatcccaaagaaaggggagatgagtgcactgtcccgcaacatgaatgttcagcacatgagcaaggtccttcctccgcagatgcttaaacagattggtggcatgggcggtctgcagtctctgatgaaacagatgggatcgaaggagatgagcggaatgtttggaggcatgggtggcgagcggtaattttacgtcctgtttttggtggatcgtcgctgtgaacttgtgatgctaaattgagagggtttagtgctgcggtctgatcatcgtcagaggtttccatgaagatcagcctgcgccatgttatggaacaggcttgctgtagctccccatgcctgaaatttaatttatatgattatgaacagtacatttgtcctcgaaaaaatgtataagatataatatttgacaaatggaatatgcttatgtagtcttccagtcttgttatgccgttgggttggcaaggatgcgccatgaagcttcgtgccagggcgagcctgtttgaattgtgcgctttgtgttgggtggaag

SEQ ID NO: 75000 - DNA, 2495 bp, Zea Mays
cccaagagtccagactccccaatgctccgccaccaaactagcgtccaccgacggaaggaacacggcaggcaatcctgcactgcaacaacgacaccacctcgaggcctccaccgaaaagaccatctcggcccccgccgagaataactacaaaacaaagcatcttgcaaagattttgatccatttggtttgttgcttgcaagagtgcacctcaacaacttctgtatcttctgtcgtatatcagagggcaatcaacgcggcatacatatcatccatatttctcaagttcatcattgaaaatgcaaaaactgacagttggcaagagctatgccttgacattgacaggagtgagaaggggttggaaaaaattccagcagaaaacacggtggagtattttctgatgagaggtgtgctggactatattggtagtgtggatgtaagtccggagttatgctacctacatcatgaactcctgaacttgatgctagttcttatgtcaactcagttgtgttctggaccatctccagagccaaaggatgtgcatcctttcattgatgcagctatgcttcaggacagctccatcgtggcttcagtggtgcaaaaattgttgctcaattttgttacacgtccaaaaattcctctaaatgcttcgcaccctgttttctctgatgatggtaggcctggtgttctccaacgagttggctcagcagctgcaaactttgtcttgttgccatattactacctcgtaagctcaactcctgagggtgcgacaagtcaattggcagataacagtttacttgttcttcttatcatgatccactaccgaaagtgcatttcaactaatgagtccattccaaccaacaatgtatacacgatggactcaaataccaatgacaaggatgctccagtttttcatgataacccttactgcaaggcattaaacagtgctaaggacatacaatatgatcgtgctgatgttgaaggaaatgctcaagatcgacctgttgtcaggttgtcttttgcatcgttgtttgatgcttttggaaggtgcttaaatgatgagagctcggttctgttgctctattctttggtctatgggaactgcgactttcaggaatatgtcctggttagaacagacttggacactttgctgatgcctatcttggaaatgctctacaatgcatcaaggaagacttcaaatcagatttacatgctgttgattattctccttatcctcagtcaagattcaaccttcaatgctagtgtgcaccaattggtgcttcctgcagttccttggtaccatgagcgcctgatgcatcaaacgtcactgggatctttgatggttgtaatactaattcggaccattaagtacaacctctccaagctaaaggatgtctaccttcacacaaactgtcttgctattttagcaaacatggctcctcatgtgcataggctgagtgcttatgcatcacaaaggctagttagtctcttcgacatgctttctcgcaagtatgccaaactagctgagctaaaaaacgacaagtctctgaaagttatatatgatcagatggaagcagacatagcagatgatatgtctatagagcttcacatatatacagatttcttaagaattgttctggagataattattgccatccttacatatgcattgcccagaaatcctgaggttgtgtatgctgtattgcatcgacaagaggtgtttgagccatttaaaaaccatccacgtttcagtgaactgcttgagaacatatacacagtattggatttcttcaatagccgaatggacatgcaacaattagatggggaatggtctgtggataaggtgcttgaagtcatcaacaaaacttgccgttcatggcgtggagaagggatgaagatgtttacccagttacggtttacatatgagcaagaaagccaccctgaggagttcttcatcccatatgcatggcgccttgtcctatcacggggattctccttcaatcccgatgccataaatctcttccctgtggagattcaccttgaagaggcaccggccggtggacaaaaggtttaatatgaatggtccgaaccagagttctgacaagaacataaaggcatatttttgtttcattgtggcaaagagcacgatgtaaataggccgcatataccatataccaggtagtcaaatgtacacattcttttgtattaaatcattatatgtgtaagacgaaagggggtggacggattgcgcaagggtgcagagattgtgctagttataggggggagattactatgtagggtatatgcaattctttcgtaagttatcgttgtattgtacccttagttcaaaaggcttgtaaccacttatttattgaaaagttgtagagtctgcgatctaagggcatgtacagtggagagacaccaaaacggttctccaagcacaggagacaactaagagactctattgtacaatggagtgtctataaacgtagtctatt

SEQ ID NO: 75001 - DNA, 2404 bp, Zea Mays
tgctccgccaccaaactagcgtccaccgacggaaggaacacggcaggcaatcctgcactgcaacaacgacaccacctcgaggcctccaccgaaaagaccatctcggcccccgccgagaataactacaaaacaaagcatcttgcaaagattttgatccatttggtttgttgcttgcaagagtgcacctcaacaacttctgtatcttctgtcgtatatcagagggcaatcaacgcggcatacatatcatccatatttctcaagttcatcattgaaaatgcaaaaactgacagttggcaagagctatgccttgacattgacaggagtgagaaggggttggaaaaaattccagcagaaaacacggtggagtattttctgatgagaggtgtgctggactatattggtagtgtggatgtaagttgtgttctggaccatctccagagccaaaggatgtgcatcctttcattgatgcagctatgcttcagctccatcgtggcttcagtggtgcaaaaattgttgctcaattttgttacacgtccaaaaattcctctaaatgcttcgcaccctgttttctctgatgatggtaggcctggtgttctccaacgagttggctcagcagctgcaaactttgtcttgttgccatattactacctcgtaagctcaactcctgagggtgcgacaagtcaattggcagataacagtttacttgttcttcttatcatgatccactaccgaaagtgcatttcaactaatgagtccattccaaccaacaatgtatacacgatggactcaaataccaatgacaaggatgctccagtttttcatgataacccttactgcaaggcattaaacagtgctaaggacatacaatatgatcgtgctgatgttgaaggaaatgctcaagatcgacctgttgtcaggttgtcttttgcatcgttgtttgatgcttttggaaggtgcttaaatgatgagagctcggttctgttgctctattctttggtctatgggaactgcgactttcaggaatatgtcctggttagaacagacttggacactttgctgatgcctatcttggaaatgctctacaatgcatcaaggaagacttcaaatcagatttacatgctgttgattattctccttatcctcagtcaagattcaaccttcaatgctagtgtgcaccaattggtgcttcctgcagttccttggtaccatgagcgcctgatgcatcaaacgtcactgggatctttgatggttgtaatactaattcggaccattaagtacaacctctccaagctaaaggatgtctaccttcacacaaactgtcttgctattttagcaaacatggctcctcatgtgcataggctgagtgcttatgcatcacaaaggctagttagtctcttcgacatgctttctcgcaagtatgccaaactagctgagctaaaaaacgacaagtctctgaaagttatatatgatcagatggaagcagacatagcagatgatatgtctatagagcttcacatatatacagatttcttaagaattgttctggagataattattgccatccttacatatgcattgcccagaaatcctgaggttgtgtatgctgtattgcatcgacaagaggtgtttgagccatttaaaaaccatccacgtttcagtgaactgcttgagaacatatacacagtattggatttcttcaatagccgaatggacatgcaacaattagatggggaatggtctgtggataaggtgcttgaagtcatcaacaaaacttgccgttcatggcgtggagaagggatgaagatgtttacccagttacggtttacatatgagcaagaaagccaccctgaggagttcttcatcccatatgcatggcgccttgtcctatcacggggattctccttcaatcccgatgccataaatctcttccctgtggagattcaccttgaagaggcaccggccggtggacaaaaggtttaatatgaatggtccgaaccagagttctgacaagaacataaaggcatatttttgtttcattgtggcaaagagcacgatgtaaataggccgcatataccatataccaggtagtcaaatgtacacattcttttgtattaaatcattatatgtgtaagacgaaagggggtggacggattgcgcaagggtgcagagattgtgctagttataggggggagattactatgtagggtatatgcaattctttcgtaagttatcgttgtattgtacccttagttcaaaaggcttgtaaccacttatttattgaaaagttgtagagtctgcgatctaagggcatgtacagtggagagacaccaaaacggttctccaagcacaggagacaactaagagactctattgtacaatggagtgtctataaacgtagtctatt

SEQ ID NO: 75002 - DNA, 3534 bp, Zea Mays
ctacaacctccccagaggcgcccctggattctggacccggaactggctagtttcgccatttcgtagtccgatcaaaacctccccaaacccaacgcaccggctagtcgctccgctcgcacgtcgcgcccgacgccccgacctcggctgctcgtccagtcgtccttcgtttcccttcccttcccttcccttccgccagaagtctccacgctccctttctcccgtttaaaaccttcgcttggtctcgactctacttggccggccatttcttcgtctcgcccaatcctcgctcacctcaaatcctagggccccgcttctcctactcgggaggctcagatccaatgggcgcggcgccgtcgacgccgacgttggacgtggcaccgttgacgccgaggttgggcgcggcaggcgcgccaccgtcgcccagcgcggcggagcagatgttcgcggcgctggtcggcgaaaaggcctacccaatctcctccgagttctggaaccagctgctcgagctgcccctcaccctgcagtggccgcgcgaccgcgtgctgcaggcgtgccacgcctttgccgagaataactacaaaacaaagcatcttgcaaagattttgatccatttggtttgttgcttgcaagagtgcacctcaacaacttctgtatcttctgtcgtatatcagagggcaatcaacgcggcatacatatcatccatatttctcaagttcatcattgaaaatgcaaaaactgacagttggcaagagctatgccttgacattgacaggagtgagaaggggttggaaaaaattccagcagaaaacacggtggagtattttctgatgagaggtgtgctggactatattggtagtgtggatgtaagtccggagttatgctacctacatcatgaactcctgaacttgatgctagttcttatgtcaactcagttgtgttctggaccatctccagagccaaaggatgtgcatcctttcattgatgcagctatgcttcaggacagctccatcgtggcttcagtggtgcaaaaattgttgctcaattttgttacacgtccaaaaattcctctaaatgcttcgcaccctgttttctctgatgatggtaggcctggtgttctccaacgagttggctcagcagctgcaaactttgtcttgttgccatattactacctcgtaagctcaactcctgagggtgcgacaagtcaattggcagataacagtttacttgttcttcttatcatgatccactaccgaaagtgcatttcaactaatgagtccattccaaccaacaatgtatacacgatggactcaaataccaatgacaaggatgctccagtttttcatgataacccttactgcaaggcattaaacagtgctaaggacatacaatatgatcgtgctgatgttgaaggaaatgctcaagatcgacctgttgtcaggttgtcttttgcatcgttgtttgatgcttttggaaggtgcttaaatgatgagagctcggttctgttgctctattctttggtctatgggaactgcgactttcaggaatatgtcctggttagaacagacttggacactttgctgatgcctatcttggaaatgctctacaatgcatcaaggaagacttcaaatcagatttacatgctgttgattattctccttatcctcagtcaagattcaaccttcaatgctagtgtgcaccaattggtaagccaactagttaatttcttaatttgtttatttgtaaaactgttaataatataacgtgcaactccaggtgcttcctgcagttccttggtaccatgagcgcctgatgcatcaaacgtcactgggatctttgatggttgtaatactaattcggaccattaagtacaacctctccaagctaaaggatgtctaccttcacacaaactgtcttgctattttagcaaacatggctcctcatgtgcataggctgagtgcttatgcatcacaaaggctagttagtctcttcgacatgctttctcgcaagtatgccaaactagctgagctaaaaaacgacaagtctctgaaagttatatatgatcagatggaagcagacatagcagatgatatgtctatagagcttcacatatatacagatttcttaagaattgttctggagataattattgccatccttacatatgcattgcccagaaatcctgaggttgtgtatgctgtattgcatcgacaagaggtgtttgagccatttaaaaaccatccacgtttcagtgaactgcttgagaacatatacacagtattggatttcttcaatagccgaatggacatgcaacaattagatggggaatggtctgtggataaggtgcttgaagtcatcaacaaaacttgccgttcatggcgtggagaagggatgaagatgtttacccagttacggtttacatatgagcaagaaagccaccctgaggagttcttcatcccatatgcatggcgccttgtcctatcacgggggtaatcatttgctgttatatagatgattcacagttttttactccctccgtttataaatatgacactgttgacttttttaaaaactttgatcattcgtcttattcaaaaaaataatgagttatcatttattttttttgtgatttgttttatcacttaaggtagtttatgcttgccttaaaattttacattttttaatatttttttccaaaaaaatcagcggtgtcatatatttatgaacagaggtagtagatagatctttagcaagccttctttaatttttccccggtggtaccaccccacacttgggcaagtggaaatactcctttgccaatgtagagatatcttgatgttatatatatgtattgcatcttaccttacaaggatctcataagcttttcacatgtaaattaggcacggtaatggccaactcaattagacacttaagagcagtgatttttcatgcccacacgtcacgctctatttccaaattcaactcgctctgatttgtcatgactattttgtgtattcacaactcacagattctccttcaatcccgatgccataaatctcttccctgtggagattcaccttgaagaggcaccggccggtggacaaaaggtttaatatgaatggtccgaaccagagttctgacaagaacataaaggcatatttttgtttcattgtggcaaagagcacgatgtaaataggccgcatataccatataccaggtagtcaaatgtacacattcttttgtattaaatcattatatgtgtaagacgaaagggggtggacggattgcgcaagggtgcagagattgtgctagttataggggggagattactatgtagggtatatgcaattctttcgtaagttatcgttgtattgtacccttagttcaaaaggcttgtaaccacttatttattgaaaagttgtagagtctgcgatctaagggcatgtacagtggagagacaccaaaacggttctccaagcacaggagacaactaagagactctattgtacaatggagtgtctataaacgtagtctatt

SEQ ID NO: 75003 - DNA, 2778 bp, Zea Mays
gtagtccgatcaaaacctccccaaacccaacgcaccggctagtcgctccgctcgcacgtcgcgcccgacgccccgacctcggctgctcgtccagtcgtccttcgtttcccttcccttcccttcccttccgccagaagtctccacgctccctttctcccgtttaaaaccttcgcttggtctcgactctacttggccggccatttcttcgtctcgcccaatcctcgctcacctcaaatcctagggccccgcttctcctactcgggaggctcagatccaatgggcgcggcgccgtcgacgccgacgttggacgtggcaccgttgacgccgaggttgggcgcggcaggcgcgccaccgtcgcccagcgcggcggagcagatgttcgcggcgctggtcggcgaaaaggcctacccaatctcctccgagttctggaaccagctgctcgagctgcccctcaccctgcagtggccgcgcgaccgcgtgctgcaggcgtgccacgcctttgccgagaataactacaaaacaaagcatcttgcaaagattttgatccatttggtttgttgcttgcaagagtgcacctcaacaacttctgtatcttctgtcgtatatcagagggcaatcaacgcggcatacatatcatccatatttctcaagttcatcattgaaaatgcaaaaactgacagttggcaagagctatgccttgacattgacaggagtgagaaggggttggaaaaaattccagcagaaaacacggtggagtattttctgatgagaggtgtgctggactatattggtagtgtggatgtaagtccggagttatgctacctacatcatgaactcctgaacttgatgctagttcttatgtcaactcagttgtgttctggaccatctccagagccaaaggatgtgcatcctttcattgatgcagctatgcttcaggacagctccatcgtggcttcagtggtgcaaaaattgttgctcaattttgttacacgtccaaaaattcctctaaatgcttcgcaccctgttttctctgatgatggtaggcctggtgttctccaacgagttggctcagcagctgcaaactttgtcttgttgccatattactacctcgtaagctcaactcctgagggtgcgacaagtcaattggcagataacagtttacttgttcttcttatcatgatccactaccgaaagtgcatttcaactaatgagtccattccaaccaacaatgtatacacgatggactcaaataccaatgacaaggatgctccagtttttcatgataacccttactgcaaggcattaaacagtgctaaggacatacaatatgatcgtgctgatgttgaaggaaatgctcaagatcgacctgttgtcaggttgtcttttgcatcgttgtttgatgcttttggaaggtgcttaaatgatgagagctcggttctgttgctctattctttggtctatgggaactgcgactttcaggaatatgtcctggttagaacagacttggacactttgctgatgcctatcttggaaatgctctacaatgcatcaaggaagacttcaaatcagatttacatgctgttgattattctccttatcctcagtcaagattcaaccttcaatgctagtgtgcaccaattggtgcttcctgcagttccttggtaccatgagcgcctgatgcatcaaacgtcactgggatctttgatggttgtaatactaattcggaccattaagtacaacctctccaagctaaaggatgtctaccttcacacaaactgtcttgctattttagcaaacatggctcctcatgtgcataggctgagtgcttatgcatcacaaaggctagttagtctcttcgacatgctttctcgcaatctatagagcttcacatatatacagatttcttaagaattgttctggagataattattgccatccttacatatgcattgcccagaaatcctgaggttgtgtatgctgtattgcatcgacaagaggtgtttgagccatttaaaaaccatccacgtttcagtgaactgcttgagaacatatacacagtattggatttcttcaatagccgaatggacatgcaacaattagatggggaatggtctgtggataaggtgcttgaagtcatcaacaaaacttgccgttcatggcgtggagaagggatgaagatgtttacccagttacggtttacatatgagcaagaaagccaccctgaggagttcttcatcccatatgcatggcgccttgtcctatcacggggattctccttcaatcccgatgccataaatctcttccctgtggagattcaccttgaagaggcaccggccggtggacaaaaggtttaatatgaatggtccgaaccagagttctgacaagaacataaaggcatatttttgtttcattgtggcaaagagcacgatgtaaataggccgcatataccatataccaggtagtcaaatgtacacattcttttgtattaaatcattatatgtgtaagacgaaagggggtggacggattgcgcaagggtgcagagattgtgctagttataggggggagattactatgtagggtatatgcaattctttcgtaagttatcgttgtattgtacccttagttcaaaaggcttgtaaccacttatttattgaaaagttgtagagtctgcgatctaagggcatgtacagtggagagacaccaaaacggttctccaagcacaggagacaactaagagactctattgtacaatggagtgtctataaacgtagtctatt

SEQ ID NO: 75004 - DNA, 2858 bp, Zea Mays
gtagtccgatcaaaacctccccaaacccaacgcaccggctagtcgctccgctcgcacgtcgcgcccgacgccccgacctcggctgctcgtccagtcgtccttcgtttcccttcccttcccttcccttccgccagaagtctccacgctccctttctcccgtttaaaaccttcgcttggtctcgactctacttggccggccatttcttcgtctcgcccaatcctcgctcacctcaaatcctagggccccgcttctcctactcgggaggctcagatccaatgggcgcggcgccgtcgacgccgacgttggacgtggcaccgttgacgccgaggttgggcgcggcaggcgcgccaccgtcgcccagcgcggcggagcagatgttcgcggcgctggtcggcgaaaaggcctacccaatctcctccgagttctggaaccagctgctcgagctgcccctcaccctgcagtggccgcgcgaccgcgtgctgcaggcgtgccacgcctttgccgagaataactacaaaacaaagcatcttgcaaagattttgatccatttggtttgttgcttgcaagagtgcacctcaacaacttctgtatcttctgtcgtatatcagagggcaatcaacgcggcatacatatcatccatatttctcaagttcatcattgaaaatgcaaaaactgacagttggcaagagctatgccttgacattgacaggagtgagaaggggttggaaaaaattccagcagaaaacacggtggagtattttctgatgagaggtgtgctggactatattggtagtgtggattccggagttatgctacctacatcatgaactcctgaacttgatgctagttcttatgtcaactcagttgtgttctggaccatctccagagccaaaggatgtgcatcctttcattgatgcagctatgcttcaggacagctccatcgtggcttcagtggtgcaaaaattgttgctcaattttgttacacgtccaaaaattcctctaaatgcttcgcaccctgttttctctgatgatggtaggcctggtgttctccaacgagttggctcagcagctgcaaactttgtcttgttgccatattactacctcgtaagctcaactcctgagggtgcgacaagtcaattggcagataacagtttacttgttcttcttatcatgatccactaccgaaagtgcatttcaactaatgagtccattccaaccaacaatgtatacacgatggactcaaataccaatgacaaggatgctccagtttttcatgataacccttactgcaaggcattaaacagtgctaaggacatacaatatgatcgtgctgatgttgaaggaaatgctcaagatcgacctgttgtcaggttgtcttttgcatcgttgtttgatgcttttggaaggtgcttaaatgatgagagctcggttctgttgctctattctttggtctatgggaactgcgactttcaggaatatgtcctggttagaacagacttggacactttgctgatgcctatcttggaaatgctctacaatgcatcaaggaagacttcaaatcagatttacatgctgttgattattctccttatcctcagtcaagattcaaccttcaatgctagtgtgcaccaattggtgcttcctgcagttccttggtaccatgagcgcctgatgcatcaaacgtcactgggatctttgatggttgtaatactaattcggaccattaagtacaacctctccaagctaaaggatgtctaccttcacacaaactgtcttgctattttagcaaacatggctcctcatgtgcataggctgagtgcttatgcatcacaaaggctagttagtctcttcgacatgctttctcgcaagtatgccaaactagctgagctaaaaaacgacaagtctctgaaagttatatatgatcagatggaagcagacatagcagatgatatgtctatagagcttcacatatatacagatttcttaagaattgttctggagataattattgccatccttacatatgcattgcccagaaatcctgaggttgtgtatgctgtattgcatcgacaagaggtgtttgagccatttaaaaaccatccacgtttcagtgaactgcttgagaacatatacacagtattggatttcttcaatagccgaatggacatgcaacaattagatggggaatggtctgtggataaggtgcttgaagtcatcaacaaaacttgccgttcatggcgtggagaagggatgaagatgtttacccagttacggtttacatatgagcaagaaagccaccctgaggagttcttcatcccatatgcatggcgccttgtcctatcacggggattctccttcaatcccgatgccataaatctcttccctgtggagattcaccttgaagaggcaccggccggtggacaaaaggtttaatatgaatggtccgaaccagagttctgacaagaacataaaggcatatttttgtttcattgtggcaaagagcacgatgtaaataggccgcatataccatataccaggtagtcaaatgtacacattcttttgtattaaatcattatatgtgtaagacgaaagggggtggacggattgcgcaagggtgcagagattgtgctagttataggggggagattactatgtagggtatatgcaattctttcgtaagttatcgttgtattgtacccttagttcaaaaggcttgtaaccacttatttattgaaaagttgtagagtctgcgatctaagggcatgtacagtggagagacaccaaaacggttctccaagcacaggagacaactaagagactctattgtacaatggagtgtctataaacgtagtctatt

SEQ ID NO: 75005 - DNA, 2858 bp, Zea Mays
gtagtccgatcaaaacctccccaaacccaacgcaccggctagtcgctccgctcgcacgtcgcgcccgacgccccgacctcggctgctcgtccagtcgtccttcgtttcccttcccttcccttcccttccgccagaagtctccacgctccctttctcccgtttaaaaccttcgcttggtctcgactctacttggccggccatttcttcgtctcgcccaatcctcgctcacctcaaatcctagggccccgcttctcctactcgggaggctcagatccaatgggcgcggcgccgtcgacgccgacgttggacgtggcaccgttgacgccgaggttgggcgcggcaggcgcgccaccgtcgcccagcgcggcggagcagatgttcgcggcgctggtcggcgaaaaggcctacccaatctcctccgagttctggaaccagctgctcgagctgcccctcaccctgcagtggccgcgcgaccgcgtgctgcaggcgtgccacgcctttgccgagaataactacaaaacaaagcatcttgcaaagattttgatccatttggtttgttgcttgcaagagtgcacctcaacaacttctgtatcttctgtcgtatatcagagggcaatcaacgcggcatacatatcatccatatttctcaagttcatcattgaaaatgcaaaaactgacagttggcaagagctatgccttgacattgacaggagtgagaaggggttggaaaaaattccagcagaaaacacggtggagtattttctgatgagaggtgtgctggactatattggtagtgtggatgtaagtccggagttatgctacctacatcatgaactcctgaacttgatgctagttcttatgtcaactcagttgtgttctggaccatctccagagccaaaggatgtgcatcctttcattgatgcagctatgcttcagctccatcgtggcttcagtggtgcaaaaattgttgctcaattttgttacacgtccaaaaattcctctaaatgcttcgcaccctgttttctctgatgatggtaggcctggtgttctccaacgagttggctcagcagctgcaaactttgtcttgttgccatattactacctcgtaagctcaactcctgagggtgcgacaagtcaattggcagataacagtttacttgttcttcttatcatgatccactaccgaaagtgcatttcaactaatgagtccattccaaccaacaatgtatacacgatggactcaaataccaatgacaaggatgctccagtttttcatgataacccttactgcaaggcattaaacagtgctaaggacatacaatatgatcgtgctgatgttgaaggaaatgctcaagatcgacctgttgtcaggttgtcttttgcatcgttgtttgatgcttttggaaggtgcttaaatgatgagagctcggttctgttgctctattctttggtctatgggaactgcgactttcaggaatatgtcctggttagaacagacttggacactttgctgatgcctatcttggaaatgctctacaatgcatcaaggaagacttcaaatcagatttacatgctgttgattattctccttatcctcagtcaagattcaaccttcaatgctagtgtgcaccaattggtgcttcctgcagttccttggtaccatgagcgcctgatgcatcaaacgtcactgggatctttgatggttgtaatactaattcggaccattaagtacaacctctccaagctaaaggatgtctaccttcacacaaactgtcttgctattttagcaaacatggctcctcatgtgcataggctgagtgcttatgcatcacaaaggctagttagtctcttcgacatgctttctcgcaagtatgccaaactagctgagctaaaaaacgacaagtctctgaaagttatatatgatcagatggaagcagacatagcagatgatatgtctatagagcttcacatatatacagatttcttaagaattgttctggagataattattgccatccttacatatgcattgcccagaaatcctgaggttgtgtatgctgtattgcatcgacaagaggtgtttgagccatttaaaaaccatccacgtttcagtgaactgcttgagaacatatacacagtattggatttcttcaatagccgaatggacatgcaacaattagatggggaatggtctgtggataaggtgcttgaagtcatcaacaaaacttgccgttcatggcgtggagaagggatgaagatgtttacccagttacggtttacatatgagcaagaaagccaccctgaggagttcttcatcccatatgcatggcgccttgtcctatcacggggattctccttcaatcccgatgccataaatctcttccctgtggagattcaccttgaagaggcaccggccggtggacaaaaggtttaatatgaatggtccgaaccagagttctgacaagaacataaaggcatatttttgtttcattgtggcaaagagcacgatgtaaataggccgcatataccatataccaggtagtcaaatgtacacattcttttgtattaaatcattatatgtgtaagacgaaagggggtggacggattgcgcaagggtgcagagattgtgctagttataggggggagattactatgtagggtatatgcaattctttcgtaagttatcgttgtattgtacccttagttcaaaaggcttgtaaccacttatttattgaaaagttgtagagtctgcgatctaagggcatgtacagtggagagacaccaaaacggttctccaagcacaggagacaactaagagactctattgtacaatggagtgtctataaacgtagtctatt

SEQ ID NO: 75006 - DNA, 2841 bp, Zea Mays
gtagtccgatcaaaacctccccaaacccaacgcaccggctagtcgctccgctcgcacgtcgcgcccgacgccccgacctcggctgctcgtccagtcgtccttcgtttcccttcccttcccttcccttccgccagaagtctccacgctccctttctcccgtttaaaaccttcgcttggtctcgactctacttggccggccatttcttcgtctcgcccaatcctcgctcacctcaaatcctagggccccgcttctcctactcgggaggctcagatccaatgggcgcggcgccgtcgacgccgacgttggacgtggcaccgttgacgccgaggttgggcgcggcaggcgcgccaccgtcgcccagcgcggcggagcagatgttcgcggcgctggtcggcgaaaaggcctacccaatctcctccgagttctggaaccagctgctcgagctgcccctcaccctgcagtggccgcgcgaccgcgtgctgcaggcgtgccacgcctttgccgagaataactacaaaacaaagcatcttgcaaagattttgatccatttggtttgttgcttgcaagagtgcacctcaacaacttctgtatcttctgtcgtatatcagagggcaatcaacgcggcatacatatcatccatatttctcaagttcatcattgaaaatgcaaaaactgacagttggcaagagctatgccttgacattgacaggagtgagaaggggttggaaaaaattccagcagaaaacacggtggagtattttctgatgagaggtgtgctggactatattggtagtgtggatgtaagtccggagttatgctacctacatcatgaactcctgaacttgatgctagttcttatgtcaactcagttgtgttctggaccatctccagagccaaaggatgtgcatcctttcattgatgcagctatgcttcagtggtgcaaaaattgttgctcaattttgttacacgtccaaaaattcctctaaatgcttcgcaccctgttttctctgatgatggtaggcctggtgttctccaacgagttggctcagcagctgcaaactttgtcttgttgccatattactacctcgtaagctcaactcctgagggtgcgacaagtcaattggcagataacagtttacttgttcttcttatcatgatccactaccgaaagtgcatttcaactaatgagtccattccaaccaacaatgtatacacgatggactcaaataccaatgacaaggatgctccagtttttcatgataacccttactgcaaggcattaaacagtgctaaggacatacaatatgatcgtgctgatgttgaaggaaatgctcaagatcgacctgttgtcaggttgtcttttgcatcgttgtttgatgcttttggaaggtgcttaaatgatgagagctcggttctgttgctctattctttggtctatgggaactgcgactttcaggaatatgtcctggttagaacagacttggacactttgctgatgcctatcttggaaatgctctacaatgcatcaaggaagacttcaaatcagatttacatgctgttgattattctccttatcctcagtcaagattcaaccttcaatgctagtgtgcaccaattggtgcttcctgcagttccttggtaccatgagcgcctgatgcatcaaacgtcactgggatctttgatggttgtaatactaattcggaccattaagtacaacctctccaagctaaaggatgtctaccttcacacaaactgtcttgctattttagcaaacatggctcctcatgtgcataggctgagtgcttatgcatcacaaaggctagttagtctcttcgacatgctttctcgcaagtatgccaaactagctgagctaaaaaacgacaagtctctgaaagttatatatgatcagatggaagcagacatagcagatgatatgtctatagagcttcacatatatacagatttcttaagaattgttctggagataattattgccatccttacatatgcattgcccagaaatcctgaggttgtgtatgctgtattgcatcgacaagaggtgtttgagccatttaaaaaccatccacgtttcagtgaactgcttgagaacatatacacagtattggatttcttcaatagccgaatggacatgcaacaattagatggggaatggtctgtggataaggtgcttgaagtcatcaacaaaacttgccgttcatggcgtggagaagggatgaagatgtttacccagttacggtttacatatgagcaagaaagccaccctgaggagttcttcatcccatatgcatggcgccttgtcctatcacggggattctccttcaatcccgatgccataaatctcttccctgtggagattcaccttgaagaggcaccggccggtggacaaaaggtttaatatgaatggtccgaaccagagttctgacaagaacataaaggcatatttttgtttcattgtggcaaagagcacgatgtaaataggccgcatataccatataccaggtagtcaaatgtacacattcttttgtattaaatcattatatgtgtaagacgaaagggggtggacggattgcgcaagggtgcagagattgtgctagttataggggggagattactatgtagggtatatgcaattctttcgtaagttatcgttgtattgtacccttagttcaaaaggcttgtaaccacttatttattgaaaagttgtagagtctgcgatctaagggcatgtacagtggagagacaccaaaacggttctccaagcacaggagacaactaagagactctattgtacaatggagtgtctataaacgtagtctatt

SEQ ID NO: 75007 - DNA, 2745 bp, Zea Mays
gtagtccgatcaaaacctccccaaacccaacgcaccggctagtcgctccgctcgcacgtcgcgcccgacgccccgacctcggctgctcgtccagtcgtccttcgtttcccttcccttcccttcccttccgccagaagtctccacgctccctttctcccgtttaaaaccttcgcttggtctcgactctacttggccggccatttcttcgtctcgcccaatcctcgctcacctcaaatcctagggccccgcttctcctactcgggaggctcagatccaatgggcgcggcgccgtcgacgccgacgttggacgtggcaccgttgacgccgaggttgggcgcggcaggcgcgccaccgtcgcccagcgcggcggagcagatgttcgcggcgctggtcggcgaaaaggcctacccaatctcctccgagttctggaaccagctgctcgagctgcccctcaccctgcagtggccgcgcgaccgcgtgctgcaggcgtgccacgcctttgccgagaataactacaaaacaaagcatcttgcaaagattttgatccatttggtttgttgcttgcaagagtgcacctcaacaacttctgtatcttctgtcgtatatcagagggcaatcaacgcggcatacatatcatccatatttctcaagttcatcattgaaaatgcaaaaactgacagttggcaagagctatgccttgacattgacaggagtgagaaggggttggaaaaaattccagcagaaaacacggtggagtattttctgatgagaggtgtgctggactatattggtagtgtggatgtaagtccggagttatgctacctacatcatgaactcctgaacttgatgctagttcttatgtcaactcagttgtgttctggaccatctccagagccaaaggatgtgcatcctttcattgatgcagctatgcttcaggacagctccatcgtggcttcagtggtgcaaaaattgttgctcaattttgttacacgtccaaaaattcctctaaatgcttcgcaccctgttttctctgatgatggtaggcctggtgttctccaacgagttggctcagcagctgcaaactttgtcttgttgccatattactacctcgtaagctcaactcctgagggtgcgacaagtcaattggcagataacagtttacttgttcttcttatcatgatccactaccgaaagtgcatttcaactaatgagtccattccaaccaacaatgtatacacgatggactcaaataccaatgacaaggatgctccagtttttcatgataacccttactgcaaggcattaaacagtgctaaggacatacaatatgatcgtgctgatgttgaaggaaatgctcaagatcgacctgttgtcaggttgtcttttgcatcgttgtttgatgcttttggaaggtgcttaaatgatgagagctcggttctgttgctctattctttggtctatgggaactgcgactttcaggaatatgtcctggttagaacagacttggacactttgctgatgcctatcttggaaatgctctacaatgcatcaaggaagacttcaaatcagatttacatgctgttgattattctccttatcctcagtcaagattcaaccttcaatgctagtgtgcaccaattggtgcttcctgcagttccttggtaccatgagcgcctgatgcatcaaacgtcactgggatctttgatggttgtaatactaattcggaccattaagtacaacctctccaagctaaaggatgtctaccttcacacaaactgtcttgctattttagcaaacatggctcctcatgtgcataggctgagtgcttatgcatcacaaagtctatagagcttcacatatatacagatttcttaagaattgttctggagataattattgccatccttacatatgcattgcccagaaatcctgaggttgtgtatgctgtattgcatcgacaagaggtgtttgagccatttaaaaaccatccacgtttcagtgaactgcttgagaacatatacacagtattggatttcttcaatagccgaatggacatgcaacaattagatggggaatggtctgtggataaggtgcttgaagtcatcaacaaaacttgccgttcatggcgtggagaagggatgaagatgtttacccagttacggtttacatatgagcaagaaagccaccctgaggagttcttcatcccatatgcatggcgccttgtcctatcacggggattctccttcaatcccgatgccataaatctcttccctgtggagattcaccttgaagaggcaccggccggtggacaaaaggtttaatatgaatggtccgaaccagagttctgacaagaacataaaggcatatttttgtttcattgtggcaaagagcacgatgtaaataggccgcatataccatataccaggtagtcaaatgtacacattcttttgtattaaatcattatatgtgtaagacgaaagggggtggacggattgcgcaagggtgcagagattgtgctagttataggggggagattactatgtagggtatatgcaattctttcgtaagttatcgttgtattgtacccttagttcaaaaggcttgtaaccacttatttattgaaaagttgtagagtctgcgatctaagggcatgtacagtggagagacaccaaaacggttctccaagcacaggagacaactaagagactctattgtacaatggagtgtctataaacgtagtctatt

SEQ ID NO: 75008 - DNA, 2609 bp, Zea Mays
gtagtccgatcaaaacctccccaaacccaacgcaccggctagtcgctccgctcgcacgtcgcgcccgacgccccgacctcggctgctcgtccagtcgtccttcgtttcccttcccttcccttcccttccgccagaagtctccacgctccctttctcccgtttaaaaccttcgcttggtctcgactctacttggccggccatttcttcgtctcgcccaatcctcgctcacctcaaatcctagggccccgcttctcctactcgggaggctcagatccaatgggcgcggcgccgtcgacgccgacgttggacgtggcaccgttgacgccgaggttgggcgcggcaggcgcgccaccgtcgcccagcgcggcggagcagatgttcgcggcgctggtcggcgaaaaggcctacccaatctcctccgagttctggaaccagctgctcgagctgcccctcaccctgcagtggccgcgcgaccgcgtgctgcaggcgtgccacgcctttgccgagaataactacaaaacaaagcatcttgcaaagattttgatccatttggtttgttgcttgcaagagtgcacctcaacaacttctgtatcttctgtcgtatatcagagggcaatcaacgcggcatacatatcatccatatttctcaagttcatcattgaaaatgcaaaaactgacagttggcaagagctatgccttgacattgacaggagtgagaaggggttggaaaaaattccagcagaaaacacggtggagtattttctgatgagaggtgtgctggactatattggtagtgtggatgtaagtccggagttatgctacctacatcatgaactcctgaacttgatgctagttcttatgtcaactcagttgtgttctggaccatctccagagccaaaggatgtgcatcctttcattgatgcagctatgcttcagctccatcgtggcttcagtggtgcaaaaattgttgctcaattttgttacacgtccaaaaattcctctaaatgcttcgcaccctgttttctctgatgatggtaggcctggtgttctccaacgagttggctcagcagctgatgatcgtgctgatgttgaaggaaatgctcaagatcgacctgttgtcaggttgtcttttgcatcgttgtttgatgcttttggaaggtgcttaaatgatgagagctcggttctgttgctctattctttggtctatgggaactgcgactttcaggaatatgtcctggttagaacagacttggacactttgctgatgcctatcttggaaatgctctacaatgcatcaaggaagacttcaaatcagatttacatgctgttgattattctccttatcctcagtcaagattcaaccttcaatgctagtgtgcaccaattggtgcttcctgcagttccttggtaccatgagcgcctgatgcatcaaacgtcactgggatctttgatggttgtaatactaattcggaccattaagtacaacctctccaagctaaaggatgtctaccttcacacaaactgtcttgctattttagcaaacatggctcctcatgtgcataggctgagtgcttatgcatcacaaaggctagttagtctcttcgacatgctttctcgcaagtatgccaaactagctgagctaaaaaacgacaagtctctgaaagttatatatgatcagatggaagcagacatagcagatgatatgtctatagagcttcacatatatacagatttcttaagaattgttctggagataattattgccatccttacatatgcattgcccagaaatcctgaggttgtgtatgctgtattgcatcgacaagaggtgtttgagccatttaaaaaccatccacgtttcagtgaactgcttgagaacatatacacagtattggatttcttcaatagccgaatggacatgcaacaattagatggggaatggtctgtggataaggtgcttgaagtcatcaacaaaacttgccgttcatggcgtggagaagggatgaagatgtttacccagttacggtttacatatgagcaagaaagccaccctgaggagttcttcatcccatatgcatggcgccttgtcctatcacggggattctccttcaatcccgatgccataaatctcttccctgtggagattcaccttgaagaggcaccggccggtggacaaaaggtttaatatgaatggtccgaaccagagttctgacaagaacataaaggcatatttttgtttcattgtggcaaagagcacgatgtaaataggccgcatataccatataccaggtagtcaaatgtacacattcttttgtattaaatcattatatgtgtaagacgaaagggggtggacggattgcgcaagggtgcagagattgtgctagttataggggggagattactatgtagggtatatgcaattctttcgtaagttatcgttgtattgtacccttagttcaaaaggcttgtaaccacttatttattgaaaagttgtagagtctgcgatctaagggcatgtacagtggagagacaccaaaacggttctccaagcacaggagacaactaagagactctattgtacaatggagtgtctataaacgtagtctatt

SEQ ID NO: 75009 - DNA, 2850 bp, Zea Mays
gtagtccgatcaaaacctccccaaacccaacgcaccggctagtcgctccgctcgcacgtcgcgcccgacgccccgacctcggctgctcgtccagtcgtccttcgtttcccttcccttcccttcccttccgccagaagtctccacgctccctttctcccgtttaaaaccttcgcttggtctcgactctacttggccggccatttcttcgtctcgcccaatcctcgctcacctcaaatcctagggccccgcttctcctactcgggaggctcagatccaatgggcgcggcgccgtcgacgccgacgttggacgtggcaccgttgacgccgaggttgggcgcggcaggcgcgccaccgtcgcccagcgcggcggagcagatgttcgcggcgctggtcggcgaaaaggcctacccaatctcctccgagttctggaaccagctgctcgagctgcccctcaccctgcagtggccgcgcgaccgcgtgctgcaggcgtgccacgcctttgccgagaataactacaaaacaaagcatcttgcaaagattttgatccatttggtttgttgcttgcaagagtgcacctcaacaacttctgtatcttctgtcgtatatcagagggcaatcaacgcggcatacatatcatccatatttctcaagttcatcattgaaaatgcaaaaactgacagttggcaagagctatgccttgacattgacaggagtgagaaggggttggaaaaaattccagcagaaaacacggtggagtattttctgatgagaggtgtgctggactatattggtagtgtggatgtaagtccggagttatgctacctacatcatgaactcctgaacttgatgctagttcttatgtcaactcagttgtgttctggaccatctccagagccaaaggatgtgcatcctttcattgatgcagctatgcttcaggacagctccatcgtggcttcagtggtgcaaaaattgttgctcaattttgttacacgtccaaaaattcctctaaatgcttcgcaccctgttttctctgatgatggtaggcctggtgttctccaacgagttggctcagcagctgcaaactttgtcttgttgccatattactacctcgtaagctcaactcctgagggtgcgacaagtcaattggcagataacagtttacttgttcttcttatcatgatccactaccgaaagtgcatttcaactaatgagtccattccaaccaacaatgtatacacgatggactcaaataccaatgacaaggatgctccagtttttcatgataacccttactgcaaggcattaaacagtgctaaggacatacaatatgatcgtgctgatgttgaaggaaatgctcaagatcgacctgttgtcaggttgtcttttgcatcgttgtttgatgcttttggaaggtgcttaaatgatgagagctcggttctgttgctctattctttggtctatgggaactgcgactttcaggaatatgtcctggttagaacagacttggacactttgctgatgcctatcttggaaatgctctacaatgcatcaaggaagacttcaaatcagatttacatgctgttgattattctccttatcctcagtcaagattcaaccttcaatgctagtgtgcaccaattgttccttggtaccatgagcgcctgatgcatcaaacgtcactgggatctttgatggttgtaatactaattcggaccattaagtacaacctctccaagctaaaggatgtctaccttcacacaaactgtcttgctattttagcaaacatggctcctcatgtgcataggctgagtgcttatgcatcacaaaggctagttagtctcttcgacatgctttctcgcaagtatgccaaactagctgagctaaaaaacgacaagtctctgaaagttatatatgatcagatggaagcagacatagcagatgatatgtctatagagcttcacatatatacagatttcttaagaattgttctggagataattattgccatccttacatatgcattgcccagaaatcctgaggttgtgtatgctgtattgcatcgacaagaggtgtttgagccatttaaaaaccatccacgtttcagtgaactgcttgagaacatatacacagtattggatttcttcaatagccgaatggacatgcaacaattagatggggaatggtctgtggataaggtgcttgaagtcatcaacaaaacttgccgttcatggcgtggagaagggatgaagatgtttacccagttacggtttacatatgagcaagaaagccaccctgaggagttcttcatcccatatgcatggcgccttgtcctatcacggggattctccttcaatcccgatgccataaatctcttccctgtggagattcaccttgaagaggcaccggccggtggacaaaaggtttaatatgaatggtccgaaccagagttctgacaagaacataaaggcatatttttgtttcattgtggcaaagagcacgatgtaaataggccgcatataccatataccaggtagtcaaatgtacacattcttttgtattaaatcattatatgtgtaagacgaaagggggtggacggattgcgcaagggtgcagagattgtgctagttataggggggagattactatgtagggtatatgcaattctttcgtaagttatcgttgtattgtacccttagttcaaaaggcttgtaaccacttatttattgaaaagttgtagagtctgcgatctaagggcatgtacagtggagagacaccaaaacggttctccaagcacaggagacaactaagagactctattgtacaatggagtgtctataaacgtagtctatt

SEQ ID NO: 75010 - DNA, 2799 bp, Zea Mays
gtagtccgatcaaaacctccccaaacccaacgcaccggctagtcgctccgctcgcacgtcgcgcccgacgccccgacctcggctgctcgtccagtcgtccttcgtttcccttcccttcccttcccttccgccagaagtctccacgctccctttctcccgtttaaaaccttcgcttggtctcgactctacttggccggccatttcttcgtctcgcccaatcctcgctcacctcaaatcctagggccccgcttctcctactcgggaggctcagatccaatgggcgcggcgccgtcgacgccgacgttggacgtggcaccgttgacgccgaggttgggcgcggcaggcgcgccaccgtcgcccagcgcggcggagcagatgttcgcggcgctggtcggcgaaaaggcctacccaatctcctccgagttctggaaccagctgctcgagctgcccctcaccctgcagtggccgcgcgaccgcgtgctgcaggcgtgccacgcctttgccgagaataactacaaaacaaagcatcttgcaaagattttgatccatttggtttgttgcttgcaagagtgcacctcaacaacttctgtatcttctgtcgtatatcagagggcaatcaacgcggcatacatatcatccatatttctcaagttcatcattgaaaatgcaaaaactgacagttggcaagagctatgccttgacattgacaggagtgagaaggggttggaaaaaattccagcagaaaacacggtggagtattttctgatgagaggtgtgctggactatattggtagtgtggatgtaagttgtgttctggaccatctccagagccaaaggatgtgcatcctttcattgatgcagctatgcttcaggacagctccatcgtggcttcagtggtgcaaaaattgttgctcaattttgttacacgtccaaaaattcctctaaatgcttcgcaccctgttttctctgatgatggtaggcctggtgttctccaacgagttggctcagcagctgcaaactttgtcttgttgccatattactacctcgtaagctcaactcctgagggtgcgacaagtcaattggcagataacagtttacttgttcttcttatcatgatccactaccgaaagtgcatttcaactaatgagtccattccaaccaacaatgtatacacgatggactcaaataccaatgacaaggatgctccagtttttcatgataacccttactgcaaggcattaaacagtgctaaggacatacaatatgatcgtgctgatgttgaaggaaatgctcaagatcgacctgttgtcaggttgtcttttgcatcgttgtttgatgcttttggaaggtgcttaaatgatgagagctcggttctgttgctctattctttggtctatgggaactgcgactttcaggaatatgtcctggttagaacagacttggacactttgctgatgcctatcttggaaatgctctacaatgcatcaaggaagacttcaaatcagatttacatgctgttgattattctccttatcctcagtcaagattcaaccttcaatgctagtgtgcaccaattggtgcttcctgcagttccttggtaccatgagcgcctgatgcatcaaacgtcactgggatctttgatggttgtaatactaattcggaccattaagtacaacctctccaagctaaaggatgtctaccttcacacaaactgtcttgctattttagcaaacatggctcctcatgtgcataggctgagtgcttatgcatcacaaaggctagttagtctcttcgacatgctttctcgcaagtatgccaaactagctgagctaaaaaacgacaagtctctgaaagttatatatgatcagatggaagcagacatagcagatgatatgtctatagagcttcacatatatacagatttcttaagaattgttctggagataattattgccatccttacatatgcattgcccagaaatcctgaggttgtgtatgctgtattgcatcgacaagaggtgtttgagccatttaaaaaccatccacgtttcagtgaactgcttgagaacatatacacagtattggatttcttcaatagccgaatggacatgcaacaattagatggggaatggtctgtggataaggtgcttgaagtcatcaacaaaacttgccgttcatggcgtggagaagggatgaagatgtttacccagttacggtttacatatgagcaagaaagccaccctgaggagttcttcatcccatatgcatggcgccttgtcctatcacggggattctccttcaatcccgatgccataaatctcttccctgtggagattcaccttgaagaggcaccggccggtggacaaaaggtttaatatgaatggtccgaaccagagttctgacaagaacataaaggcatatttttgtttcattgtggcaaagagcacgatgtaaataggccgcatataccatataccaggtagtcaaatgtacacattcttttgtattaaatcattatatgtgtaagacgaaagggggtggacggattgcgcaagggtgcagagattgtgctagttataggggggagattactatgtagggtatatgcaattctttcgtaagttatcgttgtattgtacccttagttcaaaaggcttgtaaccacttatttattgaaaagttgtagagtctgcgatctaagggcatgtacagtggagagacaccaaaacggttctccaagcacaggagacaactaagagactctattgtacaatggagtgtctataaacgtagtctatt

SEQ ID NO: 75011 - DNA, 3302 bp, Zea Mays
gtagtccgatcaaaacctccccaaacccaacgcaccggctagtcgctccgctcgcacgtcgcgcccgacgccccgacctcggctgctcgtccagtcgtccttcgtttcccttcccttcccttcccttccgccagaagtctccacgctccctttctcccgtttaaaaccttcgcttggtctcgactctacttggccggccatttcttcgtctcgcccaatcctcgctcacctcaaatcctagggccccgcttctcctactcgggaggctcagatccaatgggcgcggcgccgtcgacgccgacgttggacgtggcaccgttgacgccgaggttgggcgcggcaggcgcgccaccgtcgcccagcgcggcggagcagatgttcgcggcgctggtcggcgaaaaggcctacccaatctcctccgagttctggaaccagctgctcgagctgcccctcaccctgcagtggccgcgcgaccgcgtgctgcaggcgtgccacgcctttgccgagaataactacaaaacaaagcatcttgcaaagattttgatccatttggtttgttgcttgcaagagtgcacctcaacaacttctgtatcttctgtcgtatatcagagggcaatcaacgcggcatacatatcatccatatttctcaagttcatcattgaaaatgcaaaaactgacagttggcaagagctatgccttgacattgacaggagtgagaaggggttggaaaaaattccagcagaaaacacggtggagtattttctgatgagaggtgtgctggactatattggtagtgtggatgtaagtccggagttatgctacctacatcatgaactcctgaacttgatgctagttcttatgtcaactcagttgtgttctggaccatctccagagccaaaggatgtgcatcctttcattgatgcagctatgcttcaggacagctccatcgtggcttcagtggtgcaaaaattgttgctcaattttgttacacgtccaaaaattcctctaaatgcttcgcaccctgttttctctgatgatggtaggcctggtgttctccaacgagttggctcagcagctggtaatgtggatccgtttcttcaacaatattgtctctaagaatctgagttactatattatcttcataatgtgtgtcatgtcaatgccctaaggaatatggcgccttctaagttcagactaaatatatttagaatatatcaacagtctttcatttttttgtactcatgatggttttggttgatgctcctcttatgctctacaagaattatattgtgcaacccttgttcctaatttgcaacactttgctaattaggagttataatgttcacattaggtcagatgacgttagaatacatacatttttttttactattagtctattacgggatagcttagattgaaagttcttgcatcatttgagccattgggccattcttataatccttagtctctactgagggactcccttatcttgttctgcagcaaactttgtcttgttgccatattactacctcgtaagctcaactcctgagggtgcgacaagtcaattggcagataacagtttacttgttcttcttatcatgatccactaccgaaagtgcatttcaactaatgagtccattccaaccaacaatgtatacacgatggactcaaataccaatgacaaggatgctccagtttttcatgataacccttactgcaaggcattaaacagtgctaaggacatacaatatgatcgtgctgatgttgaaggaaatgctcaagatcgacctgttgtcaggttgtcttttgcatcgttgtttgatgcttttggaaggtgcttaaatgatgagagctcggttctgttgctctattctttggtctatgggaactgcgactttcaggaatatgtcctggttagaacagacttggacactttgctgatgcctatcttggaaatgctctacaatgcatcaaggaagacttcaaatcagatttacatgctgttgattattctccttatcctcagtcaagattcaaccttcaatgctagtgtgcaccaattggtgcttcctgcagttccttggtaccatgagcgcctgatgcatcaaacgtcactgggatctttgatggttgtaatactaattcggaccattaagtacaacctctccaagctaaagcttgtatacacttgcaggatgtctaccttcacacaaactgtcttgctattttagcaaacatggctcctcatgtgcataggctgagtgcttatgcatcacaaaggctagttagtctcttcgacatgctttctcgcaagtatgccaaactagctgagctaaaaaacgacaagtctctgaaagttatatatgatcagatggaagcagacatagcagatgatatgtctatagagcttcacatatatacagatttcttaagaattgttctggagataattattgccatccttacatatgcattgcccagaaatcctgaggttgtgtatgctgtattgcatcgacaagaggtgtttgagccatttaaaaaccatccacgtttcagtgaactgcttgagaacatatacacagtattggatttcttcaatagccgaatggacatgcaacaattagatggggaatggtctgtggataaggtgcttgaagtcatcaacaaaacttgccgttcatggcgtggagaagggatgaagatgtttacccagttacggtttacatatgagcaagaaagccaccctgaggagttcttcatcccatatgcatggcgccttgtcctatcacggggattctccttcaatcccgatgccataaatctcttccctgtggagattcaccttgaagaggcaccggccggtggacaaaaggtttaatatgaatggtccgaaccagagttctgacaagaacataaaggcatatttttgtttcattgtggcaaagagcacgatgtaaataggccgcatataccatataccaggtagtcaaatgtacacattcttttgtattaaatcattatatgtgtaagacgaaagggggtggacggattgcgcaagggtgcagagattgtgctagttataggggggagattactatgtagggtatatgcaattctttcgtaagttatcgttgtattgtacccttagttcaaaaggcttgtaaccacttatttattgaaaagttgtagagtctgcgatctaagggcatgtacagtggagagacaccaaaacggttctccaagcacaggagacaactaagagactctattgtacaatggagtgtctataaacgtagtctatt

SEQ ID NO: 75012 - DNA, 695 bp, Zea Mays
cttagagtcatcagatgatggtattataagtccaggcatgcgcattggagttgggttcagctggaacccaagaacaaatgggtctaaatagaatataactcctgcggcgctgacattatttgctgtatctagagcttgtttcacagaagaaagaccaagcacaaatcttatagaatagctgcacactagtatctttcctcttatcaaatctgcatctaggcgactcgaatcttggcattccccaaaggacaattcagtaggactgactgtattgttcttcagtgcatgcggcgcagcaactaaagtatacatgcaatcatcatccgttccagctgtgtttgcaattaatcaatacaggttacaatcatacagaggtaactatatttgtacataaaattacttcaaaagaacttacgggcaagaccaactccttgaatggtcaaattgttgccaagtacaatgtagttgttgtataccctgtcatgggcagaagctccaacagtaaatatccaaggactatatgaagacatactcttaggggaagggccagtatttcctgcagcttgcaccacaaatatgccagctttaacagctgacaagagtgccatatctattggattgaagaatgttgcgagtccaggtggcctccgattaggagtaatggacaaacttatgatgtcaacattatcttcagc

SEQ ID NO: 75013 - DNA, 621 bp, Zea Mays
gtcttttataaaattcaacataaatatttacctaaaaacctattagactttaagtctaactctgacatactaataaacttggacatccagattgcttgaaatctaaacatagattcagccttttcttccatggtagtgctatctgcctaattaactagaataagtttgctaaataattacaggttatatttagagatggaacagttctttttgtgctttaactgacagatttagaagctaaaaagcagaacaatacctgatctattgcagctactacatcagcagcaaaaccaccaaagcttttataaagagctttatagacagcaatgctgaagaaacaaattattatattaatttgggaaataaatcagaggtacattcccaaaatagagggcaatgatcttactgtgcacgaggagccatgccacttgcatttccaaattgatgcccagacacagcaacaggaattccgtgatttccagcagcaatggatgccgtatgcctgcagccacaaatcttagaatcagaggaaatttttattcaagtaataccacatgattcctatggcatggttttttatttctttttcaacgcatttggttttaattagaactaaaaatg

SEQ ID NO: 75014 - DNA, 454 bp, Zea Mays
cagaatatcagtagaagggtaaatttgtctaggtatcaacttcgaaaggagctacttacgtcccatggccatcactatcagatggtgaagcaagatcttgagacgcattgaagactcctctagttattgcagatgctgcaaaatgccgagcccccacgagctttctattgcaggatccagatgggaaatcatttgtaacctcacaaatgccagagtagtgagcaggtactggataactatcagttgatagatcatctgcaaagctagggtgggttggatctattcctgtgtcgatgaggccaatgacgacaccctgacccgcgaattgcggaccaccttcttgcacccaggctccttgcggcagtccaaggaattcaggggtatgagttgttgctgtcctaactgagtaatccagcatcacatttgctacttcttttctcctagatagcttatc

SEQ ID NO: 75015 - DNA, 83 bp, Zea Mays
gcggtagctgtacagctttatataacgctctccccttagagtcctcttcaataatgaattttggaggtggacaatataagagc

SEQ ID NO: 75016 - DNA, 861 bp, Zea Mays
acctcggcttcctgaggacgctggtggtcggggtgtctcctgctcctcctcctcctcctcctcctcctcctcctcctcccccgccgccgccgcggccggcagcattagcaaccctgctgctcccgaacttctccaagttaaggcgcctgtggaaaaccggcgcctgcttcatggtgacaatgtacaccgctgtgccatcatcgaaagcgcggacgccggcgctgcccgccaacaccccaagaaccgtcaccgcgtacaggaacgcggcggcggcggcccggtgctcatccctccgcgtcaccctcattccctcgaagctcctcggcgctcacctcccacgaggcgccaagaaacaccaagaaagaaagactagttgcgtccaccgcccatgggagtgaaagatcgaaccttcaggcgcaggctgcgcagcgaagcgctaccgggatggcaggcagcaaattaatggcgagggggagaggggggagagagagagatgtgcactacgcgcccgcggctgcgccgctcaaggaggaagcgagagcgcccagtagagtgcgactttgcgaggctagaggagaaagggatggatcaagcaggaagagagcggagaaatactcctacagtcctacttgcaatgctcctcccccagcaaaaccctccgtgtctaccaaacgtccaaacccctcttcactcagctcggctgctcgcactgcagtttgcggccagtgttgtgttgtgtacttgtactgcggtctgcggccattgttttgggcgtctgcttctacagctctctttgtgtgtgttgggctgttggcgagaagaattcacaaatcacaccagctcagagaaccatgtaaaaag

SEQ ID NO: 75017 - DNA, 1089 bp, Zea Mays
gagcggcgaagaggtcgtagaagaagtcgctgcgtgcggcaaggatgcagcggtggatgggtacgggcggcccaccgtcgggcacatcgacgtcggcgtcgctgcagtctaggtccgggtcgaggagcagccgctcgaggtttttgctgagccggttcaggctcacggcctccacgctgcctccgctccctgcggcagcgactccaccaccccacccctggccggcaggcaacgggggagtctggggcggccctggcggcggcagcgcgacggaacaggggctcgagccgttggacaggtacgacgacgacgacgcgaacgtgatggacgacgacggctccatggcttcccacaactgccaagcgcaagacgcgagcccctacttgtgccggacccggaccactacgaccatgagatggtggtcgcctcaagcggtttcggcagccaaaccgagaactttctggctttgcacggccaaacacccccaattctgcgctctgcttggctggctccaggcaaatccgcgtcggcaaaagcctcctcgacgtgacccttcctagagcggcacggaagtcggcgtaaatcacacgcgagtcctcccagcgttgccgatcccggactgaaatctcaccggcgctgcgtcaggccaggaacagaaaatatggtgcttccccttcttcttcctaccgggcggtggctaaatctcagacaagtgaaaaagggatccaagagggcagcatagtagctacagggaataacgtgagggattgttggccggtgctgggaggggcgaggactgactgaggagcggtaggggtccaacggaatcgtggaagaagagtccgggggaaacgcagttgcgtggaaagtagggagatagggatgggggaaagagtggatcgaagaagacgacgactcgacgaggaaggagaatagactagagaggcgccggaaggagaatagaataaacaagtaaaaaaatccaagaaatctcgagtatttcggcgcaatttgaaggaaaacctgagccctgtgcccctgtatacgtcgtcaagtgacgcctgaccagggtgacgtcgacggcaatcg

SEQ ID NO: 75018 - DNA, 2081 bp, Zea Mays
atggctgcggccaccaaccccttcggcctagtttgtcactttgtcgtcgcagcaagcccttggatcaactcagcggcgaacttggactccaaccttggcctgtacgctgtacctacaaaaggtggcgctatggtagctcgtcttgtgcatcgactcacgccaccacgcacctcctcgtacgcgtccgagcagatggcgccggctgcggggacggtggccagcagcaggcacaagaagtggtcggacgagtgcaggaacctgtggcgcgtcgcggggccggtgatcctgaccgggatcttccagttcctgctcggcttcgtcaccacggccttcgtcggccacatcggcaaggtcgagctcgctgctgtctccatcgtcaacggcgtcgtcgagggcctcgccttcggcctcctgcttggcatggggagcgcgctggagaccctgtgcgggcaggccgtgggcgccgggcagctccagatgctgggggtgtacatgcaacgctcctggatcatctgcctcgccacctccctcgccctgctcccgctctacgtcttcacgtcccctctcctccgcatgctccggcagtccgcggacatctcggcggtggcggggcggtacgcgcgctggtgcgtgccgcagctgttcgcgtacgccgtcaacttccccatccagaagttctaccaggcgcagagcagggtgtgggccatgacggccatctcgggcgccgcgctcgccgtgcacgcgctgctcagctggctcgtcgtggccaggctcgggcgcggcctggccggcgccgccgtcgtcggcgacgtctcctggtggctcgtcaacgtcgcgcagttcgtctacctcgtcggcggctccttccccgacgcatggacagggttctcgcgcaaggcgttcgacagcctcggcggcttcgtcaggctctccgtcgcctcggccgtcatgctgtgcctagagatgtggtattatacggcagtgctcattctggtgggatgcctgaagaacccagagattcaagtcgatgcgatttccatatgcatgaactaccagctttggacactgatggttgctgttggcttcaacgctgcagtaagtgttcgcgtgtcgaacgagctcggcgccaaccacccaaaggcggccaggttttccgtggtcgtcgccaccgtcacgtcggccgccgtcggggtggtcttcacggccgtcgctctggcggcgaggaagcagatgcctcggcttttcaccggcgacgacgtggtcgtcagggagaccgccaagctagggtacctcctagccgctaccatattcctcaacagcgtccagccggtgctgtcaggcgtggcgatcggtgccgggtggcagtccttggtcgcgttcgtcaacgtcggcagctactacctcgttggcctgcccctcgcggccgtgtttggcttcaagctgaagctcaatgctacggtaagacaagcatgggatttgggtgggagtgttgatcggaacggtattacagactgtgattctgttcgtaatactcagcagaaccaagtggcaaaaagaggctatgctagcagaagagaggatacgggagtggggaggaaatgtcgagctgccacatactcaagaaacggggccaagtgaaagcactgccgcgccagacgcaagaaaggggcccaagtgaaaaacatcgtgacaccggtttgataggaaactactaaagcattgtgaccattttcagccaccagaatcatttgattaatgtgtgaagtgtggagtgggagtacttgtaatagatgggaaaaagtgagacatgacagggtcaaaccgatggcctcttcttagggctagtttgaaattttcattttctaatggatttctatttttctaagagaaaaatgaactaatttctcttgaaaattaaaatctcataaataataaggtatcaaactagccttaaagatactctttctgtctcaaaatcattttaaattttatatctatactcaaataaatgataataaatctatacaaatataacacatatattaaatattgtatggacctattaaaatattaaaacgaat

SEQ ID NO: 75019 - DNA, 411 bp, Zea Mays
ggcgtcgcatcggtcttctcccggtttatagatttctcctgctgtggaaaatcatgcaagtttggcgttgtacgagggcttgcgccgccgcggagccaacgggaactggtgtgtgccgctttttcatagatgggtcacatggtccggtggcaacatcccggtgtggcggcaacatgaagggattgtggtcagcgacgatgaatcggtacgtgactctctggagaacctagcggacaccatgggccacctccgtgacacgctgcatgagatgggtggtgtcgagatgacccaagccacgacatccgcctttaagtggcacctcaacaatgtattggcttttactaaagattttgtgatatattaaagtggatagtaatatatattatttatattaatgtaatcattatgcac

SEQ ID NO: 75020 - DNA, 5904 bp, Zea Mays
ccgtgacacagatcaaggcccattgcgtatgtcgacgtgcgcggcagcgagcgtgcgtacacgtcacgcaccacgtcagaagccccccaacccaccggtcccccactcagaccgtccgacgaacgactcgacgactgtcgactcctgcacaggcaacacctcacctcgatgatgcatccgctccgccgcatcctcgctctcttactcgtcggcctcctccccgcggccgcgtggtccttggcaccaccccgcttcccgaggccccaaccccgctcgcggccgggagctaatggggtgggagactacgagtacgagacgcgatacttccggcagcggctggaccacttcagctttccaggggtcggggacgaggacgaggacgaggcggctgcgttcttccagcagcggtacctggtgggccgcggcggtgggtgggctggacccggcggccccatcttcttctactgcggcaacgagggcgacatcgcctggttcgccgccaactccggcctcgtctgggaggccgccccacgcttcgccgccctcgtcgtcttcgccgagcatcgctactacggagagtccatgcctttcggtagcaaagccaaggcgtacagcgactccaagtccctggcgtatctcacggccgagcaggcgcttgctgactttgctgtgctgctcactgacctcaagaggaacctatcggcagagggcagccccgttgtgctctttgggggctcatacggtggaatgctagctgcttggatgagactcaaatatccccatattgctattggggctctcgcatcatcagctccgatcctgcagtttgaggacattgttccttctactatattctatgatctcgtatctgatgattttaggagggaaagtttaagttgttttcttacaataaaagactcctggaaagaattagatgaccaagcaaacgagcaagatggtcttctgaaactaagtaaaacgttccacctttgccagaccctgaaaacaagtggagacctttcagattggttgagctcagcgtacagttatctggccatggtggattacccacttccatcagaatttctcatgcctttgccagccaatcctattaaagaagtatgcagaaatatcgacagtcaacctaagggtactggtactctggaacgtatatatgcaggagtaaatgtatactacaattatactggcactgttgactgctttgatctaaatgatgacccccatggaatgggtggatgggactggcaggcttgtaccgagatggtaatgccaatgtcttacagtgaacaaaggagcatgtatccaccttataaatttgactacgcttcctatgctgaggattgcatcaaaagctatggtgtcaggccaaggcctaagtggattacaacagaatttggtgggcataatatcactaaggtcctggaaaattttggtagtaacatcatattcttcaacggacttcttgacccatggagtggcggaggtgtcctgaagaatatatctgagagtgtcgttgctattgtggctccattaggagcacatcacatcgatctgcgcccggcaactccagatgacccggattggctggtggccctgagagaatcagagctggagatcatatctggctggctatgggattactacggggctggaggagcactcttccagcctgtagctgtgaagggctcctcttcatactgaggaaccgcaccctggctaataactcaaatgcttggtctcagaaataagagggccctgctgcaagtgccaaccaccgttaatgctgctgcagtgctgcgtcatggagaaggaagatcttcatgttgatgatcgggtccgctcctgcatcatgtgccatatcagtagcatttggtctgtgtatcaaatgggacatgtacttggctgatgaggtgaggaaaacactggataacgtaacgactctttcgcagtggtggtggcggtcagcaggtgctctagaggcttgatatcacgtgcatgtgccgctgtaaataacataatgctctatgtacgtgtacatctctactactctataagcctgtagtgtaggcgtgcacaccccgtgcaccgtgttctgcctccaacgtcctctcgcccacgcgctccgtcaatcacgcaagttatgccaccgatgtcgcccgaccgccccatccgcattgcccccacccccgtccgccgctagatgcggatcccgccgcttccagcatccagccaagcccgtgagccgcacgccgctcctgctcccgctccgagcgccttaggtcaggcggcgttggcccgacggcggggggaggcatcacgctgccatccatgggcgcgcccccgccgccgctgcacccgacgcccacctctcccacggcgcgcccgcaccaccaccactacctcttctccatcaagcagctcaacacgctgggcgcggcggccgtgctcgccttctccaccacggtcccgctctcggagactgccttcgcggtgctcctcccccctacctcctcgtcctcgcctggctcgccttcccgcagcgcccaggccgctcgagacccggatcccgcctctacccctcggcaccatcgtcagtgtcttcgatggccacaacggccccgacgcccccaccccgacagacactgagccctcttccgctcgcgtgactggtgccccctcaaccctcgactctcctccccaccgtggccccttccccagccccagtgaccagcgcctcccttcctaagtgcggccatggcgaccatcgtgccctagcccgcccctgcaccatggcaagcacaccccttctactcctctcgccccaacccctgtgcagcccagcgcggtggcctataacccacagcaaggcgcaactagctggctggtggccctgccccggtgagcccctgctaggcgcggccagcaacccccgtggtctagcccctgcctaggcacacccaaaacccctgcccttgcaacttgtcctcggcgccgccccactcgcccgagatctgccgcgacaacaggaattggacgtacattgggactttgaagtgcagctaaggctacctggcgattggtggaaagagatctgatgacggcgatcatggtcgaagagtaggagaggccctagaagaaaggtgacatattctcgttcttcggcagcggaataaatgcaccgagctgagaaaggacagaacaaagaaagatcttaaaatcaaagctaaagaagtggagattcaaaatctaaaaaaaagctaatgtcatggaataaatgaggttgatgtggagctaaaaagggaggctatgtttttttgggtgaggcggttatcattggcttgttatgtgaacattattgtgatgtggtttcatgttgtccaggtgccagtttaacaactttttgcaccaccatgtcgagaatatcattgggtcatgtctggagagtaataatgatcaactgatgggccatgtccttgatgagtgtaaacttgttacaagaattttggaagcagagaagaactctgctctatcgtcagaattggacggtcgcatcgacgccaggttccagcagaggagtcgttactctccttgattccttcaccgagttcaccgaggaatatgaactgaaaatgaaagagaagggtgagcaactgattgtaagatctttcatcagtgcaacctctccttttttagctttcatcagtgctacactcccacagtccccacatgcacgcagatgtttgaaaatataaaataaaatcaacaacactgcaaatttactagctcaactacaagaggcatggagttattattaaaaaatgaagtactcatgatgaattccaaacaaaaaatctgacctaataatcaacataatataaattgttgtagctcagtcctatagtcatactgagctactgattagaatgttcaagaatgaaccattagatttcctgtgctaaaatgaggattgatcataagactaatgacgatcaagactatcaaggcccctacaaacaaagctcatgggaaattagaaagtgaaatgaaataccatgttgaaaacagggccaaagtagctagcaattcaaagaggcaaaatgctgcaaaatataatgcttcatgagttgttttcggtgttgtcaaaatctcaggtgccacaatggatgaaagaacaacatgtagaattgggttccaaaggacttgagggctacttcatcacaacctgtaactgaagatcttgaataactgactacatcaccatgcaagactaaagtttttattttattaagaaaatgaccccaaagaagaagatgtgtgatatatccctgatgactgcatatgtgttgagggttactacacactgaaaaatagaataacagactctgtggctgttagtgaagagggattagtcaaaaagagaacaaggcgtccaaaacctgttggcaatgagggggctgtcagaaagagaagaggctctgccatcccacaactataattgttcaatatatatggctgaattgaagggagaagatgatttatcagcaggctctatgagcacaactgcatagtcaagacataattcttcggcccctgcagacttcaagcagctaagaagtgttacgcccattgacatctttccacgacaagagacctgggcaagagaatccggacgtgctgagggggagaggaaggagaggaggaagatatcgggcaagagaacccattgacatccttggatagggtccgtctgatgccattcatcgctgtctttgatctcaggaaggcatcttagccagctcaattttattagaaatattgttgttttaagatacagagtccatggttactattgtacgcttttctgagaaacttgtcatcccaataatttggttctggagctatatactgatctagcttgttttagtaacaaatgtaagttgctcacatttcctttagactgtcactagaactttgaacgatcaactcgtgcttctaaatcaagaattaccatatgtgttttttgagttcgatcccttctattttttatttggccaccaaacgaagtttttacatgacaagaatgttataaatacttctttaaatcacgagtttcgtgtgtcacgtacgtgcaatgtaggtatatttctctttcatgcttctcgcgatcgattgtgccgtcgcaacgcacgggcattaacctagtctgtacatatgctgccagtgtgctgtgtgcgtctggtgtcgcactcgagtagtacgcgacgggtctcctgcggccctgttggagtcgtcaattgtcagccaccttcgaatacgagtagggatgacaattgacaacggggacagaccaggagctgtatgaaataaagaacattgtagatgctcttaatgagcaacgcgagaagttgcaagagcaaagaaagctgcttcattcagaccgagaaccaatctgacagcaaatccagcagcttactgggttagaagagctgaaaattgaatctgagaacgggcaactaactgtctttgacacaatgtgagaacttaaagaaataaaggtggcgtggaaaacctgaaagagaacggtgttcacatgtctcctgacgagaggatgtataaaaacgcaaatgcaaagcacactactgtgaagagattggaaccgtctcctgcgatccacaccaattttcctgggtgttattagaaaatgtgctcaggtgatattcaaaggctgtgcagagaagagcgctgatgatccccacaacacaacgatagattggtacctgcaaagttggcaatgcaaatgtcaatggctctagcttaattagctgctgctgcctattcagatgaactgttatttggtcatcagctggaaaatggtgctgggaa

SEQ ID NO: 75021 - DNA, 5873 bp, Zea Mays
cacagatcaaggcccattgcgtatgtcgacgtgcgcggcagcgagcgtgcgtacacgtcacgcaccacgtcagaagccccccaacccaccggtcccccactcagaccgtccgacgaacgactcgacgactgtcgactcctgcacaggcaacacctcacctcgatgatgcatccgctccgccgcatcctcgctctcttactcgtcggcctcctccccgcggccgcgtggtccttggcaccaccccgcttcccgaggccccaaccccgctcgcggccgggagctaatggggtgggagactacgagtacgagacgcgatacttccggcagcggctggaccacttcagctttccaggggtcggggacgaggacgaggacgaggcggctgcgttcttccagcagcggtacctggtgggccgcggcggtgggtgggctggacccggcggccccatcttcttctactgcggcaacgagggcgacatcgcctggttcgccgccaactccggcctcgtctgggaggccgccccacgcttcgccgccctcgtcgtcttcgccgagcatcgctactacggagagtccatgcctttcggtagcaaagccaaggcgtacagcgactccaagtccctggcgtatctcacggccgagcaggcgcttgctgactttgctgtgctgctcactgacctcaagaggaacctatcggcagagggcagccccgttgtgctctttgggggctcatacggtggaatgctagctgcttggatgagactcaaatatccccatattgctattggggctctcgcatcatcagctccgatcctgcagtttgaggacattgttccttctactatattctatgatctcgtatctgatgattttaggagggaaagtttaagttgttttcttacaataaaagactcctggaaagaattagatgaccaagcaaacgagcaagatggtcttctgaaactaagtaaaacgttccacctttgccagaccctgaaaacaagtggagacctttcagattggttgagctcagcgtacagttatctggccatggtggattacccacttccatcagaatttctcatgcctttgccagccaatcctattaaagaagtatgcagaaatatcgacagtcaacctaagggtactggtactctggaacgtatatatgcaggagtaaatgtatactacaattatactggcactgttgactgctttgatctaaatgatgacccccatggaatgggtggatgggactggcaggcttgtaccgagatggtaatgccaatgtcttacagtgaacaaaggagcatgtatccaccttataaatttgactacgcttcctatgctgaggattgcatcaaaagctatggtgtcaggccaaggcctaagtggattacaacagaatttggtgggcataatatcactaaggtcctggaaaattttggtagtaacatcatattcttcaacggacttcttgacccatggagtggcggaggtgtcctgaagaatatatctgagagtgtcgttgctattgtggctccattaggagcacatcacatcgatctgcgcccggcaactccagatgacccggattggctggtggccctgagagaatcagagctggagatcatatctggctggctatgggattactacggggctggaggagcactcttccagcctgtagctgtgaagggctcctcttcatactgaggaaccgcaccctggctaataactcaaatgcttggtctcagaaataagagggccctgctgcaagtgccaaccaccgttaatgctgctgcagtgctgcgtcatggagaaggaagatcttcatgttgatgatcgggtccgctcctgcatcatgtgccatatcagtagcatttggtctgtgtatcaaatgggacatgtacttggctgatgaggtgaggaaaacactggataacgtaacgactctttcgcagtggtggtggcggtcagcaggtgctctagaggcttgatatcacgtgcatgtgccgctgtaaataacataatgctctatgtacgtgtacatctctactactctataagcctgtagtgtaggcgtgcacaccccgtgcaccgtgttctgcctccaacgtcctctcgcccacgcgctccgtcaatcacgcaagttatgccaccgatgtcgcccgaccgccccatccgcattgcccccacccccgtccgccgctagatgcggatcccgccgcttccagcatccagccaagcccgtgagccgcacgccgctcctgctcccgctccgagcgccttaggtcaggcggcgttggcccgacggcggggggaggcatcacgctgccatccatgggcgcgcccccgccgccgctgcacccgacgcccacctctcccacggcgcgcccgcaccaccaccactacctcttctccatcaagcagctcaacacgctgggcgcggcggccgtgctcgccttctccaccacggtcccgctctcggagactgccttcgcggtgctcctcccccctacctcctcgtcctcgcctggctcgccttcccgcagcgcccaggccgctcgagacccggatcccgcctctacccctcggcaccatcgtcagtgtcttcgatggccacaacggccccgacgcccccaccccgacagacactgagccctcttccgctcgcgtgactggtgccccctcaaccctcgactctcctccccaccgtggccccttccccagccccagtgaccagcgcctcccttcctaagtgcggccatggcgaccatcgtgccctagcccgcccctgcaccatggcaagcacaccccttctactcctctcgccccaacccctgtgcagcccagcgcggtggcctataacccacagcaaggcgcaactagctggctggtggccctgccccggtgagcccctgctaggcgcggccagcaacccccgtggtctagcccctgcctaggcacacccaaaacccctgcccttgcaacttgtcctcggcgccgccccactcgcccgagatctgccgcgacaacaggaattggacgtacattgggactttgaagtgcagctaaggctacctggcgattggtggaaagagatctgatgacggcgatcatggtcgaagagtaggagaggccctagaagaaagcggaataaatgcaccgagctgagaaaggacagaacaaagaaagatcttaaaatcaaagctaaagaagtggagattcaaaatctaaaaaaaagctaatgtcatggaataaatgaggttgatgtggagctaaaaagggaggctatgtttttttgggtgaggcggttatcattggcttgttatgtgaacattattgtgatgtggtttcatgttgtccaggtgccagtttaacaactttttgcaccaccatgtcgagaatatcattgggtcatgtctggagagtaataatgatcaactgatgggccatgtccttgatgagtgtaaacttgttacaagaattttggaagcagagaagaactctgctctatcgtcagaattggacggtcgcatcgacgccaggttccagcagaggagtcgttactctccttgattccttcaccgagttcaccgaggaatatgaactgaaaatgaaagagaagggtgagcaactgattgtaagatctttcatcagtgcaacctctccttttttagctttcatcagtgctacactcccacagtccccacatgcacgcagatgtttgaaaatataaaataaaatcaacaacactgcaaatttactagctcaactacaagaggcatggagttattattaaaaaatgaagtactcatgatgaattccaaacaaaaaatctgacctaataatcaacataatataaattgttgtagctcagtcctatagtcatactgagctactgattagaatgttcaagaatgaaccattagatttcctgtgctaaaatgaggattgatcataagactaatgacgatcaagactatcaaggcccctacaaacaaagctcatgggaaattagaaagtgaaatgaaataccatgttgaaaacagggccaaagtagctagcaattcaaagaggcaaaatgctgcaaaatataatgcttcatgagttgttttcggtgttgtcaaaatctcaggtgccacaatggatgaaagaacaacatgtagaattgggttccaaaggacttgagggctacttcatcacaacctgtaactgaagatcttgaataactgactacatcaccatgcaagactaaagtttttattttattaagaaaatgaccccaaagaagaagatgtgtgatatatccctgatgactgcatatgtgttgagggttactacacactgaaaaatagaataacagactctgtggctgttagtgaagagggattagtcaaaaagagaacaaggcgtccaaaacctgttggcaatgagggggctgtcagaaagagaagaggctctgccatcccacaactataattgttcaatatatatggctgaattgaagggagaagatgatttatcagcaggctctatgagcacaactgcatagtcaagacataattcttcggcccctgcagacttcaagcagctaagaagtgttacgcccattgacatctttccacgacaagagacctgggcaagagaatccggacgtgctgagggggagaggaaggagaggaggaagatatcgggcaagagaacccattgacatccttggatagggtccgtctgatgccattcatcgctgtctttgatctcaggaaggcatcttagccagctcaattttattagaaatattgttgttttaagatacagagtccatggttactattgtacgcttttctgagaaacttgtcatcccaataatttggttctggagctatatactgatctagcttgttttagtaacaaatgtaagttgctcacatttcctttagactgtcactagaactttgaacgatcaactcgtgcttctaaatcaagaattaccatatgtgttttttgagttcgatcccttctattttttatttggccaccaaacgaagtttttacatgacaagaatgttataaatacttctttaaatcacgagtttcgtgtgtcacgtacgtgcaatgtaggtatatttctctttcatgcttctcgcgatcgattgtgccgtcgcaacgcacgggcattaacctagtctgtacatatgctgccagtgtgctgtgtgcgtctggtgtcgcactcgagtagtacgcgacgggtctcctgcggccctgttggagtcgtcaattgtcagccaccttcgaatacgagtagggatgacaattgacaacggggacagaccaggagctgtatgaaataaagaacattgtagatgctcttaatgagcaacgcgagaagttgcaagagcaaagaaagctgcttcattcagaccgagaaccaatctgacagcaaatccagcagcttactgggttagaagagctgaaaattgaatctgagaacgggcaactaactgtctttgacacaatgtgagaacttaaagaaataaaggtggcgtggaaaacctgaaagagaacggtgttcacatgtctcctgacgagaggatgtataaaaacgcaaatgcaaagcacactactgtgaagagattggaaccgtctcctgcgatccacaccaattttcctgggtgttattagaaaatgtgctcaggtgatattcaaaggctgtgcagagaagagcgctgatgatccccacaacacaacgatagattggtacctgcaaagttggcaatgcaaatgtcaatggctctagcttaattagctgctgctgcctattcagatgaactgttatttggtcatcagctggaaaatggtgctgggaa

SEQ ID NO: 75022 - DNA, 5838 bp, Zea Mays
cgtgcgcggcagcgagcgtgcgtacacgtcacgcaccacgtcagaagccccccaacccaccggtcccccactcagaccgtccgacgaacgactcgacgactgtcgactcctgcacaggcaacacctcacctcgatgatgcatccgctccgccgcatcctcgctctcttactcgtcggcctcctccccgcggccgcgtggtccttggcaccaccccgcttcccgaggccccaaccccgctcgcggccgggagctaatggggtgggagactacgagtacgagacgcgatacttccggcagcggctggaccacttcagctttccaggggtcggggacgaggacgaggacgaggcggctgcgttcttccagcagcggtacctggtgggccgcggcggtgggtgggctggacccggcggccccatcttcttctactgcggcaacgagggcgacatcgcctggttcgccgccaactccggcctcgtctgggaggccgccccacgcttcgccgccctcgtcgtcttcgccgagcatcgctactacggagagtccatgcctttcggtagcaaagccaaggcgtacagcgactccaagtccctggcgtatctcacggccgagcaggcgcttgctgactttgctgtgctgctcactgacctcaagaggaacctatcggcagagggcagccccgttgtgctctttgggggctcatacggtggaactgcttggatgagactcaaatatccccatattgctattggggctctcgcatcatcagctccgatcctgcagtttgaggacattgttccttctactatattctatgatctcgtatctgatgattttaggagggaaagtttaagttgttttcttacaataaaagactcctggaaagaattagatgaccaagcaaacgagcaagatggtcttctgaaactaagtaaaacgttccacctttgccagaccctgaaaacaagtggagacctttcagattggttgagctcagcgtacagttatctggccatggtggattacccacttccatcagaatttctcatgcctttgccagccaatcctattaaagaagtatgcagaaatatcgacagtcaacctaagggtactggtactctggaacgtatatatgcaggagtaaatgtatactacaattatactggcactgttgactgctttgatctaaatgatgacccccatggaatgggtggatgggactggcaggcttgtaccgagatggtaatgccaatgtcttacagtgaacaaaggagcatgtatccaccttataaatttgactacgcttcctatgctgaggattgcatcaaaagctatggtgtcaggccaaggcctaagtggattacaacagaatttggtgggcataatatcactaaggtcctggaaaattttggtagtaacatcatattcttcaacggacttcttgacccatggagtggcggaggtgtcctgaagaatatatctgagagtgtcgttgctattgtggctccattaggagcacatcacatcgatctgcgcccggcaactccagatgacccggattggctggtggccctgagagaatcagagctggagatcatatctggctggctatgggattactacggggctggaggagcactcttccagcctgtagctgtgaagggctcctcttcatactgaggaaccgcaccctggctaataactcaaatgcttggtctcagaaataagagggccctgctgcaagtgccaaccaccgttaatgctgctgcagtgctgcgtcatggagaaggaagatcttcatgttgatgatcgggtccgctcctgcatcatgtgccatatcagtagcatttggtctgtgtatcaaatgggacatgtacttggctgatgaggtgaggaaaacactggataacgtaacgactctttcgcagtggtggtggcggtcagcaggtgctctagaggcttgatatcacgtgcatgtgccgctgtaaataacataatgctctatgtacgtgtacatctctactactctataagcctgtagtgtaggcgtgcacaccccgtgcaccgtgttctgcctccaacgtcctctcgcccacgcgctccgtcaatcacgcaagttatgccaccgatgtcgcccgaccgccccatccgcattgcccccacccccgtccgccgctagatgcggatcccgccgcttccagcatccagccaagcccgtgagccgcacgccgctcctgctcccgctccgagcgccttaggtcaggcggcgttggcccgacggcggggggaggcatcacgctgccatccatgggcgcgcccccgccgccgctgcacccgacgcccacctctcccacggcgcgcccgcaccaccaccactacctcttctccatcaagcagctcaacacgctgggcgcggcggccgtgctcgccttctccaccacggtcccgctctcggagactgccttcgcggtgctcctcccccctacctcctcgtcctcgcctggctcgccttcccgcagcgcccaggccgctcgagacccggatcccgcctctacccctcggcaccatcgtcagtgtcttcgatggccacaacggccccgacgcccccaccccgacagacactgagccctcttccgctcgcgtgactggtgccccctcaaccctcgactctcctccccaccgtggccccttccccagccccagtgaccagcgcctcccttcctaagtgcggccatggcgaccatcgtgccctagcccgcccctgcaccatggcaagcacaccccttctactcctctcgccccaacccctgtgcagcccagcgcggtggcctataacccacagcaaggcgcaactagctggctggtggccctgccccggtgagcccctgctaggcgcggccagcaacccccgtggtctagcccctgcctaggcacacccaaaacccctgcccttgcaacttgtcctcggcgccgccccactcgcccgagatctgccgcgacaacaggaattggacgtacattgggactttgaagtgcagctaaggctacctggcgattggtggaaagagatctgatgacggcgatcatggtcgaagagtaggagaggccctagaagaaagcggaataaatgcaccgagctgagaaaggacagaacaaagaaagatcttaaaatcaaagctaaagaagtggagattcaaaatctaaaaaaaagctaatgtcatggaataaatgaggttgatgtggagctaaaaagggaggctatgtttttttgggtgaggcggttatcattggcttgttatgtgaacattattgtgatgtggtttcatgttgtccaggtgccagtttaacaactttttgcaccaccatgtcgagaatatcattgggtcatgtctggagagtaataatgatcaactgatgggccatgtccttgatgagtgtaaacttgttacaagaattttggaagcagagaagaactctgctctatcgtcagaattggacggtcgcatcgacgccaggttccagcagaggagtcgttactctccttgattccttcaccgagttcaccgaggaatatgaactgaaaatgaaagagaagggtgagcaactgattgtaagatctttcatcagtgcaacctctccttttttagctttcatcagtgctacactcccacagtccccacatgcacgcagatgtttgaaaatataaaataaaatcaacaacactgcaaatttactagctcaactacaagaggcatggagttattattaaaaaatgaagtactcatgatgaattccaaacaaaaaatctgacctaataatcaacataatataaattgttgtagctcagtcctatagtcatactgagctactgattagaatgttcaagaatgaaccattagatttcctgtgctaaaatgaggattgatcataagactaatgacgatcaagactatcaaggcccctacaaacaaagctcatgggaaattagaaagtgaaatgaaataccatgttgaaaacagggccaaagtagctagcaattcaaagaggcaaaatgctgcaaaatataatgcttcatgagttgttttcggtgttgtcaaaatctcaggtgccacaatggatgaaagaacaacatgtagaattgggttccaaaggacttgagggctacttcatcacaacctgtaactgaagatcttgaataactgactacatcaccatgcaagactaaagtttttattttattaagaaaatgaccccaaagaagaagatgtgtgatatatccctgatgactgcatatgtgttgagggttactacacactgaaaaatagaataacagactctgtggctgttagtgaagagggattagtcaaaaagagaacaaggcgtccaaaacctgttggcaatgagggggctgtcagaaagagaagaggctctgccatcccacaactataattgttcaatatatatggctgaattgaagggagaagatgatttatcagcaggctctatgagcacaactgcatagtcaagacataattcttcggcccctgcagacttcaagcagctaagaagtgttacgcccattgacatctttccacgacaagagacctgggcaagagaatccggacgtgctgagggggagaggaaggagaggaggaagatatcgggcaagagaacccattgacatccttggatagggtccgtctgatgccattcatcgctgtctttgatctcaggaaggcatcttagccagctcaattttattagaaatattgttgttttaagatacagagtccatggttactattgtacgcttttctgagaaacttgtcatcccaataatttggttctggagctatatactgatctagcttgttttagtaacaaatgtaagttgctcacatttcctttagactgtcactagaactttgaacgatcaactcgtgcttctaaatcaagaattaccatatgtgttttttgagttcgatcccttctattttttatttggccaccaaacgaagtttttacatgacaagaatgttataaatacttctttaaatcacgagtttcgtgtgtcacgtacgtgcaatgtaggtatatttctctttcatgcttctcgcgatcgattgtgccgtcgcaacgcacgggcattaacctagtctgtacatatgctgccagtgtgctgtgtgcgtctggtgtcgcactcgagtagtacgcgacgggtctcctgcggccctgttggagtcgtcaattgtcagccaccttcgaatacgagtagggatgacaattgacaacggggacagaccaggagctgtatgaaataaagaacattgtagatgctcttaatgagcaacgcgagaagttgcaagagcaaagaaagctgcttcattcagaccgagaaccaatctgacagcaaatccagcagcttactgggttagaagagctgaaaattgaatctgagaacgggcaactaactgtctttgacacaatgtgagaacttaaagaaataaaggtggcgtggaaaacctgaaagagaacggtgttcacatgtctcctgacgagaggatgtataaaaacgcaaatgcaaagcacactactgtgaagagattggaaccgtctcctgcgatccacaccaattttcctgggtgttattagaaaatgtgctcaggtgatattcaaaggctgtgcagagaagagcgctgatgatccccacaacacaacgatagattggtacctgcaaagttggcaatgcaaatgtcaatggctctagcttaattagctgctgctgcctattcagatgaactgttatttggtcatcagctggaaaatggtgctgggaa

SEQ ID NO: 75023 - DNA, 5003 bp, Zea Mays
cgtgcgcggcagcgagcgtgcgtacacgtcacgcaccacgtcagaagccccccaacccaccggtcccccactcagaccgtccgacgaacgactcgacgactgtcgactcctgcacaggcaacacctcacctcgatgatgcatccgctccgccgcatcctcgctctcttactcgtcggcctcctccccgcggccgcgtggtccttggcaccaccccgcttcccgaggccccaaccccgctcgcggccgggagctaatggggtgggagactacgagtacgagacgcgatacttccggcagcggctggaccacttcagctttccaggggtcggggacgaggacgaggacgaggcggctgcgttcttccagcagcggtacctggtgggccgcggcggtgggtgggctggacccggcggccccatcttcttctactgcggcaacgagggcgacatcgcctggttcgccgccaactccggcctcgtctgggaggccgccccacgcttcgccgccctcgtcgtcttcgccgagcatcgctactacggagagtccatgcctttcggtagcaaagccaaggcgtacagcgactccaagtccctggcgtatctcacggccgagcaggcgcttgctgactttgctgtgctgctcactgacctcaagaggaacctatcggcagagggcagccccgttgtgctctttgggggctcatacggtggaactgcttggatgagactcaaatatccccatattgctattggggctctcgcatcatcagctccgatcctgcagtttgaggacattgttccttctactatattctatgatctcgtatctgatgattttaggagggaaagtttaagttgttttcttacaataaaagactcctggaaagaattagatgaccaagcaaacgagcaagatggtcttctgaaactaagtaaaacgttccacctttgccagaccctgaaaacaagtggagacctttcagattggttgagctcagcgtacagttatctggccatggtggattacccacttccatcagaatttctcatgcctttgccagccaatcctattaaagaagtatgcagaaatatcgacagtcaacctaagggtactggtactctggaacgtatatatgcaggagtaaatgtatactacaattatactggcactgttgactgctttgatctaaatgatgacccccatggaatgggtggatgggactggcaggcttgtaccgagatggtaatgccaatgtcttacagtgaacaaaggagcatgtatccaccttataaatttgactacgcttcctatgctgaggattgcatcaaaagctatggtgtcaggccaaggcctaagtggattacaacagaatttgaatatcactaaggtcctggaaaattttggtagtaacatcatattcttcaacggacttcttgacccatggagtggcggaggtgtcctgaagaatatatctgagagtgtcgttgctattgtggctccattaggagcacatcacatcgatctgcgcccggcaactccagatgacccggattggctggtggccctgagagaatcagagctggagatcatatctggctggctatgggattactacggggctggaggagcactcttccagcctgtagctgtgaagggctcctcttcatactgaggaaccgcaccctggctaataactcaaatgcttggtctcagaaataagagggccctgctgcaagtgccaaccaccgttaatgctgctgcagtgctgcgtcatggagaaggaagatcttcatgttgatgatcgggtccgctcctgcatcatgtgccatatcagtagcatttggtctgtgtatcaaatgggacatgtacttggctgatgaggtgaggaaaacactggataacgtaacgactctttcgcagtggtggtggcggtcagcaggtgctctagaggcttgatatcacgtgcatgtgccgctgtaaataacataatgctctatgtacgtgtacatctctactactctataagcctgtagtgtaggcgtgcacaccccgtgcaccgtgttctgcctccaacgtcctctcgcccacgcgctccgtcaatcacgcaagttatgccaccgatgtcgcccgaccgccccatccgcattgcccccacccccgtccgccgctagatgcggatcccgccgcttccagcatccagccaagcccgtgagccgcacgccgctcctgctcccgctccgagcgccttaggtcaggcggcgttggcccgacggcggggggaggcatcacgctgccatccatgggcgcgcccccgccgccgctgcacccgacgcccacctctcccacggcgcgcccgcaccaccaccactacctcttctccatcaagcagctcaacacgctgggcgcggcggccgtgctcgccttctccaccacggtcccgctctcggagactgccttcgcggtgctcctcccccctacctcctcgtcctcgcctggctcgccttcccgcagcgcccaggccgctcgagacccggatcccgcctctacccctcggcaccatcgtcagtgtcttcgatggccacaacggccccgacgcccccaccccgacagacactgagccctcttccgctcgcgtgactggtgccccctcaaccctcgactctcctccccaccgtggccccttccccagccccagtgaccagcgcctcccttcctaagtgcggccatggcgaccatcgtgccctagcccgcccctgcaccatggcaagcacaccccttctactcctctcgccccaacccctgtgcagcccagcgcggtggcctataacccacagcaaggcgcaactagctggctggtggccctgccccggtgagcccctgctaggcgcggccagcaacccccgtggtctagcccctgcctaggcacacccaaaacccctgcccttgcaacttgtcctcggcgccgccccactcgcccgagatctgccgcgacaacaggaattggacgtacattgggactttgaagtgcagctaaggctacctggcgattggtggaaagagatctgatgacggcgatcatggtcgaagagtaggagaggccctagaagaaaggtgacatattctcgttcttcggcagcggaataaatgcaccgagctgagaaaggacagaacaaagaaagatcttaaaatcaaagctaaagaagtggagattcaaaatctaaaaaaaagctaatgtcatggaataaatgaggttgatgtggagctaaaaagggaggctatgtttttttgggtgaggcggttatcattggcttgttatgtgaacattattgtgatgtggtttcatgttgtccaggtgccagtttaacaactttttgcaccaccatgtcgagaatatcattgggtcatgtctggagagtaataatgatcaactgatgggccatgtccttgatgagtgtaaacttgttacaagaattttggaagcagagaagaactctgctctatcgtcagaattggacggtcgcatcgacgccaggttccagcagaggagtcgttactctccttgattccttcaccgagttcaccgaggaatatgaactgaaaatgaaagagaagggtgagcaactgattatggctgaattgaagggagaagatgatttatcagcaggctctatgagcacaactgcatagtcaagacataattcttcggcccctgcagacttcaagcagctaagaagtgttacgcccattgacatctttccacgacaagagacctgggcaagagaatccggacgtgctgagggggagaggaaggagaggaggaagatatcgggcaagagaacccattgacatccttggatagggtccgtctgatgccattcatcgctgtctttgatctcaggaaggcatcttagccagctcaattttattagaaatattgttgttttaagatacagagtccatggttactattgtacgcttttctgagaaacttgtcatcccaataatttggttctggagctatatactgatctagcttgttttagtaacaaatgtaagttgctcacatttcctttagactgtcactagaactttgaacgatcaactcgtgcttctaaatcaagaattaccatatgtgttttttgagttcgatcccttctattttttatttggccaccaaacgaagtttttacatgacaagaatgttataaatacttctttaaatcacgagtttcgtgtgtcacgtacgtgcaatgtaggtatatttctctttcatgcttctcgcgatcgattgtgccgtcgcaacgcacgggcattaacctagtctgtacatatgctgccagtgtgctgtgtgcgtctggtgtcgcactcgagtagtacgcgacgggtctcctgcggccctgttggagtcgtcaattgtcagccaccttcgaatacgagtagggatgacaattgacaacggggacagaccaggagctgtatgaaataaagaacattgtagatgctcttaatgagcaacgcgagaagttgcaagagcaaagaaagctgcttcattcagaccgagaaccaatctgacagcaaatccagcagcttactgggttagaagagctgaaaattgaatctgagaacgggcaactaactgtctttgacacaatgtgagaacttaaagaaataaaggtggcgtggaaaacctgaaagagaacggtgttcacatgtctcctgacgagaggatgtataaaaacgcaaatgcaaagcacactactgtgaagagattggaaccgtctcctgcgatccacaccaattttcctgggtgttattagaaaatgtgctcaggtgatattcaaaggctgtgcagagaagagcgctgatgatccccacaacacaacgatagattggtacctgcaaagttggcaatgcaaatgtcaatggctctagcttaattagctgctgctgcctattcagatgaactgttatttggtcatcagctggaaaatggtgctgggaa

SEQ ID NO: 75024 - DNA, 5676 bp, Zea Mays
cgtgcgcggcagcgagcgtgcgtacacgtcacgcaccacgtcagaagccccccaacccaccggtcccccactcagaccgtccgacgaacgactcgacgactgtcgactcctgcacaggcaacacctcacctcgatgatgcatccgctccgccgcatcctcgctctcttactcgtcggcctcctccccgcggccgcgtggtccttggcaccaccccgcttcccgaggccccaaccccgctcgcggccgggagctaatggggtgggagactacgagtacgagacgcgatacttccggcagcggctggaccacttcagctttccaggggtcggggacgaggacgaggacgaggcggctgcgttcttccagcagcggtacctggtgggccgcggcggtgggtgggctggacccggcggccccatcttcttctactgcggcaacgagggcgacatcgcctggttcgccgccaactccggcctcgtctgggaggccgccccacgcttcgccgccctcgtcgtcttcgccgaggcaatcgttcttccgcggcctcactcgtctcgtagtcgtactcgtgtctcttcttcgttttaaaaactttccgtttgaaacgctgtattgtttatggtgcgagcggtggccgctcgcttgtgtgctgcagcatcgctactacggagagtccatgcctttcggtagcaaagccaaggcgtacagcgactccaagtccctggcgtatctcacggccgagcaggcgcttgctgactttgctgtgctgctcactgacctcaagaggaacctatcggcagagggcagccccgttgtgctctttgggggctcatacggtggaatgctagctgcttggatgagactcaaatatccccatattgctattggggctctcgcatcatcagctccgatcctgcagtttgaggacattgttccttctactatattctatgatctcgtatctgatgattttaggagggaaagtttaagttgttttcttacaataaaagactcctggaaagaattagatgaccaagcaaacgagcaagatggtcttctgaaactaagtaaaacgttccacctttgccagaccctgaaaacaagtggagacctttcagattggttgagctcagcgtacagttatctggccatggtggattacccacttccatcagaatttctcatgcctttgccagccaatcctattaaagaagtatgcagaaatatcgacagtcaacctaagggtactggtactctggaacgtatatatgcaggagtaaatgtatactacaattatactggcactgttgactgctttgatctaaatgatgacccccatggaatgggtggatgggactggcaggcttgtaccgagatggtaatgccaatgtcttacagtgaacaaaggagcatgtatccaccttataaatttgactacgcttcctatgctgaggattgcatcaaaagctatggtgtcaggccaaggcctaagtggattacaacagaatttggtgggcataatatcactaaggtcctggaaaattttggtagtaacatcatattcttcaacggacttcttgacccatggagtggcggaggtgtcctgaagaatatatctgagagtgtcgttgctattgtggctccattaggagcacatcacatcgatctgcgcccggcaactccagatgacccggattggctggtggccctgagagaatcagagctggagatcatatctggctggctatgggattactacggggctggaggagcactcttccagcctgtagctgtgaagggctcctcttcatactgaggaaccgcaccctggctaataactcaaatgcttggtctcagaaataagagggccctgctgcaagtgccaaccaccgttaatgctgctgcagtgctgcgtcatggagaaggaagatcttcatgttgatgatcgggtccgctcctgcatcatgtgccatatcagtagcatttggtctgtgtatcaaatgggacatgtacttggctgatgaggtgaggaaaacactggataacgtaacgactctttcgcagtggtggtggcggtcagcaggtgctctagaggcttgatatcacgtgcatgtgccgctgtaaataacataatgctctatgtacgtgtacatctctactactctataagcctgtagtgtaggcgtgcacaccccgtgcaccgtgttctgcctccaacgtcctctcgcccacgcgctccgtcaatcacgcaagttatgccaccgatgtcgcccgaccgccccatccgcattgcccccacccccgtccgccgctagatgcggatcccgccgcttccagcatccagccaagcccgtgagccgcacgccgctcctgctcccgctccgagcgccttaggtcaggcggcgttggcccgacggcggggggaggcatcacgctgccatccatgggcgcgcccccgccgccgctgcacccgacgcccacctctcccacggcgcgcccgcaccaccaccactacctcttctccatcaagcagctcaacacgctgggcgcggcggccgtgctcgccttctccaccacggtcccgctctcggagactgccttcgcggtgctcctcccccctacctcctcgtcctcgcctggctcgccttcccgcagcgcccaggccgctcgagacccggatcccgcctctacccctcggcaccatcgtcagtgtcttcgatggccacaacggccccgacgcccccaccccgacagacactgagccctcttccgctcgcgtgactggtgccccctcaaccctcgactctcctccccaccgtggccccttccccagccccagtgaccagcgcctcccttcctaagtgcggccatggcgaccatcgtgccctagcccgcccctgcaccatggcaagcacaccccttctactcctctcgccccaacccctgtgcagcccagcgcggtggcctataacccacagcaaggcgcaactagctggctggtggccctgccccggtgagcccctgctaggcgcggccagcaacccccgtggtctagcccctgcctaggcacacccaaaacccctgcccttgcaacttgtcctcggcgccgccccactcgcccgagatctgccgcgacaacaggaattggacgtacattgggactttgaagtgcagctaaggctacctggcgattggtggaaagagatctgatgacggcgatcatggtcgaagagtaggagaggccctagaagaaaggtgacatattctcgttcttcggcagcggaataaatgcaccgagctgagaaaggacagaacaaagaaagatcttaaaatcaaagctaaagaagtggagattcaaaatctaaaaaaaagctaatgtcatggaataaatgaggttgatgtggagctaaaaagggaggctatgtttttttgggtgaggcggttatcattggcttgttatgtgaacattattgtgatgtggtttcatgttgtccaggtgccagtttaacaactttttgcaccaccatgtcgagaatatcattgggtcatgtctggagagtaataatgatcaactgatgggccatgtccttgatgagtgtaaacttgttacaagaattttggaagcagagaagaactctgctctatcgtcagaattggacggtcgcatcgacgccaggttccagcagaggagtcgttactctccttgattccttcaccgagttcaccgaggaatatgaactgaaaatgaaagagaaggggccaaagtagctagcaattcaaagaggcaaaatgctgcaaaatataatgcttcatgaggtgccacaatggatgaaagaacaacatgtagaattgggttccaaaggacttgagggctacttcatcacaacctgtaactgaagatcttgaataactgactacatcaccatgcaagactaaagtttttattttattaagaaaatgaccccaaagaagaagatgtgtgatatatccctgatgactgcatatgtgttgagggttactacacactgaaaaatagaataacagactctgtggctgttagtgaagagggattagtcaaaaagagaacaaggcgtccaaaacctgttggcaatgagggggctgtcagaaagagaagaggctctgccatcccacaactataattgttcaatatatgtatgcattagacttcttaattctattaacttattgaattgtatgtgcatgaagttttttctttcatgtattacaccgcatgacatagttctttaactaatggcagtgtacctttttaaacctttagatggctgaattgaagggagaagatgatttatcagcaggctctatgagcacaactgcatagtcaagacataattcttcggcccctgcagacttcaagcagctaagaagtgttacgcccattgacatctttccacgacaagagacctgggcaagagaatccggacgtgctgagggggagaggaaggagaggaggaagatatcgggcaagagaacccattgacatccttggatagggtccgtctgatgccattcatcgctgtctttgatctcaggaaggcatcttagccagctcaattttattagaaatattgttgttttaagatacagagtccatggttactattgtacgcttttctgagaaacttgtcatcccaataatttggttctggagctatatactgatctagcttgttttagtaacaaatgtaagttgctcacatttcctttagactgtcactagaactttgaacgatcaactcgtgcttctaaatcaagaattaccatatgtgttttttgagttcgatcccttctattttttatttggccaccaaacgaagtttttacatgacaagaatgttataaatacttctttaaatcacgagtttcgtgtgtcacgtacgtgcaatgtaggtatatttctctttcatgcttctcgcgatcgattgtgccgtcgcaacgcacgggcattaacctagtctgtacatatgctgccagtgtgctgtgtgcgtctggtgtcgcactcgagtagtacgcgacgggtctcctgcggccctgttggagtcgtcaattgtcagccaccttcgaatacgagtagggatgacaattgacaacggggacagaccaggagctgtatgaaataaagaacattgtagatgctcttaatgagcaacgcgagaagttgcaagagcaaagaaagctgcttcattcagaccgagaaccaatctgacagcaaatccagcagcttactgggttagaagagctgaaaattgaatctgagaacgggcaactaactgtctttgacacaatgtgagaacttaaagaaataaaggtggcgtggaaaacctgaaagagaacggtgttcacatgtctcctgacgagaggatgtataaaaacgcaaatgcaaagcacactactgtgaagagattggaaccgtctcctgcgatccacaccaattttcctgggtgttattagaaaatgtgctcaggtgatattcaaaggctgtgcagagaagagcgctgatgatccccacaacacaacgatagattggtacctgcaaagttggcaatgcaaatgtcaatggctctagcttaattagctgctgctgcctattcagatgaactgttatttggtcatcagctggaaaatggtgctgggaa

SEQ ID NO: 75025 - DNA, 5105 bp, Zea Mays
cgtgcgcggcagcgagcgtgcgtacacgtcacgcaccacgtcagaagccccccaacccaccggtcccccactcagaccgtccgacgaacgactcgacgactgtcgactcctgcacaggcaacacctcacctcgatgatgcatccgctccgccgcatcctcgctctcttactcgtcggcctcctccccgcggccgcgtggtccttggcaccaccccgcttcccgaggccccaaccccgctcgcggccgggagctaatggggtgggagactacgagtacgagacgcgatacttccggcagcggctggaccacttcagctttccaggggtcggggacgaggacgaggacgaggcggctgcgttcttccagcagcggtacctggtgggccgcggcggtgggtgggctggacccggcggccccatcttcttctactgcggcaacgagggcgacatcgcctggttcgccgccaactccggcctcgtctgggaggccgccccacgcttcgccgccctcgtcgtcttcgccgaggcaatcgttcttccgcggcctcactcgtctcgtagtcgtactcgtgtctcttcttcgttttaaaaactttccgtttgaaacgctgtattgtttatggtgcgagcggtggccgctcgcttgtgtgctgcagcatcgctactacggagagtccatgcctttcggtagcaaagccaaggcgtacagcgactccaagtccctggcgtatctcacggccgagcaggcgcttgctgactttgctgtgctgctcactgacctcaagaggaacctatcggcagagggcagccccgttgtgctctttgggggctcatacggtggaatgctagctgcttggatgagactcaaatatccccatattgctattggggctctcgcatcatcagctccgatcctgcagtttgaggacattgttccttctactatattctatgatctcgtatctgatgattttaggagggaaagtttaagttgttttcttacaataaaagactcctggaaagaattagatgaccaagcaaacgagcaagatggtcttctgaaactaagtaaaacgttccacctttgccagaccctgaaaacaagtggagacctttcagattggttgagctcagcgtacagttatctggccatggtggattacccacttccatcagaatttctcatgcctttgccagccaatcctattaaagaagtatgcagaaatatcgacagtcaacctaagggtactggtactctggaacgtatatatgcaggagtaaatgtatactacaattatactggcactgttgactgctttgatctaaatgatgacccccatggaatgggtggatgggactggcaggcttgtaccgagatggtaatgccaatgtcttacagtgaacaaaggagcatgtatccaccttataaatttgactacgcttcctatgctgaggattgcatcaaaagctatggtgtcaggccaaggcctaagtggattacaacagaatttggtgggcataatatcactaaggtcctggaaaattttggtagtaacatcatattcttcaacggacttcttgacccatggagtggcggaggtgtcctgaagaatatatctgagagtgtcgttgctattgtggctccattaggagcacatcacatcgatctgcgcccggcaactccagatgacccggattggctggtggccctgagagaatcagagctggagatcatatctggctggctatgggattactacggggctggaggagcactcttccagcctgtagctgtgaagggctcctcttcatactgaggaaccgcaccctggctaataactcaaatgcttggtctcagaaataagagggccctgctgcaagtgccaaccaccgttaatgctgctgcagtgctgcgtcatggagaaggaagatcttcatgttgatgatcgggtccgctcctgcatcatgtgccatatcagtagcatttggtctgtgtatcaaatgggacatgtacttggctgatgaggtgaggaaaacactggataacgtaacgactctttcgcagtggtggtggcggtcagcaggtgctctagaggcttgatatcacgtgcatgtgccgctgtaaataacataatgctctatgtacgtgtacatctctactactctataagcctgtagtgtaggcgtgcacaccccgtgcaccgtgttctgcctccaacgtcctctcgcccacgcgctccgtcaatcacgcaagttatgccaccgatgtcgcccgaccgccccatccgcattgcccccacccccgtccgccgctagatgcggatcccgccgcttccagcatccagccaagcccgtgagccgcacgccgctcctgctcccgctccgagcgccttaggtcaggcggcgttggcccgacggcggggggaggcatcacgctgccatccatgggcgcgcccccgccgccgctgcacccgacgcccacctctcccacggcgcgcccgcaccaccaccactacctcttctccatcaagcagctcaacacgctgggcgcggcggccgtgctcgccttctccaccacggtcccgctctcggagactgccttcgcggtgctcctcccccctacctcctcgtcctcgcctggctcgccttcccgcagcgcccaggccgctcgagacccggatcccgcctctacccctcggcaccatcgtcagtgtcttcgatggccacaacggccccgacgcccccaccccgacagacactgagccctcttccgctcgcgtgactggtgccccctcaaccctcgactctcctccccaccgtggccccttccccagccccagtgaccagcgcctcccttcctaagtgcggccatggcgaccatcgtgccctagcccgcccctgcaccatggcaagcacaccccttctactcctctcgccccaacccctgtgcagcccagcgcggtggcctataacccacagcaaggcgcaactagctggctggtggccctgccccggtgagcccctgctaggcgcggccagcaacccccgtggtctagcccctgcctaggcacacccaaaacccctgcccttgcaacttgtcctcggcgccgccccactcgcccgagatctgccgcgacaacaggaattggacgtacattgggactttgaagtgcagctaaggctacctggcgattggtggaaagagatctgatgacggcgatcatggtcgaagagtaggagaggccctagaagaaaggtgacatattctcgttcttcggcagcggaataaatgcaccgagctgagaaaggacagaacaaagaaagatcttaaaatcaaagctaaagaagtggagattcaaaatctaaaaaaaagctaatgtcatggaataaatgaggttgatgtggagctaaaaagggaggctatgtttttttgggtgaggcggttatcattggcttgttatgtgaacattattgtgatgtggtttcatgttgtccaggtgccagtttaacaactttttgcaccaccatgtcgagaatatcattgggtcatgtctggagagtaataatgatcaactgatgggccatgtccttgatgagtgtaaacttgttacaagaattttggaagcagagaagaactctgctctatcgtcagaattggacggtcgcatcgacgccaggttccagcagaggagtcgttactctccttgattccttcaccgagttcaccgagatggctgaattgaagggagaagatgatttatcagcaggctctatgagcacaactgcatagtcaagacataattcttcggcccctgcagacttcaagcagctaagaagtgttacgcccattgacatctttccacgacaagagacctgggcaagagaatccggacgtgctgagggggagaggaaggagaggaggaagatatcgggcaagagaacccattgacatccttggatagggtccgtctgatgccattcatcgctgtctttgatctcaggaaggcatcttagccagctcaattttattagaaatattgttgttttaagatacagagtccatggttactattgtacgcttttctgagaaacttgtcatcccaataatttggttctggagctatatactgatctagcttgttttagtaacaaatgtaagttgctcacatttcctttagactgtcactagaactttgaacgatcaactcgtgcttctaaatcaagaattaccatatgtgttttttgagttcgatcccttctattttttatttggccaccaaacgaagtttttacatgacaagaatgttataaatacttctttaaatcacgagtttcgtgtgtcacgtacgtgcaatgtaggtatatttctctttcatgcttctcgcgatcgattgtgccgtcgcaacgcacgggcattaacctagtctgtacatatgctgccagtgtgctgtgtgcgtctggtgtcgcactcgagtagtacgcgacgggtctcctgcggccctgttggagtcgtcaattgtcagccaccttcgaatacgagtagggatgacaattgacaacggggacagaccaggagctgtatgaaataaagaacattgtagatgctcttaatgagcaacgcgagaagttgcaagagcaaagaaagctgcttcattcagaccgagaaccaatctgacagcaaatccagcagcttactgggttagaagagctgaaaattgaatctgagaacgggcaactaactgtctttgacacaatgtgagaacttaaagaaataaaggtggcgtggaaaacctgaaagagaacggtgttcacatgtctcctgacgagaggatgtataaaaacgcaaatgcaaagcacactactgtgaagagattggaaccgtctcctgcgatccacaccaattttcctgggtgttattagaaaatgtgctcaggtgatattcaaaggctgtgcagagaagagcgctgatgatccccacaacacaacgatagattggtacctgcaaagttggcaatgcaaatgtcaatggctctagcttaattagctgctgctgcctattcagatgaactgttatttggtcatcagctggaaaatggtgctgggaa

SEQ ID NO: 75026 - DNA, 5662 bp, Zea Mays
cgtgcgcggcagcgagcgtgcgtacacgtcacgcaccacgtcagaagccccccaacccaccggtcccccactcagaccgtccgacgaacgactcgacgactgtcgactcctgcacaggcaacacctcacctcgatgatgcatccgctccgccgcatcctcgctctcttactcgtcggcctcctccccgcggccgcgtggtccttggcaccaccccgcttcccgaggccccaaccccgctcgcggccgggagctaatggggtgggagactacgagtacgagacgcgatacttccggcagcggctggaccacttcagctttccaggggtcggggacgaggacgaggacgaggcggctgcgttcttccagcagcggtacctggtgggccgcggcggtgggtgggctggacccggcggccccatcttcttctactgcggcaacgagggcgacatcgcctggttcgccgccaactccggcctcgtctgggaggccgccccacgcttcgccgccctcgtcgtcttcgccgaggcaatcgttcttccgcggcctcactcgtctcgtagtcgtactcgtgtctcttcttcgttttaaaaactttccgtttgaaacgctgtattgtttatggtgcgagcggtggccgctcgcttgtgtgctgcagcatcgctactacggagagtccatgcctttcggtagcaaagccaaggcgtacagcgactccaagtccctggcgtatctcacggccgagcaggcgcttgctgactttgctgtgctgctcactgacctcaagaggaacctatcggcagagggcagccccgttgtgctctttgggggctcatacggtggaatgctagctgcttggatgagactcaaatatccccatattgctattggggctctcgcatcatcagctccgatcctgcagtttgaggacattgttccttctactatattctatgatctcgtatctgatgattttaggagggaaagtttaagttgttttcttacaataaaagactcctggaaagaattagatgaccaagcaaacgagcaagatggtcttctgaaactaagtaaaacgttccacctttgccagaccctgaaaacaagtggagacctttcagattggttgagctcagcgtacagttatctggccatggtggattacccacttccatcagaatttctcatgcctttgccagccaatcctattaaagaagtatgcagaaatatcgacagtcaacctaagggtactggtactctggaacgtatatatgcaggagtaaatgtatactacaattatactggcactgttgactgctttgatctaaatgatgacccccatggaatgggtggatgggactggcaggcttgtaccgagatggtaatgccaatgtcttacagtgaacaaaggagcatgtatccaccttataaatttgactacgcttcctatgctgaggattgcatcaaaagctatggtgtcaggccaaggcctaagtggattacaacagaatttggtgggcataatatcactaaggtcctggaaaattttggtagtaacatcatattcttcaacggacttcttgacccatggagtggcggaggtgtcctgaagaatatatctgagagtgtcgttgctattgtggctccattaggagcacatcacatcgatctgcgcccggcaactccagatgacccggattggctggtggccctgagagaatcagagctggagatcatatctggctggctatgggattactacggggctggaggagcactcttccagcctgtagctgtgaagggctcctcttcatactgaggaaccgcaccctggctaataactcaaatgcttggtctcagaaataagagggccctgctgcaagtgccaaccaccgttaatgctgctgcagtgctgcgtcatggagaaggaagatcttcatgttgatgatcgggtccgctcctgcatcatgtgccatatcagtagcatttggtctgtgtatcaaatgggacatgtacttggctgatgaggtgaggaaaacactggataacgtaacgactctttcgcagtggtggtggcggtcagcaggtgctctagaggcttgatatcacgtgcatgtgccgctgtaaataacataatgctctatgtacgtgtacatctctactactctataagcctgtagtgtaggcgtgcacaccccgtgcaccgtgttctgcctccaacgtcctctcgcccacgcgctccgtcaatcacgcaagttatgccaccgatgtcgcccgaccgccccatccgcattgcccccacccccgtccgccgctagatgcggatcccgccgcttccagcatccagccaagcccgtgagccgcacgccgctcctgctcccgctccgagcgccttaggtcaggcggcgttggcccgacggcggggggaggcatcacgctgccatccatgggcgcgcccccgccgccgctgcacccgacgcccacctctcccacggcgcgcccgcaccaccaccactacctcttctccatcaagcagctcaacacgctgggcgcggcggccgtgctcgccttctccaccacggtcccgctctcggagactgccttcgcggtgctcctcccccctacctcctcgtcctcgcctggctcgccttcccgcagcgcccaggccgctcgagacccggatcccgcctctacccctcggcaccatcgtcagtgtcttcgatggccacaacggccccgacgcccccaccccgacagacactgagccctcttccgctcgcgtgactggtgccccctcaaccctcgactctcctccccaccgtggccccttccccagccccagtgaccagcgcctcccttcctaagtgcggccatggcgaccatcgtgccctagcccgcccctgcaccatggcaagcacaccccttctactcctctcgccccaacccctgtgcagcccagcgcggtggcctataacccacagcaaggcgcaactagctggctggtggccctgccccggtgagcccctgctaggcgcggccagcaacccccgtggtctagcccctgcctaggcacacccaaaacccctgcccttgcaacttgtcctcggcgccgccccactcgcccgagatctgccgcgacaacaggaattggacgtacattgggactttgaagtgcagctaaggctacctggcgattggtggaaagagatctgatgacggcgatcatggtcgaagagtaggagaggccctagaagaaaggtgacatattctcgttcttcggcagcggaataaatgcaccgagctgagaaaggacagaacaaagaaagatcttaaaatcaaagctaaagaagtggagattcaaaatctaaaaaaaagctaatgtcatggaataaatgaggttgatgtggagctaaaaagggaggctatgtttttttgggtgaggcggttatcattggcttgttatgtgaacattattgtgatgtggtttcatgttgtccaggtgccagtttaacaactttttgcaccaccatgtcgagaatatcattgggtcatgtctggagagtaataatgatcaactgatgggccatgtccttgatgagtgtaaacttgttacaagaattttggaagcagagaagaactctgctctatcgtcagaattggacggtcgcatcgacgccaggttccagcagaggagtcgttactctccttgattccttcaccgagttcaccgaggtgccatactctcgaaacaaatacttgataattgttttgattttggttctttgttgtttatttagaggtgccataaattttaattcttattcggacatagaacttcataacttaatcatgatcttctccaggaatatgaactgaaaatgaaagagaagggtgagcaactgattttgttttcggtgttgtcaaaatctcaggtgccacaatggatgaaagaacaacatgtagaattgggttccaaaggacttgagggctacttcatcacaacctgtaactgaagatcttgaataactgactacatcaccatgcaagactaaagtttttattttattaagaaaatgaccccaaagaagaagatgtgtgatatatccctgatgactgcatatgtgttgagggttactacacactgaaaaatagaataacagactctgtggctgttagtgaagagggattagtcaaaaagagaacaaggcgtccaaaacctgttggcaatgagggggctgtcagaaagagaagaggctctgccatcccacaactataattgttcaatatatatggctgaattgaagggagaagatgatttatcagcaggctctatgagcacaactgcatagtcaagacataattcttcggcccctgcagacttcaagcagctaagaagtgttacgcccattgacatctttccacgacaagagacctgggcaagagaatccggacgtgctgagggggagaggaaggagaggaggaagatatcgggcaagagaacccattgacatccttggatagggtccgtctgatgccattcatcgctgtctttgatctcaggaaggcatcttagccagctcaattttattagaaatattgttgttttaagatacagagtccatggttactattgtacgcttttctgagaaacttgtcatcccaataatttggttctggagctatatactgatctagcttgttttagtaacaaatgtaagttgctcacatttcctttagactgtcactagaactttgaacgatcaactcgtgcttctaaatcaagaattaccatatgtgttttttgagttcgatcccttctattttttatttggccaccaaacgaagtttttacatgacaagaatgttataaatacttctttaaatcacgagtttcgtgtgtcacgtacgtgcaatgtaggtatatttctctttcatgcttctcgcgatcgattgtgccgtcgcaacgcacgggcattaacctagtctgtacatatgctgccagtgtgctgtgtgcgtctggtgtcgcactcgagtagtacgcgacgggtctcctgcggccctgttggagtcgtcaattgtcagccaccttcgaatacgagtagggatgacaattgacaacggggacagaccaggagctgtatgaaataaagaacattgtagatgctcttaatgagcaacgcgagaagttgcaagagcaaagaaagctgcttcattcagaccgagaaccaatctgacagcaaatccagcagcttactgggttagaagagctgaaaattgaatctgagaacgggcaactaactgtctttgacacaatgtgagaacttaaagaaataaaggtggcgtggaaaacctgaaagagaacggtgttcacatgtctcctgacgagaggatgtataaaaacgcaaatgcaaagcacactactgtgaagagattggaaccgtctcctgcgatccacaccaattttcctgggtgttattagaaaatgtgctcaggtgatattcaaaggctgtgcagagaagagcgctgatgatccccacaacacaacgatagattggtacctgcaaagttggcaatgcaaatgtcaatggctctagcttaattagctgctgctgcctattcagatgaactgttatttggtcatcagctggaaaatggtgctgggaa

SEQ ID NO: 75027 - DNA, 5797 bp, Zea Mays
cgtgcgcggcagcgagcgtgcgtacacgtcacgcaccacgtcagaagccccccaacccaccggtcccccactcagaccgtccgacgaacgactcgacgactgtcgactcctgcacaggcaacacctcacctcgatgatgcatccgctccgccgcatcctcgctctcttactcgtcggcctcctccccgcggccgcgtggtccttggcaccaccccgcttcccgaggccccaaccccgctcgcggccgggagctaatggggtgggagactacgagtacgagacgcgatacttccggcagcggctggaccacttcagctttccaggggtcggggacgaggacgaggacgaggcggctgcgttcttccagcagcggtacctggtgggccgcggcggtgggtgggctggacccggcggccccatcttcttctactgcggcaacgagggcgacatcgcctggttcgccgccaactccggcctcgtctgggaggccgccccacgcttcgccgccctcgtcgtcttcgccgaggcaatcgttcttccgcggcctcactcgtctcgtagtcgtactcgtgtctcttcttcgttttaaaaactttccgtttgaaacgctgtattgtttatggtgcgagcggtggccgctcgcttgtgtgctgcagcatcgctactacggagagtccatgcctttcggtagcaaagccaaggcgtacagcgactccaagtccctggcgtatctcacggccgagcaggcgcttgctgactttgctgtgctgctcactgacctcaagaggaacctatcggcagagggcagccccgttgtgctctttgggggctcatacggtggaatgctagctgcttggatgagactcaaatatccccatattgctattggggctctcgcatcatcagctccgatcctgcagtttgaggacattgttccttctactatattctatgatctcgtatctgatgattttaggagggaaagtttaagttgttttcttacaataaaagactcctggaaagaattagatgaccaagcaaacgagcaagatggtcttctgaaactaagtaaaacgttccacctttgccagaccctgaaaacaagtggagacctttcagattggttgagctcagcgtacagttatctggccatggtggattacccacttccatcagaatttctcatgcctttgccagccaatcctattaaagaagtatgcagaaatatcgacagtcaacctaagggtactggtactctggaacgtatatatgcaggagtaaatgtatactacaattatactggcactgttgactgctttgatctaaatgatgacccccatggaatgggtggatgggactggcaggcttgtaccgagatggtaatgccaatgtcttacagtgaacaaaggagcatgtatccaccttataaatttgactacgcttcctatgctgaggattgcatcaaaagctatggtgtcaggccaaggcctaagtggattacaacagaatttggtgggcataatatcactaaggtcctggaaaattttggtagtaacatcatattcttcaacggacttcttgacccatggagtggcggaggtgtcctgaagaatatatctgagagtgtcgttgctattgtggctccattaggagcacatcacatcgatctgcgcccggcaactccagatgacccggattggctggtggccctgagagaatcagagctggagatcatatctggctggctatgggattactacggggctggaggagcactcttccagcctgtagctgtgaagggctcctcttcatactgaggaaccgcaccctggctaataactcaaatgcttggtctcagaaataagagggccctgctgcaagtgccaaccaccgttaatgctgctgcagtgctgcgtcatggagaaggaagatcttcatgttgatgatcgggtccgctcctgcatcatgtgccatatcagtagcatttggtctgtgtatcaaatgggacatgtacttggctgatgaggtgaggaaaacactggataacgtaacgactctttcgcagtggtggtggcggtcagcaggtgctctagaggcttgatatcacgtgcatgtgccgctgtaaataacataatgctctatgtacgtgtacatctctactactctataagcctgtagtgtaggcgtgcacaccccgtgcaccgtgttctgcctccaacgtcctctcgcccacgcgctccgtcaatcacgcaagttatgccaccgatgtcgcccgaccgccccatccgcattgcccccacccccgtccgccgctagatgcggatcccgccgcttccagcatccagccaagcccgtgagccgcacgccgctcctgctcccgctccgagcgccttaggtcaggcggcgttggcccgacggcggggggaggcatcacgctgccatccatgggcgcgcccccgccgccgctgcacccgacgcccacctctcccacggcgcgcccgcaccaccaccactacctcttctccatcaagcagctcaacacgctgggcgcggcggccgtgctcgccttctccaccacggtcccgctctcggagactgccttcgcggtgctcctcccccctacctcctcgtcctcgcctggctcgccttcccgcagcgcccaggccgctcgagacccggatcccgcctctacccctcggcaccatcgtcagtgtcttcgatggccacaacggccccgacgcccccaccccgacagacactgagccctcttccgctcgcgtgactggtgccccctcaaccctcgactctcctccccaccgtggccccttccccagccccagtgaccagcgcctcccttcctaagtgcggccatggcgaccatcgtgccctagcccgcccctgcaccatggcaagcacaccccttctactcctctcgccccaacccctgtgcagcccagcgcggtggcctataacccacagcaaggcgcaactagctggctggtggccctgccccggtgagcccctgctaggcgcggccagcaacccccgtggtctagcccctgcctaggcacacccaaaacccctgcccttgcaacttgtcctcggcgccgccccactcgcccgagatctgccgcgacaacaggaattggacgtacattgggactttgaagtgcagctaaggctacctggcgattggtggaaagagatctgatgacggcgatcatggtcgaagagtaggagaggccctagaagaaaggtgacatattctcgttcttcggcagcggaataaatgcaccgagctgagaaaggacagaacaaagaaagatcttaaaatcaaagctaaagaagtggagattcaaaatctaaaaaaaagctaatgtcatggaataaatgaggttgatgtggagctaaaaagggaggctatgtttttttgggtgaggcggttatcattggcttgttatgtgaacattattgtgatgtggtttcatgttgtccaggtgccagtttaacaactttttgcaccaccatgtcgagaatatcattgggtcatgtctggagagtaataatgatcaactgatgggccatgtccttgatgagtgtaaacttgttacaagaattttggaagcagagaagaactctgctctatcgtcagaattggacggtcgcatcgacgccaggttccagcagaggagtcgttactctccttgattccttcaccgagttcaccgaggaatatgaactgaaaatgaaagagaagggtgagcaactgattggccaaagtagctagcaattcaaagaggcaaaatgctgcaaaatataatgcttcatgaggtcagtaaatacatatttggtaattccatgctaatacactgatgctttaagatgcctgagacatctatcttctttgttagttgttttcggtgttgtcaaaatctcaggtgccacaatggatgaaagaacaacatgtagaattgggttccaaaggacttgagggctacttcatcacaacctgtaactgaagatcttgaataactgactacatcaccatgcaagactaaagtttttattttattaagaaaatgaccccaaagaagaagatgtgtgatatatccctgatgactgcatatgtgttgagggttactacacactgaaaaatagaataacagactctgtggctgttagtgaagagggattagtcaaaaagagaacaaggcgtccaaaacctgttggcaatgagggggctgtcagaaagagaagaggctctgccatcccacaactataattgttcaatatatgtatgcattagacttcttaattctattaacttattgaattgtatgtgcatgaagttttttctttcatgtattacaccgcatgacatagttctttaactaatggcagtgtacctttttaaacctttagatggctgaattgaagggagaagatgatttatcagcaggctctatgagcacaactgcatagtcaagacataattcttcggcccctgcagacttcaagcagctaagaagtgttacgcccattgacatctttccacgacaagagacctgggcaagagaatccggacgtgctgagggggagaggaaggagaggaggaagatatcgggcaagagaacccattgacatccttggatagggtccgtctgatgccattcatcgctgtctttgatctcaggaaggcatcttagccagctcaattttattagaaatattgttgttttaagatacagagtccatggttactattgtacgcttttctgagaaacttgtcatcccaataatttggttctggagctatatactgatctagcttgttttagtaacaaatgtaagttgctcacatttcctttagactgtcactagaactttgaacgatcaactcgtgcttctaaatcaagaattaccatatgtgttttttgagttcgatcccttctattttttatttggccaccaaacgaagtttttacatgacaagaatgttataaatacttctttaaatcacgagtttcgtgtgtcacgtacgtgcaatgtaggtatatttctctttcatgcttctcgcgatcgattgtgccgtcgcaacgcacgggcattaacctagtctgtacatatgctgccagtgtgctgtgtgcgtctggtgtcgcactcgagtagtacgcgacgggtctcctgcggccctgttggagtcgtcaattgtcagccaccttcgaatacgagtagggatgacaattgacaacggggacagaccaggagctgtatgaaataaagaacattgtagatgctcttaatgagcaacgcgagaagttgcaagagcaaagaaagctgcttcattcagaccgagaaccaatctgacagcaaatccagcagcttactgggttagaagagctgaaaattgaatctgagaacgggcaactaactgtctttgacacaatgtgagaacttaaagaaataaaggtggcgtggaaaacctgaaagagaacggtgttcacatgtctcctgacgagaggatgtataaaaacgcaaatgcaaagcacactactgtgaagagattggaaccgtctcctgcgatccacaccaattttcctgggtgttattagaaaatgtgctcaggtgatattcaaaggctgtgcagagaagagcgctgatgatccccacaacacaacgatagattggtacctgcaaagttggcaatgcaaatgtcaatggctctagcttaattagctgctgctgcctattcagatgaactgttatttggtcatcagctggaaaatggtgctgggaa

SEQ ID NO: 75028 - DNA, 5865 bp, Zea Mays
cgtgcgcggcagcgagcgtgcgtacacgtcacgcaccacgtcagaagccccccaacccaccggtcccccactcagaccgtccgacgaacgactcgacgactgtcgactcctgcacaggcaacacctcacctcgatgatgcatccgctccgccgcatcctcgctctcttactcgtcggcctcctccccgcggccgcgtggtccttggcaccaccccgcttcccgaggccccaaccccgctcgcggccgggagctaatggggtgggagactacgagtacgagacgcgatacttccggcagcggctggaccacttcagctttccaggggtcggggacgaggacgaggacgaggcggctgcgttcttccagcagcggtacctggtgggccgcggcggtgggtgggctggacccggcggccccatcttcttctactgcggcaacgagggcgacatcgcctggttcgccgccaactccggcctcgtctgggaggccgccccacgcttcgccgccctcgtcgtcttcgccgagcatcgctactacggagagtccatgcctttcggtagcaaagccaaggcgtacagcgactccaagtccctggcgtatctcacggccgagcaggcgcttgctgactttgctgtgctgctcactgacctcaagaggaacctatcggcagagggcagccccgttgtgctctttgggggctcatacggtggaatgctagctgcttggatgagactcaaatatccccatattgctattggggctctcgcatcatcagctccgatcctgcagtttgaggacattgttccttctactatattctatgatctcgtatctgatgattttaggagggaaagtttaagttgttttcttacaataaaagactcctggaaagaattagatgaccaagcaaacgagcaagatggtcttctgaaactaagtaaaacgttccacctttgccagaccctgaaaacaagtggagacctttcagattggttgagctcagcgtacagttatctggccatggtggattacccacttccatcagaatttctcatgcctttgccagccaatcctattaaagaagtatgcagaaatatcgacagtcaacctaagggtactggtactctggaacgtatatatgcaggagtaaatgtatactacaattatactggcactgttgactgctttgatctaaatgatgacccccatggaatgggtggatgggactggcaggcttgtaccgagatggtaatgccaatgtcttacagtgaacaaaggagcatgtatccaccttataaatttgactacgcttcctatgctgaggattgcatcaaaagctatggtgtcaggccaaggcctaagtggattacaacagaatttggtgggcataatatcactaaggtcctggaaaattttggtagtaacatcatattcttcaacggacttcttgacccatggagtggcggaggtgtcctgaagaatatatctgagagtgtcgttgctattgtggctccattaggagcacatcacatcgatctgcgcccggcaactccagatgacccggattggctggtggccctgagagaatcagagctggagatcatatctggctggctatgggattactacggggctggaggagcactcttccagcctgtagctgtgaagggctcctcttcatactgaggaaccgcaccctggctaataactcaaatgcttggtctcagaaataagagggccctgctgcaagtgccaaccaccgttaatgctgctgcagtgctgcgtcatggagaaggaagatcttcatgttgatgatcgggtccgctcctgcatcatgtgccatatcagtagcatttggtctgtgtatcaaatgggacatgtacttggctgatgaggtgaggaaaacactggataacgtaacgactctttcgcagtggtggtggcggtcagcaggtgctctagaggcttgatatcacgtgcatgtgccgctgtaaataacataatgctctatgtacgtgtacatctctactactctataagcctgtagtgtaggcgtgcacaccccgtgcaccgtgttctgcctccaacgtcctctcgcccacgcgctccgtcaatcacgcaagttatgccaccgatgtcgcccgaccgccccatccgcattgcccccacccccgtccgccgctagatgcggatcccgccgcttccagcatccagccaagcccgtgagccgcacgccgctcctgctcccgctccgagcgccttaggtcaggcggcgttggcccgacggcggggggaggcatcacgctgccatccatgggcgcgcccccgccgccgctgcacccgacgcccacctctcccacggcgcgcccgcaccaccaccactacctcttctccatcaagcagctcaacacgctgggcgcggcggccgtgctcgccttctccaccacggtcccgctctcggagactgccttcgcggtgctcctcccccctacctcctcgtcctcgcctggctcgccttcccgcagcgcccaggccgctcgagacccggatcccgcctctacccctcggcaccatcgtcagtgtcttcgatggccacaacggccccgacgcccccaccccgacagacactgagccctcttccgctcgcgtgactggtgccccctcaaccctcgactctcctccccaccgtggccccttccccagccccagtgaccagcgcctcccttcctaagtgcggccatggcgaccatcgtgccctagcccgcccctgcaccatggcaagcacaccccttctactcctctcgccccaacccctgtgcagcccagcgcggtggcctataacccacagcaaggcgcaactagctggctggtggccctgccccggtgagcccctgctaggcgcggccagcaacccccgtggtctagcccctgcctaggcacacccaaaacccctgcccttgcaacttgtcctcggcgccgccccactcgcccgagatctgccgcgacaacaggaattggacgtacattgggactttgaagtgcagctaaggctacctggcgattggtggaaagagatctgatgacggcgatcatggtcgaagagtaggagaggccctagaagaaagcggaataaatgcaccgagctgagaaaggacagaacaaagaaagatcttaaaatcaaagctaaagaagtggagattcaaaatctaaaaaaaagctaatgtcatggaataaatgaggttgatgtggagctaaaaagggaggctatgtttttttgggtgaggcggttatcattggcttgttatgtgaacattattgtgatgtggtttcatgttgtccaggtgccagtttaacaactttttgcaccaccatgtcgagaatatcattgggtcatgtctggagagtaataatgatcaactgatgggccatgtccttgatgagtgtaaacttgttacaagaattttggaagcagagaagaactctgctctatcgtcagaattggacggtcgcatcgacgccaggttccagcagaggagtcgttactctccttgattccttcaccgagttcaccgaggaatatgaactgaaaatgaaagagaagggtgagcaactgattgtaagatctttcatcagtgcaacctctccttttttagctttcatcagtgctacactcccacagtccccacatgcacgcagatgtttgaaaatataaaataaaatcaacaacactgcaaatttactagctcaactacaagaggcatggagttattattaaaaaatgaagtactcatgatgaattccaaacaaaaaatctgacctaataatcaacataatataaattgttgtagctcagtcctatagtcatactgagctactgattagaatgttcaagaatgaaccattagatttcctgtgctaaaatgaggattgatcataagactaatgacgatcaagactatcaaggcccctacaaacaaagctcatgggaaattagaaagtgaaatgaaataccatgttgaaaacagggccaaagtagctagcaattcaaagaggcaaaatgctgcaaaatataatgcttcatgagttgttttcggtgttgtcaaaatctcaggtgccacaatggatgaaagaacaacatgtagaattgggttccaaaggacttgagggctacttcatcacaacctgtaactgaagatcttgaataactgactacatcaccatgcaagactaaagtttttattttattaagaaaatgaccccaaagaagaagatgtgtgatatatccctgatgactgcatatgtgttgagggttactacacactgaaaaatagaataacagactctgtggctgttagtgaagagggattagtcaaaaagagaacaaggcgtccaaaacctgttggcaatgagggggctgtcagaaagagaagaggctctgccatcccacaactataattgttcaatatattgtacctttttaaacctttagatggctgaattgaagggagaagatgatttatcagcaggctctatgagcacaactgcatagtcaagacataattcttcggcccctgcagacttcaagcagctaagaagtgttacgcccattgacatctttccacgacaagagacctgggcaagagaatccggacgtgctgagggggagaggaaggagaggaggaagatatcgggcaagagaacccattgacatccttggatagggtccgtctgatgccattcatcgctgtctttgatctcaggaaggcatcttagccagctcaattttattagaaatattgttgttttaagatacagagtccatggttactattgtacgcttttctgagaaacttgtcatcccaataatttggttctggagctatatactgatctagcttgttttagtaacaaatgtaagttgctcacatttcctttagactgtcactagaactttgaacgatcaactcgtgcttctaaatcaagaattaccatatgtgttttttgagttcgatcccttctattttttatttggccaccaaacgaagtttttacatgacaagaatgttataaatacttctttaaatcacgagtttcgtgtgtcacgtacgtgcaatgtaggtatatttctctttcatgcttctcgcgatcgattgtgccgtcgcaacgcacgggcattaacctagtctgtacatatgctgccagtgtgctgtgtgcgtctggtgtcgcactcgagtagtacgcgacgggtctcctgcggccctgttggagtcgtcaattgtcagccaccttcgaatacgagtagggatgacaattgacaacggggacagaccaggagctgtatgaaataaagaacattgtagatgctcttaatgagcaacgcgagaagttgcaagagcaaagaaagctgcttcattcagaccgagaaccaatctgacagcaaatccagcagcttactgggttagaagagctgaaaattgaatctgagaacgggcaactaactgtctttgacacaatgtgagaacttaaagaaataaaggtggcgtggaaaacctgaaagagaacggtgttcacatgtctcctgacgagaggatgtataaaaacgcaaatgcaaagcacactactgtgaagagattggaaccgtctcctgcgatccacaccaattttcctgggtgttattagaaaatgtgctcaggtgatattcaaaggctgtgcagagaagagcgctgatgatccccacaacacaacgatagattggtacctgcaaagttggcaatgcaaatgtcaatggctctagcttaattagctgctgctgcctattcagatgaactgttatttggtcatcagctggaaaatggtgctgggaa

SEQ ID NO: 75029 - DNA, 5692 bp, Zea Mays
cgtgcgcggcagcgagcgtgcgtacacgtcacgcaccacgtcagaagccccccaacccaccggtcccccactcagaccgtccgacgaacgactcgacgactgtcgactcctgcacaggcaacacctcacctcgatgatgcatccgctccgccgcatcctcgctctcttactcgtcggcctcctccccgcggccgcgtggtccttggcaccaccccgcttcccgaggccccaaccccgctcgcggccgggagctaatggggtgggagactacgagtacgagacgcgatacttccggcagcggctggaccacttcagctttccaggggtcggggacgaggacgaggacgaggcggctgcgttcttccagcagcggtacctggtgggccgcggcggtgggtgggctggacccggcggccccatcttcttctactgcggcaacgagggcgacatcgcctggttcgccgccaactccggcctcgtctgggaggccgccccacgcttcgccgccctcgtcgtcttcgccgaggcaatcgttcttccgcggcctcactcgtctcgtagtcgtactcgtgtctcttcttcgttttaaaaactttccgtttgaaacgctgtattgtttatggtgcgagcggtggccgctcgcttgtgtgctgcagcatcgctactacggagagtccatgcctttcggtagcaaagccaaggcgtacagcgactccaagtccctggcgtatctcacggccgagcaggcgcttgctgactttgctgtgctgctcactgacctcaagaggaacctatcggcagagggcagccccgttgtgctctttgggggctcatacggtggaatgctagctgcttggatgagactcaaatatccccatattgctattggggctctcgcatcatcagctccgatcctgcagtttgaggacattgttccttctactatattctatgatctcgtatctgatgattttaggagggaaagtttaagttgttttcttacaataaaagactcctggaaagaattagatgaccaagcaaacgagcaagatggtcttctgaaactaagtaaaacgttccacctttgccagaccctgaaaacaagtggagacctttcagattggttgagctcagcgtacagttatctggccatggtggattacccacttccatcagaatttctcatgcctttgccagccaatcctattaaagaagtatgcagaaatatcgacagtcaacctaagggtactggtactctggaacgtatatatgcaggagtaaatgtatactacaattatactggcactgttgactgctttgatctaaatgatgacccccatggaatgggtggatgggactggcaggcttgtaccgagatggtaatgccaatgtcttacagtgaacaaaggagcatgtatccaccttataaatttgactacgcttcctatgctgaggattgcatcaaaagctatggtgtcaggccaaggcctaagtggattacaacagaatttggtgggcataatatcactaaggtcctggaaaattttggtagtaacatcatattcttcaacggacttcttgacccatggagtggcggaggtgtcctgaagaatatatctgagagtgtcgttgctattgtggctccattaggagcacatcacatcgatctgcgcccggcaactccagatgacccggattggctggtggccctgagagaatcagagctggagatcatatctggctggctatgggattactacggggctggaggagcactcttccagcctgtagctgtgaagggctcctcttcatactgaggaaccgcaccctggctaataactcaaatgcttggtctcagaaataagagggccctgctgcaagtgccaaccaccgttaatgctgctgcagtgctgcgtcatggagaaggaagatcttcatgttgatgatcgggtccgctcctgcatcatgtgccatatcagtagcatttggtctgtgtatcaaatgggacatgtacttggctgatgaggtgaggaaaacactggataacgtaacgactctttcgcagtggtggtggcggtcagcaggtgctctagaggcttgatatcacgtgcatgtgccgctgtaaataacataatgctctatgtacgtgtacatctctactactctataagcctgtagtgtaggcgtgcacaccccgtgcaccgtgttctgcctccaacgtcctctcgcccacgcgctccgtcaatcacgcaagttatgccaccgatgtcgcccgaccgccccatccgcattgcccccacccccgtccgccgctagatgcggatcccgccgcttccagcatccagccaagcccgtgagccgcacgccgctcctgctcccgctccgagcgccttaggtcaggcggcgttggcccgacggcggggggaggcatcacgctgccatccatgggcgcgcccccgccgccgctgcacccgacgcccacctctcccacggcgcgcccgcaccaccaccactacctcttctccatcaagcagctcaacacgctgggcgcggcggccgtgctcgccttctccaccacggtcccgctctcggagactgccttcgcggtgctcctcccccctacctcctcgtcctcgcctggctcgccttcccgcagcgcccaggccgctcgagacccggatcccgcctctacccctcggcaccatcgtcagtgtcttcgatggccacaacggccccgacgcccccaccccgacagacactgagccctcttccgctcgcgtgactggtgccccctcaaccctcgactctcctccccaccgtggccccttccccagccccagtgaccagcgcctcccttcctaagtgcggccatggcgaccatcgtgccctagcccgcccctgcaccatggcaagcacaccccttctactcctctcgccccaacccctgtgcagcccagcgcggtggcctataacccacagcaaggcgcaactagctggctggtggccctgccccggtgagcccctgctaggcgcggccagcaacccccgtggtctagcccctgcctaggcacacccaaaacccctgcccttgcaacttgtcctcggcgccgccccactcgcccgagatctgccgcgacaacaggaattggacgtacattgggactttgaagtgcagctaaggctacctggcgattggtggaaagagatctgatgacggcgatcatggtcgaagagtaggagaggccctagaagaaagcggaataaatgcaccgagctgagaaaggacagaacaaagaaagatcttaaaatcaaagctaaagaagtggagattcaaaatctaaaaaaaagctaatgtcatggaataaatgaggttgatgtggagctaaaaagggaggctatgtttttttgggtgaggcggttatcattggcttgttatgtgaacattattgtgatgtggtttcatgttgtccaggtgccagtttaacaactttttgcaccaccatgtcgagaatatcattgggtcatgtctggagagtaataatgatcaactgatgggccatgtccttgatgagtgtaaacttgttacaagaattttggaagcagagaagaactctgctctatcgtcagaattggacggtcgcatcgacgccaggttccagcagaggagtcgttactctccttgattccttcaccgagttcaccgaggaatatgaactgaaaatgaaagagaagggtgagcaactgattggccaaagtagctagcaattcaaagaggcaaaatgctgcaaaatataatgcttcatgagttgttttcggtgttgtcaaaatctcaggtgccacaatggatgaaagaacaacatgtagaattgggttccaaaggacttgagggctacttcatcacaacctgtaactgaagatcttgaataactgactacatcaccatgcaagactaaagtttttattttattaagaaaatgaccccaaagaagaagatgtgtgatatatccctgatgactgcatatgtgttgagggttactacacactgaaaaatagaataacagactctgtggctgttagtgaagagggattagtcaaaaagagaacaaggcgtccaaaacctgttggcaatgagggggctgtcagaaagagaagaggctctgccatcccacaactataattgttcaatatatgtatgcattagacttcttaattctattaacttattgaattgtatgtgcatgaagttttttctttcatgtattacaccgcatgacatagttctttaactaatggcagtgtacctttttaaacctttagatggctgaattgaagggagaagatgatttatcagcaggctctatgagcacaactgcatagtcaagacataattcttcggcccctgcagacttcaagcagctaagaagtgttacgcccattgacatctttccacgacaagagacctgggcaagagaatccggacgtgctgagggggagaggaaggagaggaggaagatatcgggcaagagaacccattgacatccttggatagggtccgtctgatgccattcatcgctgtctttgatctcaggaaggcatcttagccagctcaattttattagaaatattgttgttttaagatacagagtccatggttactattgtacgcttttctgagaaacttgtcatcccaataatttggttctggagctatatactgatctagcttgttttagtaacaaatgtaagttgctcacatttcctttagactgtcactagaactttgaacgatcaactcgtgcttctaaatcaagaattaccatatgtgttttttgagttcgatcccttctattttttatttggccaccaaacgaagtttttacatgacaagaatgttataaatacttctttaaatcacgagtttcgtgtgtcacgtacgtgcaatgtaggtatatttctctttcatgcttctcgcgatcgattgtgccgtcgcaacgcacgggcattaacctagtctgtacatatgctgccagtgtgctgtgtgcgtctggtgtcgcactcgagtagtacgcgacgggtctcctgcggccctgttggagtcgtcaattgtcagccaccttcgaatacgagtagggatgacaattgacaacggggacagaccaggagctgtatgaaataaagaacattgtagatgctcttaatgagcaacgcgagaagttgcaagagcaaagaaagctgcttcattcagaccgagaaccaatctgacagcaaatccagcagcttactgggttagaagagctgaaaattgaatctgagaacgggcaactaactgtctttgacacaatgtgagaacttaaagaaataaaggtggcgtggaaaacctgaaagagaacggtgttcacatgtctcctgacgagaggatgtataaaaacgcaaatgcaaagcacactactgtgaagagattggaaccgtctcctgcgatccacaccaattttcctgggtgttattagaaaatgtgctcaggtgatattcaaaggctgtgcagagaagagcgctgatgatccccacaacacaacgatagattggtacctgcaaagttggcaatgcaaatgtcaatggctctagcttaattagctgctgctgcctattcagatgaactgttatttggtcatcagctggaaaatggtgctgggaa

SEQ ID NO: 75030 - DNA, 6118 bp, Zea Mays
cgtgcgcggcagcgagcgtgcgtacacgtcacgcaccacgtcagaagccccccaacccaccggtcccccactcagaccgtccgacgaacgactcgacgactgtcgactcctgcacaggcaacacctcacctcgatgatgcatccgctccgccgcatcctcgctctcttactcgtcggcctcctccccgcggccgcgtggtccttggcaccaccccgcttcccgaggccccaaccccgctcgcggccgggagctaatggggtgggagactacgagtacgagacgcgatacttccggcagcggctggaccacttcagctttccaggggtcggggacgaggacgaggacgaggcggctgcgttcttccagcagcggtacctggtgggccgcggcggtgggtgggctggacccggcggccccatcttcttctactgcggcaacgagggcgacatcgcctggttcgccgccaactccggcctcgtctgggaggccgccccacgcttcgccgccctcgtcgtcttcgccgaggcaatcgttcttccgcggcctcactcgtctcgtagtcgtactcgtgtctcttcttcgttttaaaaactttccgtttgaaacgctgtattgtttatggtgcgagcggtggccgctcgcttgtgtgctgcagcatcgctactacggagagtccatgcctttcggtagcaaagccaaggcgtacagcgactccaagtccctggcgtatctcacggccgagcaggcgcttgctgactttgctgtgctgctcactgacctcaagaggaacctatcggcagagggcagccccgttgtgctctttgggggctcatacggtggaatgctagctgcttggatgagactcaaatatccccatattgctattggggctctcgcatcatcagctccgatcctgcagtttgaggacattgttccttctactatattctatgatctcgtatctgatgattttaggagggaaagtttaagttgttttcttacaataaaagactcctggaaagaattagatgaccaagcaaacgagcaagatggtcttctgaaactaagtaaaacgttccacctttgccagaccctgaaaacaagtggagacctttcagattggttgagctcagcgtacagttatctggccatggtggattacccacttccatcagaatttctcatgcctttgccagccaatcctattaaagaagtatgcagaaatatcgacagtcaacctaagggtactggtactctggaacgtatatatgcaggagtaaatgtatactacaattatactggcactgttgactgctttgatctaaatgatgacccccatggaatgggtggatgggactggcaggcttgtaccgagatggtaatgccaatgtcttacagtgaacaaaggagcatgtatccaccttataaatttgactacgcttcctatgctgaggattgcatcaaaagctatggtgtcaggccaaggcctaagtggattacaacagaatttggtgggcataatatcactaaggtcctggaaaattttggtagtaacatcatattcttcaacggacttcttgacccatggagtggcggaggtgtcctgaagaatatatctgagagtgtcgttgctattgtggctccattaggagcacatcacatcgatctgcgcccggcaactccagatgacccggattggctggtggccctgagagaatcagagctggagatcatatctggctggctatgggattactacggggctggaggagcactcttccagcctgtagctgtgaagggctcctcttcatactgaggaaccgcaccctggctaataactcaaatgcttggtctcagaaataagagggccctgctgcaagtgccaaccaccgttaatgctgctgcagtgctgcgtcatggagaaggaagatcttcatgttgatgatcgggtccgctcctgcatcatgtgccatatcagtagcatttggtctgtgtatcaaatgggacatgtacttggctgatgaggtgaggaaaacactggataacgtaacgactctttcgcagtggtggtggcggtcagcaggtgctctagaggcttgatatcacgtgcatgtgccgctgtaaataacataatgctctatgtacgtgtacatctctactactctataagcctgtagtgtaggcgtgcacaccccgtgcaccgtgttctgcctccaacgtcctctcgcccacgcgctccgtcaatcacgcaagttatgccaccgatgtcgcccgaccgccccatccgcattgcccccacccccgtccgccgctagatgcggatcccgccgcttccagcatccagccaagcccgtgagccgcacgccgctcctgctcccgctccgagcgccttaggtcaggcggcgttggcccgacggcggggggaggcatcacgctgccatccatgggcgcgcccccgccgccgctgcacccgacgcccacctctcccacggcgcgcccgcaccaccaccactacctcttctccatcaagcagctcaacacgctgggcgcggcggccgtgctcgccttctccaccacggtcccgctctcggagactgccttcgcggtgctcctcccccctacctcctcgtcctcgcctggctcgccttcccgcagcgcccaggccgctcgagacccggatcccgcctctacccctcggcaccatcgtcagtgtcttcgatggccacaacggccccgacgcccccaccccgacagacactgagccctcttccgctcgcgtgactggtgccccctcaaccctcgactctcctccccaccgtggccccttccccagccccagtgaccagcgcctcccttcctaagtgcggccatggcgaccatcgtgccctagcccgcccctgcaccatggcaagcacaccccttctactcctctcgccccaacccctgtgcagcccagcgcggtggcctataacccacagcaaggcgcaactagctggctggtggccctgccccggtgagcccctgctaggcgcggccagcaacccccgtggtctagcccctgcctaggcacacccaaaacccctgcccttgcaacttgtcctcggcgccgccccactcgcccgagatctgccgcgacaacaggaattggacgtacattgggactttgaagtgcagctaaggctacctggcgattggtggaaagagatctgatgacggcgatcatggtcgaagagtaggagaggccctagaagaaagcggaataaatgcaccgagctgagaaaggacagaacaaagaaagatcttaaaatcaaagctaaagaagtggagattcaaaatctaaaaaaaagctaatgtcatggaataaatgaggttgatgtggagctaaaaagggaggctatgtttttttgggtgccagtttaacaactttttgcaccaccatgtcgagaatatcattgggtcatgtctggagagtaataatgatcaactgatgggccatgtccttgatgagtgtaaacttgttacaagaattttggaagcagagaagaactctgctctatcgtcagaattggacggtcgcatcgacgccaggttccagcagaggagtcgttactctccttgattccttcaccgagttcaccgaggaatatgaactgaaaatgaaagagaagggtgagcaactgattgtaagatctttcatcagtgcaacctctccttttttagctttcatcagtgctacactcccacagtccccacatgcacgcagatgtttgaaaatataaaataaaatcaacaacactgcaaatttactagctcaactacaagaggcatggagttattattaaaaaatgaagtactcatgatgaattccaaacaaaaaatctgacctaataatcaacataatataaattgttgtagctcagtcctatagtcatactgagctactgattagaatgttcaagaatgaaccattagatttcctgtgctaaaatgaggattgatcataagactaatgacgatcaagactatcaaggcccctacaaacaaagctcatgggaaattagaaagtgaaatgaaataccatgttgaaaacagggccaaagtagctagcaattcaaagaggcaaaatgctgcaaaatataatgcttcatgaggtcagtaaatacatatttggtaattccatgctaatacactgatgctttaagatgcctgagacatctatcttctttgttagttgttttcggtgttgtcaaaatctcaggtgccacaatggatgaaagaacaacatgtagaattgggttccaaaggacttgagggctacttcatcacaacctgtaactgaagatcttgaataactgactacatcaccatgcaagactaaagtttttattttattaagaaaatgaccccaaagaagaagatgtgtgatatatccctgatgactgcatatgtgttgagggttactacacactgaaaaatagaataacagactctgtggctgttagtgaagagggattagtcaaaaagagaacaaggcgtccaaaacctgttggcaatgagggggctgtcagaaagagaagaggctctgccatcccacaactataattgttcaatatatgtatgcattagacttcttaattctattaacttattgaattgtatgtgcatgaagttttttctttcatgtattacaccgcatgacatagttctttaactaatggcagtgtacctttttaaacctttagatggctgaattgaagggagaagatgatttatcagcaggctctatgagcacaactgcatagtcaagacataattcttcggcccctgcagacttcaagcagctaagaagtgttacgcccattgacatctttccacgacaagagacctgggcaagagaatccggacgtgctgagggggagaggaaggagaggaggaagatatcgggcaagagaacccattgacatccttggatagggtccgtctgatgccattcatcgctgtctttgatctcaggaaggcatcttagccagctcaattttattagaaatattgttgttttaagatacagagtccatggttactattgtacgcttttctgagaaacttgtcatcccaataatttggttctggagctatatactgatctagcttgttttagtaacaaatgtaagttgctcacatttcctttagactgtcactagaactttgaacgatcaactcgtgcttctaaatcaagaattaccatatgtgttttttgagttcgatcccttctattttttatttggccaccaaacgaagtttttacatgacaagaatgttataaatacttctttaaatcacgagtttcgtgtgtcacgtacgtgcaatgtaggtatatttctctttcatgcttctcgcgatcgattgtgccgtcgcaacgcacgggcattaacctagtctgtacatatgctgccagtgtgctgtgtgcgtctggtgtcgcactcgagtagtacgcgacgggtctcctgcggccctgttggagtcgtcaattgtcagccaccttcgaatacgagtagggatgacaattgacaacggggacagaccaggagctgtatgaaataaagaacattgtagatgctcttaatgagcaacgcgagaagttgcaagagcaaagaaagctgcttcattcagaccgagaaccaatctgacagcaaatccagcagcttactgggttagaagagctgaaaattgaatctgagaacgggcaactaactgtctttgacacaatgtgagaacttaaagaaataaaggtggcgtggaaaacctgaaagagaacggtgttcacatgtctcctgacgagaggatgtataaaaacgcaaatgcaaagcacactactgtgaagagattggaaccgtctcctgcgatccacaccaattttcctgggtgttattagaaaatgtgctcaggtgatattcaaaggctgtgcagagaagagcgctgatgatccccacaacacaacgatagattggtacctgcaaagttggcaatgcaaatgtcaatggctctagcttaattagctgctgctgcctattcagatgaactgttatttggtcatcagctggaaaatggtgctgggaa

SEQ ID NO: 75031 - DNA, 5920 bp, Zea Mays
cgtgcgcggcagcgagcgtgcgtacacgtcacgcaccacgtcagaagccccccaacccaccggtcccccactcagaccgtccgacgaacgactcgacgactgtcgactcctgcacaggcaacacctcacctcgatgatgcatccgctccgccgcatcctcgctctcttactcgtcggcctcctccccgcggccgcgtggtccttggcaccaccccgcttcccgaggccccaaccccgctcgcggccgggagctaatggggtgggagactacgagtacgagacgcgatacttccggcagcggctggaccacttcagctttccaggggtcggggacgaggacgaggacgaggcggctgcgttcttccagcagcggtacctggtgggccgcggcggtgggtgggctggacccggcggccccatcttcttctactgcggcaacgagggcgacatcgcctggttcgccgccaactccggcctcgtctgggaggccgccccacgcttcgccgccctcgtcgtcttcgccgagcatcgctactacggagagtccatgcctttcggtagcaaagccaaggcgtacagcgactccaagtccctggcgtatctcacggccgagcaggcgcttgctgactttgctgtgctgctcactgacctcaagaggaacctatcggcagagggcagccccgttgtgctctttgggggctcatacggtggaactgcttggatgagactcaaatatccccatattgctattggggctctcgcatcatcagctccgatcctgcagtttgaggacattgttccttctactatattctatgatctcgtatctgatgattttaggagggaaagtttaagttgttttcttacaataaaagactcctggaaagaattagatgaccaagcaaacgagcaagatggtcttctgaaactaagtaaaacgttccacctttgccagaccctgaaaacaagtggagacctttcagattggttgagctcagcgtacagttatctggccatggtggattacccacttccatcagaatttctcatgcctttgccagccaatcctattaaagaagtatgcagaaatatcgacagtcaacctaagggtactggtactctggaacgtatatatgcaggagtaaatgtatactacaattatactggcactgttgactgctttgatctaaatgatgacccccatggaatgggtggatgggactggcaggcttgtaccgagatggtaatgccaatgtcttacagtgaacaaaggagcatgtatccaccttataaatttgactacgcttcctatgctgaggattgcatcaaaagctatggtgtcaggccaaggcctaagtggattacaacagaatttggtgggcataatatcactaaggtcctggaaaattttggtagtaacatcatattcttcaacggacttcttgacccatggagtggcggaggtgtcctgaagaatatatctgagagtgtcgttgctattgtggctccattaggagcacatcacatcgatctgcgcccggcaactccagatgacccggattggctggtggccctgagagaatcagagctggagatcatatctggctggctatgggattactacggggctggaggagcactcttccagcctgtagctgtgaagggctcctcttcatactgaggaaccgcaccctggctaataactcaaatgcttggtctcagaaataagagggccctgctgcaagtgccaaccaccgttaatgctgctgcagtgctgcgtcatggagaaggaagatcttcatgttgatgatcgggtccgctcctgcatcatgtgccatatcagtagcatttggtctgtgtatcaaatgggacatgtacttggctgatgaggtgaggaaaacactggataacgtaacgactctttcgcagtggtggtggcggtcagcaggtgctctagaggcttgatatcacgtgcatgtgccgctgtaaataacataatgctctatgtacgtgtacatctctactactctataagcctgtagtgtaggcgtgcacaccccgtgcaccgtgttctgcctccaacgtcctctcgcccacgcgctccgtcaatcacgcaagttatgccaccgatgtcgcccgaccgccccatccgcattgcccccacccccgtccgccgctagatgcggatcccgccgcttccagcatccagccaagcccgtgagccgcacgccgctcctgctcccgctccgagcgccttaggtcaggcggcgttggcccgacggcggggggaggcatcacgctgccatccatgggcgcgcccccgccgccgctgcacccgacgcccacctctcccacggcgcgcccgcaccaccaccactacctcttctccatcaagcagctcaacacgctgggcgcggcggccgtgctcgccttctccaccacggtcccgctctcggagactgccttcgcggtgctcctcccccctacctcctcgtcctcgcctggctcgccttcccgcagcgcccaggccgctcgagacccggatcccgcctctacccctcggcaccatcgtcagtgtcttcgatggccacaacggccccgacgcccccaccccgacagacactgagccctcttccgctcgcgtgactggtgccccctcaaccctcgactctcctccccaccgtggccccttccccagccccagtgaccagcgcctcccttcctaagtgcggccatggcgaccatcgtgccctagcccgcccctgcaccatggcaagcacaccccttctactcctctcgccccaacccctgtgcagcccagcgcggtggcctataacccacagcaaggcgcaactagctggctggtggccctgccccggtgagcccctgctaggcgcggccagcaacccccgtggtctagcccctgcctaggcacacccaaaacccctgcccttgcaacttgtcctcggcgccgccccactcgcccgagatctgccgcgacaacaggaattggacgtacattgggactttgaagtgcagctaagagatctgatgacggcgatcatggtcgaagagtaggagaggccctagaagaaaggtgacatattctcgttcttcggcagcggaataaatgcaccgagctgagaaaggacagaacaaagaaagatcttaaaatcaaagctaaagaagtggagattcaaaatctaaaaaaaagctaatgtcatggaataaatgaggttgatgtggagctaaaaagggaggctatgtttttttgggtgaggcggttatcattggcttgttatgtgaacattattgtgatgtggtttcatgttgtccaggtgccagtttaacaactttttgcaccaccatgtcgagaatatcattgggtcatgtctggagagtaataatgatcaactgatgggccatgtccttgatgagtgtaaacttgttacaagaattttggaagcagagaagaactctgctctatcgtcagaattggacggtcgcatcgacgccaggttccagcagaggagtcgttactctccttgattccttcaccgagttcaccgaggaatatgaactgaaaatgaaagagaagggtgagcaactgattgtaagatctttcatcagtgcaacctctccttttttagctttcatcagtgctacactcccacagtccccacatgcacgcagatgtttgaaaatataaaataaaatcaacaacactgcaaatttactagctcaactacaagaggcatggagttattattaaaaaatgaagtactcatgatgaattccaaacaaaaaatctgacctaataatcaacataatataaattgttgtagctcagtcctatagtcatactgagctactgattagaatgttcaagaatgaaccattagatttcctgtgctaaaatgaggattgatcataagactaatgacgatcaagactatcaaggcccctacaaacaaagctcatgggaaattagaaagtgaaatgaaataccatgttgaaaacagggccaaagtagctagcaattcaaagaggcaaaatgctgcaaaatataatgcttcatgaggtcagtaaatacatatttggtaattccatgctaatacactgatgctttaagatgcctgagacatctatcttctttgttagttgttttcggtgttgtcaaaatctcaggtgccacaatggatgaaagaacaacatgtagaattgggttccaaaggacttgagggctacttcatcacaacctgtaactgaagatcttgaataactgactacatcaccatgcaagactaaagtttttattttattaagaaaatgaccccaaagaagaagatgtgtgatatatccctgatgactgcatatgtgttgagggttactacacactgaaaaatagaataacagactctgtggctgttagtgaagagggattagtcaaaaagagaacaaggcgtccaaaacctgttggcaatgagggggctgtcagaaagagaagaggctctgccatcccacaactataattgttcaatatatatggctgaattgaagggagaagatgatttatcagcaggctctatgagcacaactgcatagtcaagacataattcttcggcccctgcagacttcaagcagctaagaagtgttacgcccattgacatctttccacgacaagagacctgggcaagagaatccggacgtgctgagggggagaggaaggagaggaggaagatatcgggcaagagaacccattgacatccttggatagggtccgtctgatgccattcatcgctgtctttgatctcaggaaggcatcttagccagctcaattttattagaaatattgttgttttaagatacagagtccatggttactattgtacgcttttctgagaaacttgtcatcccaataatttggttctggagctatatactgatctagcttgttttagtaacaaatgtaagttgctcacatttcctttagactgtcactagaactttgaacgatcaactcgtgcttctaaatcaagaattaccatatgtgttttttgagttcgatcccttctattttttatttggccaccaaacgaagtttttacatgacaagaatgttataaatacttctttaaatcacgagtttcgtgtgtcacgtacgtgcaatgtaggtatatttctctttcatgcttctcgcgatcgattgtgccgtcgcaacgcacgggcattaacctagtctgtacatatgctgccagtgtgctgtgtgcgtctggtgtcgcactcgagtagtacgcgacgggtctcctgcggccctgttggagtcgtcaattgtcagccaccttcgaatacgagtagggatgacaattgacaacggggacagaccaggagctgtatgaaataaagaacattgtagatgctcttaatgagcaacgcgagaagttgcaagagcaaagaaagctgcttcattcagaccgagaaccaatctgacagcaaatccagcagcttactgggttagaagagctgaaaattgaatctgagaacgggcaactaactgtctttgacacaatgtgagaacttaaagaaataaaggtggcgtggaaaacctgaaagagaacggtgttcacatgtctcctgacgagaggatgtataaaaacgcaaatgcaaagcacactactgtgaagagattggaaccgtctcctgcgatccacaccaattttcctgggtgttattagaaaatgtgctcaggtgatattcaaaggctgtgcagagaagagcgctgatgatccccacaacacaacgatagattggtacctgcaaagttggcaatgcaaatgtcaatggctctagcttaattagctgctgctgcctattcagatgaactgttatttggtcatcagctggaaaatggtgctgggaa

SEQ ID NO: 75032 - DNA, 5890 bp, Zea Mays
cgtgcgcggcagcgagcgtgcgtacacgtcacgcaccacgtcagaagccccccaacccaccggtcccccactcagaccgtccgacgaacgactcgacgactgtcgactcctgcacaggcaacacctcacctcgatgatgcatccgctccgccgcatcctcgctctcttactcgtcggcctcctccccgcggccgcgtggtccttggcaccaccccgcttcccgaggccccaaccccgctcgcggccgggagctaatggggtgggagactacgagtacgagacgcgatacttccggcagcggctggaccacttcagctttccaggggtcggggacgaggacgaggacgaggcggctgcgttcttccagcagcggtacctggtgggccgcggcggtgggtgggctggacccggcggccccatcttcttctactgcggcaacgagggcgacatcgcctggttcgccgccaactccggcctcgtctgggaggccgccccacgcttcgccgccctcgtcgtcttcgccgagcatcgctactacggagagtccatgcctttcggtagcaaagccaaggcgtacagcgactccaagtccctggcgtatctcacggccgagcaggcgcttgctgactttgctgtgctgctcactgacctcaagaggaacctatcggcagagggcagccccgttgtgctctttgggggctcatacggtggaatgctagctgcttggatgagactcaaatatccccatattgctattggggctctcgcatcatcagctccgatcctgcagtttgaggacattgttccttctactatattctatgatctcgtatctgatgattttaggagggaaagtttaagttgttttcttacaataaaagactcctggaaagaattagatgaccaagcaaacgagcaagatggtcttctgaaactaagtaaaacgttccacctttgccagaccctgaaaacaagtggagacctttcagattggttgagctcagcgtacagttatctggccatggtggattacccacttccatcagaatttctcatgcctttgccagccaatcctattaaagaagtatgcagaaatatcgacagtcaacctaagggtactggtactctggaacgtatatatgcaggagtaaatgtatactacaattatactggcactgttgactgctttgatctaaatgatgacccccatggaatgggtggatgggactggcaggcttgtaccgagatggtaatgccaatgtcttacagtgaacaaaggagcatgtatccaccttataaatttgactacgcttcctatgctgaggattgcatcaaaagctatggtgtcaggccaaggcctaagtggattacaacagaatttggtgggcataatatcactaaggtcctggaaaattttggtagtaacatcatattcttcaacggacttcttgacccatggagtggcggaggtgtcctgaagaatatatctgagagtgtcgttgctattgtggctccattaggagcacatcacatcgatctgcgcccggcaactccagatgacccggattggctggtggccctgagagaatcagagctggagatcatatctggctggctatgggattactacggggctggaggagcactcttccagcctgtagctgtgaagggctcctcttcatactgaggaaccgcaccctggctaataactcaaatgcttggtctcagaaataagagggccctgctgcaagtgccaaccaccgttaatgctgctgcagtgctgcgtcatggagaaggaagatcttcatgttgatgatcgggtccgctcctgcatcatgtgccatatcagtagcatttggtctgtgtatcaaatgggacatgtacttggctgatgaggtgaggaaaacactggataacgtaacgactctttcgcagtggtggtggcggtcagcaggtgctctagaggcttgatatcacgtgcatgtgccgctgtaaataacataatgctctatgtacgtgtacatctctactactctataagcctgtagtgtaggcgtgcacaccccgtgcaccgtgttctgcctccaacgtcctctcgcccacgcgctccgtcaatcacgcaagttatgccaccgatgtcgcccgaccgccccatccgcattgcccccacccccgtccgccgctagatgcggatcccgccgcttccagcatccagccaagcccgtgagccgcacgccgctcctgctcccgctccgagcgccttaggtcaggcggcgttggcccgacggcggggggaggcatcacgctgccatccatgggcgcgcccccgccgccgctgcacccgacgcccacctctcccacggcgcgcccgcaccaccaccactacctcttctccatcaagcagctcaacacgctgggcgcggcggccgtgctcgccttctccaccacggtcccgctctcggagactgccttcgcggtgctcctcccccctacctcctcgtcctcgcctggctcgccttcccgcagcgcccaggccgctcgagacccggatcccgcctctacccctcggcaccatcgtcagtgtcttcgatggccacaacggccccgacgcccccaccccgacagacactgagccctcttccgctcgcgtgactggtgccccctcaaccctcgactctcctccccaccgtggccccttccccagccccagtgaccagcgcctcccttcctaagtgcggccatggcgaccatcgtgccctagcccgcccctgcaccatggcaagcacaccccttctactcctctcgccccaacccctgtgcagcccagcgcggtggcctataacccacagcaaggcgcaactagctggctggtggccctgccccggtgagcccctgctaggcgcggccagcaacccccgtggtctagcccctgcctaggcacacccaaaacccctgcccttgcaacttgtcctcggcgccgccccactcgcccgagatctgccgcgacaacaggaattggacgtacattgggactttgaagtgcagctaaggctacctggcgattggtggaaagagatctgatgacggcgatcatggtcgaagagtaggagaggccctagaagaaaggtgacatattctcgttcttcggcagcggaataaatgcaccgagctgagaaaggacagaacaaagaaagatcttaaaatcaaagctaaagaagtggagattcaaaatctaaaaaaaagctaatgtcatggaataaatgaggttgatgtggagctaaaaagggaggctatgtttttttgggtgaggcggttatcattggcttgttatgtgaacattattgtgatgtggtttcatgttgtccaggtgccagtttaacaactttttgcaccaccatgtcgagaatatcattgggtcatgtctggagagtaataatgatcaactgatgggccatgtccttgatgagtgtaaacttgttacaagaattttggaagcagagaagaactctgctctatcgtcagaattggacggtcgcatcgacgccaggttccagcagaggagtcgttactctccttgattccttcaccgagttcaccgaggaatatgaactgaaaatgaaagagaagggtgagcaactgattgtaagatctttcatcagtgcaacctctccttttttagctttcatcagtgctacactcccacagtccccacatgcacgcagatgtttgaaaatataaaataaaatcaacaacactgcaaatttactagctcaactacaagaggcatggagttattattaaaaaatgaagtactcatgatgaattccaaacaaaaaatctgacctaataatcaacataatataaattgttgtagctcagtcctatagtcatactgagctactgattagaatgttcaagaatgaaccattagatttcctgtgctaaaatgaggattgatcataagactaatgacgatcaagactatcaaggcccctacaaacaaagctcatgggaaattagaaagtgaaatgaaataccatgttgaaaacagggccaaagtagctagcaattcaaagaggcaaaatgctgcaaaatataatgcttcatgagttgttttcggtgttgtcaaaatctcaggtgccacaatggatgaaagaacaacatgtagaattgggttccaaaggacttgagggctacttcatcacaacctgtaactgaagatcttgaataactgactacatcaccatgcaagactaaagtttttattttattaagaaaatgaccccaaagaagaagatgtgtgatatatccctgatgactgcatatgtgttgagggttactacacactgaaaaatagaataacagactctgtggctgttagtgaagagggattagtcaaaaagagaacaaggcgtccaaaacctgttggcaatgagggggctgtcagaaagagaagaggctctgccatcccacaactataattgttcaatatattgtacctttttaaacctttagatggctgaattgaagggagaagatgatttatcagcaggctctatgagcacaactgcatagtcaagacataattcttcggcccctgcagacttcaagcagctaagaagtgttacgcccattgacatctttccacgacaagagacctgggcaagagaatccggacgtgctgagggggagaggaaggagaggaggaagatatcgggcaagagaacccattgacatccttggatagggtccgtctgatgccattcatcgctgtctttgatctcaggaaggcatcttagccagctcaattttattagaaatattgttgttttaagatacagagtccatggttactattgtacgcttttctgagaaacttgtcatcccaataatttggttctggagctatatactgatctagcttgttttagtaacaaatgtaagttgctcacatttcctttagactgtcactagaactttgaacgatcaactcgtgcttctaaatcaagaattaccatatgtgttttttgagttcgatcccttctattttttatttggccaccaaacgaagtttttacatgacaagaatgttataaatacttctttaaatcacgagtttcgtgtgtcacgtacgtgcaatgtaggtatatttctctttcatgcttctcgcgatcgattgtgccgtcgcaacgcacgggcattaacctagtctgtacatatgctgccagtgtgctgtgtgcgtctggtgtcgcactcgagtagtacgcgacgggtctcctgcggccctgttggagtcgtcaattgtcagccaccttcgaatacgagtagggatgacaattgacaacggggacagaccaggagctgtatgaaataaagaacattgtagatgctcttaatgagcaacgcgagaagttgcaagagcaaagaaagctgcttcattcagaccgagaaccaatctgacagcaaatccagcagcttactgggttagaagagctgaaaattgaatctgagaacgggcaactaactgtctttgacacaatgtgagaacttaaagaaataaaggtggcgtggaaaacctgaaagagaacggtgttcacatgtctcctgacgagaggatgtataaaaacgcaaatgcaaagcacactactgtgaagagattggaaccgtctcctgcgatccacaccaattttcctgggtgttattagaaaatgtgctcaggtgatattcaaaggctgtgcagagaagagcgctgatgatccccacaacacaacgatagattggtacctgcaaagttggcaatgcaaatgtcaatggctctagcttaattagctgctgctgcctattcagatgaactgttatttggtcatcagctggaaaatggtgctgggaa

SEQ ID NO: 75033 - DNA, 5013 bp, Zea Mays
cacatttctgtgtatgcttcttctcaaagaaaaaggacggacccagtgctggcagctcccacatcactggggtatggggaaagaataaccgattaagtgaggtatgcagaaatatcgacagtcaacctaagggtactggtactctggaacgtatatatgcaggagtaaatgtatactacaattatactggcactgttgactgctttgatctaaatgatgacccccatggaatgggtggatgggactggcaggcttgtaccgagatggtaatgccaatgtcttacagtgaacaaaggagcatgtatccaccttataaatttgactacgcttcctatgctgaggattgcatcaaaagctatggtgtcaggccaaggcctaagtggattacaacagaatttggtgggcataatatcactaaggtcctggaaaattttggtagtaacatcatattcttcaacggacttcttgacccatggagtggcggaggtgtcctgaagaatatatctgagagtgtcgttgctattgtggctccattaggagcacatcacatcgatctgcgcccggcaactccagatgacccggattggctggtggccctgagagaatcagagctggagatcatatctggctggctatgggattactacggggctggaggagcactcttccagcctgtagctgtgaagggctcctcttcatactgaggaaccgcaccctggctaataactcaaatgcttggtctcagaaataagagggccctgctgcaagtgccaaccaccgttaatgctgctgcagtgctgcgtcatggagaaggaagatcttcatgttgatgatcgggtccgctcctgcatcatgtgccatatcagtagcatttggtctgtgtatcaaatgggacatgtacttggctgatgaggtgaggaaaacactggataacgtaacgactctttcgcagtggtggtggcggtcagcaggtgctctagaggcttgatatcacgtgcatgtgccgctgtaaataacataatgctctatgtacgtgtacatctctactactctataagcctgtagtgtaggcgtgcacaccccgtgcaccgtgttctgcctccaacgtcctctcgcccacgcgctccgtcaatcacgcaagttatgccaccgatgtcgcccgaccgccccatccgcattgcccccacccccgtccgccgctagatgcggatcccgccgcttccagcatccagccaagcccgtgagccgcacgccgctcctgctcccgctccgagcgccttaggtcaggcggcgttggcccgacggcggggggaggcatcacgctgccatccatgggcgcgcccccgccgccgctgcacccgacgcccacctctcccacggcgcgcccgcaccaccaccactacctcttctccatcaagcagctcaacacgctgggcgcggcggccgtgctcgccttctccaccacggtcccgctctcggagactgccttcgcggtgctcctcccccctacctcctcgtcctcgcctggctcgccttcccgcagcgcccaggccgctcgagacccggatcccgcctctacccctcggcaccatcgtcagtgtcttcgatggccacaacggccccgacgcccccaccccgacagacactgagccctcttccgctcgcgtgactggtgccccctcaaccctcgactctcctccccaccgtggccccttccccagccccagtgaccagcgcctcccttcctaagtgcggccatggcgaccatcgtgccctagcccgcccctgcaccatggcaagcacaccccttctactcctctcgccccaacccctgtgcagcccagcgcggtggcctataacccacagcaaggcgcaactagctggctggtggccctgccccggtgagcccctgctaggcgcggccagcaacccccgtggtctagcccctgcctaggcacacccaaaacccctgcccttgcaacttgtcctcggcgccgccccactcgcccgagatctgccgcgacaacaggaattggacgtacattgggactttgaagtgcagctaaggctacctggcgattggtggaaagagatctgatgacggcgatcatggtcgaagagtaggagaggccctagaagaaagcggaataaatgcaccgagctgagaaaggacagaacaaagaaagatcttaaaatcaaagctaaagaagtggagattcaaaatctaaaaaaaagctaatgtcatggaataaatgaggttgatgtggagctaaaaagggaggctatgtttttttgggtgaggcggttatcattggcttgttatgtgaacattattgtgatgtggtttcatgttgtccaggtgccagtttaacaactttttgcaccaccatgtcgagaatatcattgggtcatgtctggagagtaataatgatcaactgatgggccatgtccttgatgagtgtaaacttgttacaagaattttggaagcagagaagaactctgctctatcgtcagaattggacggtcgcatcgacgccaggttccagcagaggagtcgttactctccttgattccttcaccgagttcaccgaggtgccatactctcgaaacaaatacttgataattgttttgattttggttctttgttgtttatttagaggtgccataaattttaattcttattcggacatagaacttcataacttaatcatgatcttctccaggaatatgaactgaaaatgaaagagaagggtgagcaactgattgtaagatctttcatcagtgcaacctctccttttttagctttcatcagtgctacactcccacagtccccacatgcacgcagatgtttgaaaatataaaataaaatcaacaacactgcaaatttactagctcaactacaagaggcatggagttattattaaaaaatgaagtactcatgatgaattccaaacaaaaaatctgacctaataatcaacataatataaattgttgtagctcagtcctatagtcatactgagctactgattagaatgttcaagaatgaaccattagatttcctgtgctaaaatgaggattgatcataagactaatgacgatcaagactatcaaggcccctacaaacaaagctcatgggaaattagaaagtgaaatgaaataccatgttgaaaacagggccaaagtagctagcaattcaaagaggcaaaatgctgcaaaatataatgcttcatgagttgttttcggtgttgtcaaaatctcaggtgccacaatggatgaaagaacaacatgtagaattgggttccaaaggacttgagggctacttcatcacaacctgtaactgaagatcttgaataactgactacatcaccatgcaagactaaagtttttattttattaagaaaatgaccccaaagaagaagatgtgtgatatatccctgatgactgcatatgtgttgagggttactacacactgaaaaatagaataacagactctgtggctgttagtgaagagggattagtcaaaaagagaacaaggcgtccaaaacctgttggcaatgagggggctgtcagaaagagaagaggctctgccatcccacaactataattgttcaatatattgtacctttttaaacctttagatggctgaattgaagggagaagatgatttatcagcaggctctatgagcacaactgcatagtcaagacataattcttcggcccctgcagacttcaagcagctaagaagtgttacgcccattgacatctttccacgacaagagacctgggcaagagaatccggacgtgctgagggggagaggaaggagaggaggaagatatcgggcaagagaacccattgacatccttggatagggtccgtctgatgccattcatcgctgtctttgatctcaggaaggcatcttagccagctcaattttattagaaatattgttgttttaagatacagagtccatggttactattgtacgcttttctgagaaacttgtcatcccaataatttggttctggagctatatactgatctagcttgttttagtaacaaatgtaagttgctcacatttcctttagactgtcactagaactttgaacgatcaactcgtgcttctaaatcaagaattaccatatgtgttttttgagttcgatcccttctattttttatttggccaccaaacgaagtttttacatgacaagaatgttataaatacttctttaaatcacgagtttcgtgtgtcacgtacgtgcaatgtaggtatatttctctttcatgcttctcgcgatcgattgtgccgtcgcaacgcacgggcattaacctagtctgtacatatgctgccagtgtgctgtgtgcgtctggtgtcgcactcgagtagtacgcgacgggtctcctgcggccctgttggagtcgtcaattgtcagccaccttcgaatacgagtagggatgacaattgacaacggggacagaccaggagctgtatgaaataaagaacattgtagatgctcttaatgagcaacgcgagaagttgcaagagcaaagaaagctgcttcattcagaccgagaaccaatctgacagcaaatccagcagcttactgggttagaagagctgaaaattgaatctgagaacgggcaactaactgtctttgacacaatgtgagaacttaaagaaataaaggtggcgtggaaaacctgaaagagaacggtgttcacatgtctcctgacgagaggatgtataaaaacgcaaatgcaaagcacactactgtgaagagattggaaccgtctcctgcgatccacaccaattttcctgggtgttattagaaaatgtgctcaggtgatattcaaaggctgtgcagagaagagcgctgatgatccccacaacacaacgatagattggtacctgcaaagttggcaatgcaaatgtcaatggctctagcttaattagctgctgctgcctattcagatgaactgttatttggtcatcagctggaaaatggtgctgggaa

SEQ ID NO: 75034 - DNA, 2764 bp, Zea Mays
gtcgtgatggtgtagaagagatatgcaactctggattgatgcggaataaatgcaccgagctgagaaaggacagaacaaagaaagatcttaaaatcaaagctaaagaagtggagattcaaaatctaaaaaaaagctaatgtcatggaataaatgaggttgatgtggagctaaaaagggaggctatgtttttttgggtgaggcggttatcattggcttgttatgtgaacattattgtgatgtggtttcatgttgtccaggtgaggtgccagtttaacaactttttgcaccaccatgtcgagaatatcattgggtcatgtctggagagtaataatgatcaactgatgggccatgtccttgatgagtgtaaacttgttacaagaattttggaagcagagaagaactctgctctatcgtcagaattggacggtcgcatcgacgccaggttccagcagaggagtcgttactctccttgattccttcaccgagttcaccgaggaatatgaactgaaaatgaaagagaagggtgagcaactgattgtaagatctttcatcagtgcaacctctccttttttagctttcatcagtgctacactcccacagtccccacatgcacgcagatgtttgaaaatataaaataaaatcaacaacactgcaaatttactagctcaactacaagaggcatggagttattattaaaaaatgaagtactcatgatgaattccaaacaaaaaatctgacctaataatcaacataatataaattgttgtagctcagtcctatagtcatactgagctactgattagaatgttcaagaatgaaccattagatttcctgtgctaaaatgaggattgatcataagactaatgacgatcaagactatcaaggcccctacaaacaaagctcatgggaaattagaaagtgaaatgaaataccatgttgaaaacagggccaaagtagctagcaattcaaagaggcaaaatgctgcaaaatataatgcttcatgagttgttttcggtgttgtcaaaatctcaggtgccacaatggatgaaagaacaacatgtagaattgggttccaaaggacttgagggctacttcatcacaacctgtaactgaagatcttgaataactgactacatcaccatgcaagactaaagtttttattttattaagaaaatgaccccaaagaagaagatgtgtgatatatccctgatgactgcatatgtgttgagggttactacacactgaaaaatagaataacagactctgtggctgttagtgaagagggattagtcaaaaagagaacaaggcgtccaaaacctgttggcaatgagggggctgtcagaaagagaagaggctctgccatcccacaactataattgttcaatatatatggctgaattgaagggagaagatgatttatcagcaggctctatgagcacaactgcatagtcaagacataattcttcggcccctgcagacttcaagcagctaagaagtgttacgcccattgacatctttccacgacaagagacctgggcaagagaatccggacgtgctgagggggagaggaaggagaggaggaagatatcgggcaagagaacccattgacatccttggatagggtccgtctgatgccattcatcgctgtctttgatctcaggaaggcatcttagccagctcaattttattagaaatattgttgttttaagatacagagtccatggttactattgtacgcttttctgagaaacttgtcatcccaataatttggttctggagctatatactgatctagcttgttttagtaacaaatgtaagttgctcacatttcctttagactgtcactagaactttgaacgatcaactcgtgcttctaaatcaagaattaccatatgtgttttttgagttcgatcccttctattttttatttggccaccaaacgaagtttttacatgacaagaatgttataaatacttctttaaatcacgagtttcgtgtgtcacgtacgtgcaatgtaggtatatttctctttcatgcttctcgcgatcgattgtgccgtcgcaacgcacgggcattaacctagtctgtacatatgctgccagtgtgctgtgtgcgtctggtgtcgcactcgagtagtacgcgacgggtctcctgcggccctgttggagtcgtcaattgtcagccaccttcgaatacgagtagggatgacaattgacaacggggacagaccaggagctgtatgaaataaagaacattgtagatgctcttaatgagcaacgcgagaagttgcaagagcaaagaaagctgcttcattcagaccgagaaccaatctgacagcaaatccagcagcttactgggttagaagagctgaaaattgaatctgagaacgggcaactaactgtctttgacacaatgtgagaacttaaagaaataaaggtggcgtggaaaacctgaaagagaacggtgttcacatgtctcctgacgagaggatgtataaaaacgcaaatgcaaagcacactactgtgaagagattggaaccgtctcctgcgatccacaccaattttcctgggtgttattagaaaatgtgctcaggtgatattcaaaggctgtgcagagaagagcgctgatgatccccacaacacaacgatagattggtacctgcaaagttggcaatgcaaatgtcaatggctctagcttaattagctgctgctgcctattcagatgaactgttatttggtcatcagctggaaaatggtgctgggaa

SEQ ID NO: 75035 - DNA, 3080 bp, Zea Mays
gagatatgcaactctggattgatgcggaataaatgcaccgagctgagaaaggacagaacaaagaaagatcttaaaatcaaagctaaagaagtggagattcaaaatctaaaaaaaagctaatgtcatggaataaatgaggttgatgtggagctaaaaagggaggctatgtttttttgggtgaggcggttatcattggcttgttatgtgaacattattgtgatgtggtttcatgttgtccaggtgccagtttaacaactttttgcaccaccatgtcgagaatatcattgggtcatgtctggagagtaataatgatcaactgatgggccatgtccttgatgagtgtaaacttgttacaagaattttggaagcagagaagaactctgctctatcgtcagaattggacggtcgcatcgacgccaggttccagcagaggagtcgttactctccttgattccttcaccgagttcaccgaggtgccatactctcgaaacaaatacttgataattgttttgattttggttctttgttgtttatttagaggtgccataaattttaattcttattcggacatagaacttcataacttaatcatgatcttctccaggaatatgaactgaaaatgaaagagaagggtgagcaactgattgtaagatctttcatcagtgcaacctctccttttttagctttcatcagtgctacactcccacagtccccacatgcacgcagatgtttgaaaatataaaataaaatcaacaacactgcaaatttactagctcaactacaagaggcatggagttattattaaaaaatgaagtactcatgatgaattccaaacaaaaaatctgacctaataatcaacataatataaattgttgtagctcagtcctatagtcatactgagctactgattagaatgttcaagaatgaaccattagatttcctgtgctaaaatgaggattgatcataagactaatgacgatcaagactatcaaggcccctacaaacaaagctcatgggaaattagaaagtgaaatgaaataccatgttgaaaacagggccaaagtagctagcaattcaaagaggcaaaatgctgcaaaatataatgcttcatgaggtcagtaaatacatatttggtaattccatgctaatacactgatgctttaagatgcctgagacatctatcttctttgttagttgttttcggtgttgtcaaaatctcaggtgccacaatggatgaaagaacaacatgtagaattgggttccaaaggacttgagggctacttcatcacaacctgtaactgaagatcttgaataactgactacatcaccatgcaagactaaagtttttattttattaagaaaatgaccccaaagaagaagatgtgtgatatatccctgatgactgcatatgtgttgagggttactacacactgaaaaatagaataacagactctgtggctgttagtgaagagggattagtcaaaaagagaacaaggcgtccaaaacctgttggcaatgagggggctgtcagaaagagaagaggctctgccatcccacaactataattgttcaatatatgtatgcattagacttcttaattctattaacttattgaattgtatgtgcatgaagttttttctttcatgtattacaccgcatgacatagttctttaactaatggcagtgtacctttttaaacctttagatggctgaattgaagggagaagatgatttatcagcaggctctatgagcacaactgcatagtcaagacataattcttcggcccctgcagacttcaagcagctaagaagtgttacgcccattgacatctttccacgacaagagacctgggcaagagaatccggacgtgctgagggggagaggaaggagaggaggaagatatcgggcaagagaacccattgacatccttggatagggtccgtctgatgccattcatcgctgtctttgatctcaggaaggcatcttagccagctcaattttattagaaatattgttgttttaagatacagagtccatggttactattgtacgcttttctgagaaacttgtcatcccaataatttggttctggagctatatactgatctagcttgttttagtaacaaatgtaagttgctcacatttcctttagactgtcactagaactttgaacgatcaactcgtgcttctaaatcaagaattaccatatgtgttttttgagttcgatcccttctattttttatttggccaccaaacgaagtttttacatgacaagaatgttataaatacttctttaaatcacgagtttcgtgtgtcacgtacgtgcaatgtaggtatatttctctttcatgcttctcgcgatcgattgtgccgtcgcaacgcacgggcattaacctagtctgtacatatgctgccagtgtgctgtgtgcgtctggtgtcgcactcgagtagtacgcgacgggtctcctgcggccctgttggagtcgtcaattgtcagccaccttcgaatacgagtagggatgacaattgacaacggggacagaccaggagctgtatgaaataaagaacattgtagatgctcttaatgagcaacgcgagaagttgcaagagcaaagaaagctgcttcattcagaccgagaaccaatctgacagcaaatccagcagcttactgggttagaagagctgaaaattgaatctgagaacgggcaactaactgtctttgacacaatgtgagaacttaaagaaataaaggtggcgtggaaaacctgaaagagaacggtgttcacatgtctcctgacgagaggatgtataaaaacgcaaatgcaaagcacactactgtgaagagattggaaccgtctcctgcgatccacaccaattttcctgggtgttattagaaaatgtgctcaggtgatattcaaaggctgtgcagagaagagcgctgatgatccccacaacacaacgatagattggtacctgcaaagttggcaatgcaaatgtcaatggctctagcttaattagctgctgctgcctattcagatgaactgttatttggtcatcagctggaaaatggtgctgggaa

SEQ ID NO: 75036 - DNA, 1107 bp, Zea Mays
cttcttctcacgcgcgggaacagcaaaggaagccccatattttcccgcgttcgtggtctccactctccagttctccgtttcccaactccaacccagcatccttgcatcccggggctcagttagcgttcccgccgcaccgtactacacctccggtggtcggtgcgcccatttcccgccgatcaagcgcgatggcctcgacgagggatctagccatagcttctctctcagctgcgaccggcgccgttgttgccgccgctgcactgcgcctcttgtcttcccgcagaacatcctccgtcagaccccagaacctccccgccgccgctaacggatctgcctccgagcgcccgctggctcagtcccccttcgatcctgtcaagagggaaggatatatttcctgggacgactacttcatggcgatcgccttcctttcggctgagcggtctaaggatcctaaccggcaggttggagcatgcttggttagccaagagggaataatcctaggaattggctacaatggcttccctagaggttgttccgatgacaagcttccttgggcaaagaaatctgcaagtggagatccattggagacaaaattcccctacgttgtccatgctgaggttaatgcaattctaaataccaaccatgcttcagcggctggacagaaattgtatgtcaccatgttcccatgcaatgaatgtgccaagattattattcaggtcaggaagcatcagccccagatggcgcaaataccgatcaagttccaggagccatgaagccggtactagttccagccttccaggagcactagtgagcgaataaacagtgcaagatacctgttgaccgcggcacctgtgacaatcgacaatggccgacccgcagcggtctcggtatgcggcgtcggtccctctccctccctcagaggctgttgtaaaactatagctagaattcgtactggtaataatgtaaagacatttcaattctcctctctgataccagcttatcttttacgtgcgtttggatcccttcattttagaggaattgaaattcactcaataaattaactcatttagtttgaaatttgagatttcaccattttttaaagttcag

SEQ ID NO: 75037 - DNA, 1197 bp, Zea Mays
gccccatattttcccgcgttcgtggtctccactctccagttctccgtttcccaactccaacccagcatccttgcatcccggggctcagttagcgttcccgccgcaccgtactacacctccggtggtcggtgcgcccatttcccgccgatcaagcgcgatggcctcgacgagggatctagccatagcttctctctcagctgcgaccggcgccgttgttgccgccgctgcactgcgcctcttgtcttcccgcagaacatcctccgtcagaccccagaacctccccgccgccgctaacggatctgcctccgagcgcccgctggctcagtcccccttcgatcctgtcaagagggaaggattcgtggcgcttgtttgtgcagatatatttcctgggacgactacttcatggcgatcgccttcctttcggctgagcggtctaaggatcctaaccggcaggttggagcatgcttggttagccaagagggaataatcctaggaattggctacaatggcttccctagaggttgttccgatgacaagcttccttgggcaaagaaatctgcaagtggagatccattggagacaaaattcccctacgttgtccatgctgaggttaatgcaattctaaataccaaccatgcttcagcggctggacagaaattgtatgtcaccatgttcccatgcaatgaatgtgccaagattattattcaggcgtatctgaggtcatatatttcgttgaaaaaaagattgacaactcagctcacgtttatgttgcctctcacaagctattgtcgatggctggtgtcaaggtcaggaagcatcagccccagatggcgcaaataccgatcaagttccaggagccatgaagccggtactagttccagccttccaggagcactagtgagcgaataaacagtgcaagatacctgttgaccgcggcacctgtgacaatcgacaatggccgacccgcagcggtctcggtatgcggcgtcggtccctctccctccctcagaggctgttgtaaaactatagctagaattcgtactggtaataatgtaaagacatttcaattctcctctctgataccagcttatcttttacgtgcgtttggatcccttcattttagaggaattgaaattcactcaataaattaactcatttagtttgaaatttgagatttcaccattttttaaagttcag

SEQ ID NO: 75038 - DNA, 2788 bp, Zea Mays
ttcgctctcccgcgccaccggcctagacgcctagtatgttctagagcataccgcgatggccgaccctgctggcctcccgccgcggcttcgcccgtccactgtgccgcctccagccgccgtcacgcgcgcgctgcacgcgatcaacacctgcacctccgccgcggcactcgcgcccctccgcgtccacatcctccgggaacccgcgctcctccgctccaccgccgtcatctccgccttcttcctcgcctgcggccgcctccgtagcctcgaccccgcactcgttctcttcgcctccctcccgcggccccacgttttcgtcttcaactccctcctccgctccctcccccaggcccccgcctgctcaccgctcccgctcttgcgccacttcctcggcctcggcgcccgccccaaccgctacaccttcccgttgatgctcacctcgctttcctctctccgcgagctcaacgtcgcgcactcccaggtggccaagtccggctttgcgcgcgacctccacgtccgaaacgccctccttgctcgctacgcggcctgtgatccggacctcgggcacgctgagcagttgtttgatgaaatgccacgcccggacgtcgtctcgtggaccacggtgatcaccgcgtacagaaaccacggccacagtttcttggctctggccaccttccggcggatgttcgctgcatctgttgctcccaaccgcgtcaccatggtttctgcacttggtgcttgtgcagcacatggtgctgtggacactggcatctggattcatcagtacgttcagaagctgggttgggaactggatgtcgtgttaggcactgcgcttgttgacatgtatgggaagtgtggacacgttgcggaaggagtccgtgtattctccaaaatgactgagaggaatgtttttacttggaactctatcattggagcatttgctttggtacaggatggagaaatggctctgcgttggttcttcaggatgaaggctgatggcatacgccctgatgctgtcacgctaatttgtgttctttatgcatgcgtacatgctggattagttgatattgggaggaaaatatttaacttgattgttcaaggcgagtatgggtttcaacctgggatcaagcactttggatgcatggttgatcttcttagtcgctctggacacctgaatgatgctttcagggttgttgaggcaatgccatcacagccaaacgctgtcatttggggcctgctattgcgaggttgcaaggaccatggtgattcagtcttgagtgagcatgtgacaatgcagctgctggagttggagcctgaaaatgcttcgcattatgtgacacttgcaaacttgtatgctgagacagggaggtggctggaggctcacgaggtcttgaagtggatgaaggaaaaaggattggcaaaggatgcaggctggagccttaggatgttagaggacaggtcaagcaaatgtataagtgatggaaatttcatggaagctcttgaggagatactgtaacgaaacatggctcctctgactcctagactggtagtgcccatagacgtgaagaagcagccatgggagcagaaggttcctctccacaaccgctggcatccagacatccctcccgttgctgatgtaaccgaaggggaactgttccgggtcgagatggtagactggactggagggagggttagagacgataactctgcagacgacatcaaatccctggacctcacaatcactcattatcttagtgggcccctaagaatcgttgattccgaaggggttccggcttcaccaggcgatcttctcgcggtggaaatctgcaaccttggcccgcttcctggcgacgagtggggctacactgcgatatttgagagagagaacggaggtgggttcctaactgaccacttccctactgcgaggaaggccatctggtatttcgaaggaatctatgcgtactcccctcagataccaggtgttcgtttcccaggattaacccatcctggtattgtgggaactgcaccgtcagccgaacttcttaatatatggaacgagagggagaaaagattggccgagacaagcccacagacccttaaactgtgtgaagtgctacaccagaggccccttgccaatttaccgacccctgagaactgcttacttggaaagattcaggaggggactgctggatggcacaaagtggcgaatgaagcagccaggactattccgggaagggagaatggcggtaattgtgacataaaaaacttaagcagaggttccaaagtttatctgccagtatttgtcgaaggagcgaatcttagcaccggtgatatgcacttctcccagggcgatggtgaagtttcgttttgtggagcaattgaaatgagtggattccttgagctcaagtgcgagatcataagaggcgggatgaaggaatacttgaccccagttggtccgacaccgctacacgtgaaccctatctttgagatcggtcctgtcgagccacgcttctcggagtggctagtgtttgagggcataagcgtggatgaatctgggaagcagcatttccttgatgcgtcagttgcttacaagcgcgcagtcctgaacgccattgagtacattgctagatttgggtactcaaaggagcaggtgtatctcttactatcatgctgtccctgtgagggtaggatctctggaatagttgactctcctaatgcagtggcaactattgccatccctacagcaatatttgatcagaacagcatgcatcagggcatttgatatgag

SEQ ID NO: 75039 - DNA, 3774 bp, Zea Mays
ttcgctctcccgcgccaccggcctagacgcctagtatgttctagagcataccgcgatggccgaccctgctggcctcccgccgcggcttcgcccgtccactgtgccgcctccagccgccgtcacgcgcgcgctgcacgcgatcaacacctgcacctccgccgcggcactcgcgcccctccgcgtccacatcctccgggaacccgcgctcctccgctccaccgccgtcatctccgccttcttcctcgcctgcggccgcctccgtagcctcgaccccgcactcgttctcttcgcctccctcccgcggccccacgttttcgtcttcaactccctcctccgctccctcccccaggcccccgcctgctcaccgctcccgctcttgcgccacttcctcggcctcggcgcccgccccaaccgctacaccttcccgttgatgctcacctcgctttcctctctccgcgagctcaacgtcgcgcactcccaggtggccaagtccggctttgcgcgcgacctccacgtccgaaacgccctccttgctcgctacgcggcctgtgatccggacctcgggcacgctgagcagttgtttgatgaaatgccacgcccggacgtcgtctcgtggaccacggtgatcaccgcgtacagaaaccacggccacagtttcttggctctggccaccttccggcggatgttcgctgcatctgttgctcccaaccgcgtcaccatggtttctgcacttggtgcttgtgcagcacatggtgctgtggacactggcatctggattcatcagtacgttcagaagctgggttgggaactggatgtcgtgttaggcactgcgcttgttgacatgtatgggaagtgtggacacgttgcggaaggagtccgtgtattctccaaaatgactgagaggaatgtttttacttggaactctatcattggagcatttgctttggtacaggatggagaaatggctctgcgttggttcttcaggatgaaggctgatggcatacgccctgatgctgtcacgctaatttgtgttctttatgcatgcgtacatgctggattagttgatattgggaggaaaatatttaacttgattgttcaaggcgagtatgggtttcaacctgggatcaagcactttggatgcatggttgatcttcttagtcgctctggacacctgaatgatgctttcagggttgttgaggcaatgccatcacagccaaacgctgtcatttggggcctgctattgcgaggttgcaaggaccatggtgattcagtcttgagtgagcatgtgacaatgcagctgctggagttggagcctgaaaatgcttcgcattatgtgacacttgcaaacttgtatgctgagacagggaggtggctggaggctcacgaggtcttgaagtggatgaaggaaaaaggattggcaaaggatgcaggctggagccttaggatgttagaggacaggtcaagcaaatgtataagtgatggaaatttcatggaagctcttgaggagatactgtaacgaaacatggctcctctgactcctagactggtagtgcccatagacgtgaagaagcagccatgggagcagaaggttcctctccacaaccgctggcatccagacatccctcccgttgctgatgtaaccgaaggggaactgttccgggtcgagatggtagactggactggagggagggttagagacgataactctgcagacgacatcaaatccctggacctcacaatcactcattatcttagtgggcccctaagaatcgttgattccgaaggggttccggcttcaccaggcgatcttctcgcggtggaaatctgcaaccttggcccgcttcctggcgacgagtggggctacactgcgatatttgagagagagaacggaggtgttcgtttcccaggattaacccatcctggtattgtgggaactgcaccgtcagccgaacttcttaatatatggaacgagagggagaaaagattggccgagacaagcccacagacccttaaactgtgtgaagtgctacaccagaggccccttgccaatttaccgacccctgagaactgcttacttggaaagattcaggaggggactgctggatggcacaaagtggcgaatgaagcagccaggactattccgggaagggagaatggcggtaattgtgacataaaaaacttaagcagaggttccaaagtttatctgccagtatttgtcgaaggagcgaatcttagcaccggtgatatgcacttctcccagggcgatggtgaagtttcgttttgtggagcaattgaaatgagtggattccttgagctcaagtgcgagatcataagaggcgggatgaaggaatacttgaccccagttggtccgacaccgctacacgtgaaccctatctttgagatcggtcctgtcgagccacgcttctcggagtggctagtgtttgagggcataagcgtggatgaatctgggaagcagcatttccttgatgcgtcagttgcttacaagcgcgcagtcctgaacgccattgagtacattgctagatttgggtactcaaaggagcaggtgtatctcttactatcatgctgtccctgtgagggtaggatctctggaatagttgactctcctaatgcagtggcaactattgccatccctacagcaatatttgatcaggatataaagccaaaacacctgagaggaagaccgggaccaaagttgataaggcttccagatctcctgagctgttcaaacaatgggcatattcctgtcacccaagaccaaagtggtacaagggcgtcctaggggcgtatatgatctggaagctgatgccgtatccttctacttatacacacaaataatcgtgttggtgtttccaacaatgtatgaggatagagacacctgagtggtgccatattttcagtgcctgtattgctacaaagttgttcattaatttcactctatagaaaatttcttatttggggtcgagtatgtaactagcagtgaagtgaggatgagataatatgaaagaaccaggcagctggtagtggctggagcgaagttgcagttgtgacagattcactctacctgcacacaagaaaccaacacacactgttgatccagttctagcatactatagacagatgctggttggattcatgaaatagcctccggagctgaaggaagtcctaaagagggtgaagaaatgagtttgacaaacgatgctggttgtagccttagggtgatgttagaggaccatatatgagcggtggatatttgatggaatgggcattgtggagttgtggttcagtcaatctgtaccattgtcaattgcccttccttcactaccagccagatcaccaatgtttggaagctgaacacacgaacttcatgacatttaaaaagttaataagatgaagcgactttatgacattttaaaaggttaataagttgaggcgactttgtataacccaaataaagtggtgagaaataagaaaagaaaatgaaaataattaaagaggctagagtactactccctccgttccatataactcgttttgagctttttacaccaaatttaattagtttgtcttattaaaaaattcacaattactccttctgtcccaaaacatagttttttttttctaaccctcttctttttcgtccatatttaaataaatgataatgagtatagatatacatataacctcttaggatatttaatttgagtaattagatagtccgtcatcttttcactcctcttttttttggattggatg

SEQ ID NO: 75040 - DNA, 3855 bp, Zea Mays
ttcgctctcccgcgccaccggcctagacgcctagtatgttctagagcataccgcgatggccgaccctgctggcctcccgccgcggcttcgcccgtccactgtgccgcctccagccgccgtcacgcgcgcgctgcacgcgatcaacacctgcacctccgccgcggcactcgcgcccctccgcgtccacatcctccgggaacccgcgctcctccgctccaccgccgtcatctccgccttcttcctcgcctgcggccgcctccgtagcctcgaccccgcactcgttctcttcgcctccctcccgcggccccacgttttcgtcttcaactccctcctccgctccctcccccaggcccccgcctgctcaccgctcccgctcttgcgccacttcctcggcctcggcgcccgccccaaccgctacaccttcccgttgatgctcacctcgctttcctctctccgcgagctcaacgtcgcgcactcccaggtggccaagtccggctttgcgcgcgacctccacgtccgaaacgccctccttgctcgctacgcggcctgtgatccggacctcgggcacgctgagcagttgtttgatgaaatgccacgcccggacgtcgtctcgtggaccacggtgatcaccgcgtacagaaaccacggccacagtttcttggctctggccaccttccggcggatgttcgctgcatctgttgctcccaaccgcgtcaccatggtttctgcacttggtgcttgtgcagcacatggtgctgtggacactggcatctggattcatcagtacgttcagaagctgggttgggaactggatgtcgtgttaggcactgcgcttgttgacatgtatgggaagtgtggacacgttgcggaaggagtccgtgtattctccaaaatgactgagaggaatgtttttacttggaactctatcattggagcatttgctttggtacaggatggagaaatggctctgcgttggttcttcaggatgaaggctgatggcatacgccctgatgctgtcacgctaatttgtgttctttatgcatgcgtacatgctggattagttgatattgggaggaaaatatttaacttgattgttcaaggcgagtatgggtttcaacctgggatcaagcactttggatgcatggttgatcttcttagtcgctctggacacctgaatgatgctttcagggttgttgaggcaatgccatcacagccaaacgctgtcatttggggcctgctattgcgaggttgcaaggaccatggtgattcagtcttgagtgagcatgtgacaatgcagctgctggagttggagcctgaaaatgcttcgcattatgtgacacttgcaaacttgtatgctgagacagggaggtggctggaggctcacgaggtcttgaagtggatgaaggaaaaaggattggcaaaggatgcaggctggagccttaggatgttagaggacaggtcaagcaaatgtataagtgatggaaatttcatggaagctcttgaggagatactgtaacgaaacatggctcctctgactcctagactggtagtgcccatagacgtgaagaagcagccatgggagcagaaggttcctctccacaaccgctggcatccagacatccctcccgttgctgatgtaaccgaaggggaactgttccgggtcgagatggtagactggactggagggagggttagagacgataactctgcagacgacatcaaatccctggacctcacaatcactcattatcttagtgggcccctaagaatcgttgattccgaaggggttccggcttcaccaggcgatcttctcgcggtggaaatctgcaaccttggcccgcttcctggcgacgagtggggctacactgcgatatttgagagagagaacggaggtgggttcctaactgaccacttccctactgcgaggaaggccatctggtatttcgaaggaatctatgcgtactcccctcagataccaggtgttcgtttcccaggattaacccatcctggtattgtgggaactgcaccgtcagccgaacttcttaatatatggaacgagagggagaaaagattggccgagacaagcccacagacccttaaactgtgtgaagtgctacaccagaggccccttgccaatttaccgacccctgagaactgcttacttggaaaggaggggactgctggatggcacaaagtggcgaatgaagcagccaggactattccgggaagggagaatggcggtaattgtgacataaaaaacttaagcagaggttccaaagtttatctgccagtatttgtcgaaggagcgaatcttagcaccggtgatatgcacttctcccagggcgatggtgaagtttcgttttgtggagcaattgaaatgagtggattccttgagctcaagtgcgagatcataagaggcgggatgaaggaatacttgaccccagttggtccgacaccgctacacgtgaaccctatctttgagatcggtcctgtcgagccacgcttctcggagtggctagtgtttgagggcataagcgtggatgaatctgggaagcagcatttccttgatgcgtcagttgcttacaagcgcgcagtcctgaacgccattgagtacattgctagatttgggtactcaaaggagcaggtgtatctcttactatcatgctgtccctgtgagggtaggatctctggaatagttgactctcctaatgcagtggcaactattgccatccctacagcaatatttgatcaggatataaagccaaaacacctgagaggaagaccgggaccaaagttgataaggcttccagatctcctgagctgttcaaacaatgggcatattcctgtcacccaagaccaaagtggtacaagggcgtcctaggggcgtatatgatctggaagctgatgccgtatccttctacttatacacacaaataatcgtgttggtgtttccaacaatgtatgaggatagagacacctgagtggtgccatattttcagtgcctgtattgctacaaagttgttcattaatttcactctatagaaaatttcttatttggggtcgagtatgtaactagcagtgaagtgaggatgagataatatgaaagaaccaggcagctggtagtggctggagcgaagttgcagttgtgacagattcactctacctgcacacaagaaaccaacacacactgttgatccagttctagcatactatagacagatgctggttggattcatgaaatagcctccggagctgaaggaagtcctaaagagggtgaagaaatgagtttgacaaacgatgctggttgtagccttagggtgatgttagaggaccatatatgagcggtggatatttgatggaatgggcattgtggagttgtggttcagtcaatctgtaccattgtcaattgcccttccttcactaccagccagatcaccaatgtttggaagctgaacacacgaacttcatgacatttaaaaagttaataagatgaagcgactttatgacattttaaaaggttaataagttgaggcgactttgtataacccaaataaagtggtgagaaataagaaaagaaaatgaaaataattaaagaggctagagtactactccctccgttccatataactcgttttgagctttttacaccaaatttaattagtttgtcttattaaaaaattcacaattactccttctgtcccaaaacatagttttttttttctaaccctcttctttttcgtccatatttaaataaatgataatgagtatagatatacatataacctcttaggatatttaatttgagtaattagatagtccgtcatcttttcactcctcttttttttggattggatg

SEQ ID NO: 75041 - DNA, 2034 bp, Zea Mays
aaaagcagtactgcagtagaaaaaaaactccctagaggtcgaccgagacccctgcggacctgcgcttcggccgttgcggaccgcaggagtgacgattccatggcggaggagatggcgcaggcgcaaccgagactcacggcgccacgttcggtccgctgtattgtcaagctaggtggagcggcgattaccaacaagggcgagctggagagcatcaacgaggagaacctacggtcggcatgtgcgcagctgcggcatgccatgtccgaatctgacggcgatggcgccatggagaaggttctgggaatggactggagtaggaagcccggagatcctgtcgacccggccgttgacgcggagtggatcgcggggatagctaggctggggctcgacactaacttcgtcgtcgtgcacggggccgggtcttttggccactttcaagcaagtagatctggagttcataaaggagggttacattcgacactggtcaaggctggctttgttgctacaagaatttcagtgacatctctcaaccaggaaattgttagagccctagcaagaggaataccatctgttgggatgtcaccatttgcttgtgggtggtctacccaacaaagaaaacttgcatcagcaaatgcttctcaaatatttcagtcactccatgcaggttttgtcccagtaagttgttgtagcaaaggttttgaaccgctattccttcaaaatttcatatttatcaaaaatagggcctggtgcagtggtagtctctccacttgctgtttggagatccttgaaaaattaagcaagggtaaggatgtagaaaagttctcttccccataccctttcttctgtgggagcttttggcactgggtacgcacacctgaagttgttggcatgagtggtatagttactcaccccatatttgacagcatatggtgctactggaacatgtatcatattgttatttttttatgcatgcactattttggtactcgtgatagtgcttttctatattgcacattgaacgctaaaacaagtcccatatgaattatttagtattaattattataagcaagcattagataagttccatgcgctttctctgatttgcagctggaacctaagcatgatcagaaattaatataaacttttgcttatagcataagacccttgtttcttgcaggttttgcacggtgatgcagttcttgatgaattattggactgtaccatattgagtggggatgtcattatacgacatcttgcacagcttctgagtccgaaatatgtagtatttctgatgtccatggagtgtatgatcgccctccaactgactcaaatgcagtacttctgagagaaataggttagtattcacctggttgatttttatctgcccataatatctagcctgtactttttgatgtgtattagtcattatgcgaggaaacaggacaacaaaggtaatgcaattgtcatcattcaattcttgggtaaaacatggaaatatgcttcttcaacaaattctagctgacttgtgttagttaacagaggtggatgacattggaggctggtcgattgtaaaacctgcattgctgcaaggcaacactaaaggagtggagatatcagttgcagcacatgacaccaccggtgggatggagaccaaaatactggaggctgcagtgatagctaggcttggaatagacgtgtatattaccaaggctggaacagaacactcgctgagggccttgaagggagatgtgagcaccgactcggaagattggcttggaactattatacgctcttccaaatagatttcttgttgcaaaaacattcggactggtttactggcgattttcccgatgttatatgagcagtgatgagccttgggctttcgatgatgatccagcacgggtctattccctactgtggtcgtagtttggtttacaagcgtcagcctgatgttacaaatgccgttcagtaaatttgttttgttttctgaaaagataagatgcattggtcgcaagagaggaaaaaattgatttt

SEQ ID NO: 75042 - DNA, 1672 bp, Zea Mays
aaaagcagtactgcagtagaaaaaaaactccctagaggtcgaccgagacccctgcggacctgcgcttcggccgttgcggaccgcaggagtgacgattccatggcggaggagatggcgcaggcgcaaccgagactcacggcgccacgttcggtccgctgtattgtcaagctaggtggagcggcgattaccaacaagggcgagctggagagcatcaacgaggagaacctacggtcggcatgtgcgcagctgcggcatgccatgtccgaatctgacggcgatggcgccatggagaaggttctgggaatggactggagtaggaagcccggagatcctgtcgacccggccgttgacgcggagtggatcgcggggatagctaggctggggctcgacactaacttcgtcgtcgtgcacggggccgggtcttttggccactttcaagcaagtagatctggagttcataaaggagggttacattcgacactggtcaaggctggctttgttgctacaagaatttcagtgacatctctcaaccaggaaattgttagagccctagcaagagaaggaataccatctgttgggatgtcaccatttgcttgtgggtggtctacccaacaaagaaaacttgcatcagcaaatgcttctcaaatatttcagtcactccatgcaggttttgtcccagttttgcacggtgatgcagttcttgatgaattattggactgtaccatattgagtggggatgtcattatacgacatcttgcacagcttctgagtccgaaatatgtagtatttctgtcattatgcgaggaaacaggacaacaaagcttggctcttaggactggcacatgccttagccactattctgacacttccaagtacctgattcaggggagggcaaaaacgtccaaatctgcaattaaatacccagacgatttcctttcaggtaaagtgagaaaaacggcagagcgactcctaaaaagaaccggagggagtactgaataagcattgccaacctagttttcattcaccattgagaatgtccttctgtattttcaataacgtgacatcaaatgctcctagtgaaggtgcagtggtttagaagcgaactgtaggatcaaactatggtttattaggctgaggagtagggacaatgatgtgcctggcctggttttttttttcttctaaactgcttgctgtagccttgtattttgtagagtaagatatctgttgttctcatgtactgcagtggagatatcagttgcagcacatgacaccaccggtgggatggagaccaaaatactggaggctgcagtgatagctaggcttggaatagacgtgtatattaccaaggctggaacagaacactcgctgagggccttgaagggagatgtgagcaccgactcggaagattggcttggaactattatacgctcttccaaatagatttcttgttgcaaaaacattcggactggtttactggcgattttcccgatgttatatgagcagtgatgagccttgggctttcgatgatgatccagcacgggtctattccctactgtggtcgtagtttggtttacaagcgtcagcctgatgttacaaatgccgttcagtaaatttgttttgttttctgaaaagataagatgcattggtcgcaagagaggaaaaaattgatttt

SEQ ID NO: 75043 - DNA, 2144 bp, Zea Mays
aaaagcagtactgcagtagaaaaaaaactccctagaggtcgaccgagacccctgcggacctgcgcttcggccgttgcggaccgcaggagtgacgattccatggcggaggagatggcgcaggcgcaaccgagactcacggcgccacgttcggtccgctgtattgtcaagctaggtggagcggcgattaccaacaagggcgagctggagagcatcaacgaggagaacctacggtcggcatgtgcgcagctgcggcatgccatgtccgaatctgacggcgatggcgccatggagaaggttctgggaatggactggagtaggaagcccggagatcctgtcgacccggccgttgacgcggagtggatcgcggggatagctaggctggggctcgacactaacttcgtcgtcgtgcacggggccgggtcttttggccactttcaagcaagtagatctggagttcataaaggagggttacattcgacactggtcaaggctggctttgttgctacaagaatttcagtgacatctctcaaccaggaaattgttagagccctagcaagaggaataccatctgttgggatgtcaccatttgcttgtgggtggtctacccaacaaagaaaacttgcatcagcaaatgcttctcaaatatttcagtcactccatgcaggttttgtcccagtaagttgttgtagcaaaggttttgaaccgctattccttcaaaatttcatatttatcaaaaatagggcctggtgcagtggtagtctctccacttgctgtttggagatccttgaaaaattaagcaagggtaaggatgtagaaaagttctcttccccataccctttcttctgtgggagcttttggcactgggtacgcacacctgaagttgttggcatgagtggtatagttactcaccccatatttgacagcatatggtgctactggaacatgtatcatattgttatttttttatgcatgcactattttggtactcgtgatagtgcttttctatattgcacattgaacgctaaaacaagtcccatatgaattatttagtattaattattataagcaagcattagataagttccatgcgctttctctgatttgcagctggaacctaagcatgatcagaaattaatataaacttttgcttatagcataagacccttgtttcttgcaggttttgcacggtgatgcagttcttgatgaattattggtgaattttcaaatcaaagcttgctgcgttgttgtttaggttttatggactatgaagtcaatttattttattaaaaataaaattgatcttatctttaaatgaccaggactgtaccatattgagtggggatgtcattatacgacatcttgcacagcttctgagtccgaaatatgtagtatttctgacagatgtccatggagtgtatgatcgccctccaactgactcaaatgcagtacttctgagagaaataggttagtattcacctggttgatttttatctgcccataatatctagcctgtactttttgatgtgtattagtcattatgcgaggaaacaggacaacaaaggtaatgcaattgtcatcattcaattcttgggtaaaacatggaaatatgcttcttcaacaaattctagctgacttgtgttagttaacagaggtggatgacattggaggctggtcgattgtaaaacctgcattgctgcaaggcaacactaaaggagtggagatatcagttgcagcacatgacaccaccggtgggatggagaccaaaatactggaggctgcagtgatagctaggcttggaatagacgtgtatattaccaaggctggaacagaacactcgctgagggccttgaagggagatgtgagcaccgactcggaagattggcttggaactattatacgctcttccaaatagatttcttgttgcaaaaacattcggactggtttactggcgattttcccgatgttatatgagcagtgatgagccttgggctttcgatgatgatccagcacgggtctattccctactgtggtcgtagtttggtttacaagcgtcagcctgatgttacaaatgccgttcagtaaatttgttttgttttctgaaaagataagatgcattggtcgcaagagaggaaaaaattgatttt

SEQ ID NO: 75044 - DNA, 1555 bp, Zea Mays
aaaagcagtactgcagtagaaaaaaaactccctagaggtcgaccgagacccctgcggacctgcgcttcggccgttgcggaccgcaggagtgacgattccatggcggaggagatggcgcaggcgcaaccgagactcacggcgccacgttcggtccgctgtattgtcaagctaggtggagcggcgattaccaacaagggcgagctggagagcatcaacgaggagaacctacggtcggcatgtgcgcagctgcggcatgccatgtccgaatctgacggcgatggcgccatggagaaggttctgggaatggactggagtaggaagcccggagatcctgtcgacccggccgttgacgcggagtggatcgcggggatagctaggctggggctcgacactaacttcgtcgtcgtgcacggggccgggtcttttggccactttcaagcaagtagatctggagttcataaaggagggttacattcgacactggtcaaggctggctttgttgctacaagaatttcagtgaggccaattatgacattgtgacatctctcaaccaggaaattgttagagccctagcaagagaaggaataccatctgttgggatgtcaccatttgcttgtgggtggtctacccaacaaagaaaacttgcatcagcaaatgcttctcaaatatttcagtcactccatgcaggttttgtcccagttttgcacggtgatgcagttcttgatgaattattggactgtaccatattgagtggggatgtcattatacgacatcttgcacagcttctgagtccgaaatatgtagtatttctgatgtccatggagtgtatgatcgccctccaactgactcaaatgcagtacttctgagagaaataggttagtattcacctggttgatttttatctgcccataatatctagcctgtactttttgatgtgtattagtcattatgcgaggaaacaggacaacaaaggtaatgcaattgtcatcattcaattcttgggtaaaacatggaaatatgcttcttcaacaaattctagctgacttgtgttagttaacagaggtggatgacattggaggctggtcgattgtaaaacctgcattgctgcaaggcaacactaaaggagtggagatatcagttgcagcacatgacaccaccggtgggatggagaccaaaatactggaggctgcagtgatagctaggcttggaatagacgtgtatattaccaaggctggaacagaacactcgctgagggccttgaagggagatgtgagcaccgactcggaagattggcttggaactattatacgctcttccaaatagatttcttgttgcaaaaacattcggactggtttactggcgattttcccgatgttatatgagcagtgatgagccttgggctttcgatgatgatccagcacgggtctattccctactgtggtcgtagtttggtttacaagcgtcagcctgatgttacaaatgccgttcagtaaatttgttttgttttctgaaaagataagatgcattggtcgcaagagaggaaaaaattgatttt

SEQ ID NO: 75045 - DNA, 1856 bp, Zea Mays
aaaagcagtactgcagtagaaaaaaaactccctagaggtcgaccgagacccctgcggacctgcgcttcggccgttgcggaccgcaggagtgacgattccatggcggaggagatggcgcaggcgcaaccgagactcacggcgccacgttcggtccgctgtattgtcaagctaggtggagcggcgattaccaacaagggcgagctggagagcatcaacgaggagaacctacggtcggcatgtgcgcagctgcggcatgccatgtccgaatctgacggcgatggcgccatggagaaggttctgggaatggactggagtaggaagcccggagatcctgtcgacccggccgttgacgcggagtggatcgcggggatagctaggctggggctcgacactaacttcgtcgtcgtgcacggggccgggtcttttggccactttcaagcaagtagatctggagttcataaaggagggttacattcgacactggtcaaggctggctttgttgctacaagaatttcagtgacatctctcaaccaggaaattgttagagccctagcaagagaaggaataccatctgttgggatgtcaccatttgcttgtgggtggtctacccaacaaagaaaacttgcatcagcaaatgcttctcaaatatttcagtcactccatgcaggttttgtcccagtaagttgttgtagcaaaggttttgaaccgctattccttcaaaatttcatatttatcaaaaatagggcctggtgcagtggtagtctctccacttgctgtttggagatccttgaaaaattaagcaagggtaaggatgtagaaaagttctcttccccataccctttcttctgtgggagcttttggcactgggtacgcacacctgaagttgttggcatgagtggtatagttactcaccccatatttgacagcatatggtgctactggaacatgtatcatattgttatttttttatgcatgcactattttggtactcgtgatagtgcttttctatattgcacattgaacgctaaaacaagtcccatatgaattatttagtattaattattataagcaagcattagataagttccatgcgctttctctgatttgcagctggaacctaagcatgatcagaaattaatataaacttttgcttatagcataagacccttgtttcttgcaggttttgcacggtgatgcagttcttgatgaattattggactgtaccatattgagtggggatgtcattatacgacatcttgcacagcttctgagtccgaaatatgtagtatttctgacagatgtccatggagtgtatgatcgccctccaactgactcaaatgcagtacttctgagagaaatagaggtggatgacattggaggctggtcgattgtaaaacctgcattgctgcaaggcaacactaaaggagtggagatatcagttgcagcacatgacaccaccggtgggatggagaccaaaatactggaggctgcagtgatagctaggcttggaatagacgtgtatattaccaaggctggaacagaacactcgctgagggccttgaagggagatgtgagcaccgactcggaagattggcttggaactattatacgctcttccaaatagatttcttgttgcaaaaacattcggactggtttactggcgattttcccgatgttatatgagcagtgatgagccttgggctttcgatgatgatccagcacgggtctattccctactgtggtcgtagtttggtttacaagcgtcagcctgatgttacaaatgccgttcagtaaatttgttttgttttctgaaaagataagatgcattggtcgcaagagaggaaaaaattgatttt

SEQ ID NO: 75046 - DNA, 1723 bp, Zea Mays
cccacacctacagcagcagaactgcagaagcggtccctctccacagaactgcagaagcagcgcggcgcggccgttaactcggctccctcaccttgctgccccctccgcaggcgcaggcgctcgcttccggtaaaaaaattggaggtgccatttgccaggggcgtactccattgattcgggctgagttgtgcaaattgtgatagaactttcccgagattcaagcccatacaatgcagggcatctctatatgcggttcagttgcctcaccccatggagcaaactgcagaagggcttgtgttgcaaggaacgatgtgaggctgccttgtgaagttaatgcagtaagccagggattgcactctctgcattggtggtgtgcacacaaaccgcaaatgaagaacaatggaagaagaatgaatgccgcagtgaaaactaatgccagatggttgtttggaggagatgggcgtagcaatgatgcaaggctggagcgcagtgagtctgctaatgaagatattttgatcttctacttccagatggatctacagacccggatacagtatgcattgaatatagaacaatttgatgtggcaaagcaattgagggaaaaactaaccgagattgaaacagaaattattaggcagcgtgaagctagaaggggttcaccaaagactgaagcccaagacaaagctctaaatcttatacgtgtgcgctggtctccgtgatgacattgccaaacttgaggttgagtctcttgcagtatctgctaaagctcttgcttatcaaaatgtgaaatatgcatttcgattagggcagaaagtacgtcacaatatacatggatatagaggcgtgatatgtggcatggacccggtgtgctgtgaatccaagtcctggatggagacagcaaacgtggagaagctgtctaagggtccaaatcaacctttttatcaggtcctggttgatgtatatgttgatccagaactgctggttgcatatgtcgcagaagaaaatctttctgcagctgaagaatcagaaaaaggaaggtttgatcacccctacattgagtttctcttttacggtgaggacacagctggggatttcattcctatcaagcagctccgtgagaagtatgaccagccacgctatgaagcttctggagatgaaagtgacaacgatggcaacacaaatagctaaaggtcaagtgccttcgtgttgctagagttgttttggaaccattttgattcacctccaccaactcagatgtgaagtgctgaactatctggtacagatgcagatgtaagacaaggcaaccattggcgaactgggcatcctcagtaacctgcagtaattctctgcatatgccgtccaaccttgcagatcgaaaattactcttttagagttttaccgtcaccaatcgattaagccatgcttgagataagctacgtgtgccttgcttttacattataataccatcgataaatataaacgaaggaaagaaaggaagaaagaaagaaagaaaaaaatatatatccctatggatgttctgtgtatagttctctgagatctatctagttctgtactgtaccctctggtggacaattgtgcatatgtaacactggcaacttgtgtggagtctcgaataaattacgcgaagacttcacatgcagttgtttggactctgcattcatggaatcaatcatgtggaaataacattttttgttgactgctt

SEQ ID NO: 75047 - DNA, 1944 bp, Zea Mays
cccacacctacagcagcagaactgcagaagcggtccctctccacagaactgcagaagcagcgcggcgcggccgttaactcggctccctcaccttgctgccccctccgcaggcgcaggcgctcgcttccggtaaaaagtgagctagttcctctccgcaccactatgattgaagattcaccccaagttcggttccacacaaaatttagctctgctcaccgcggtgggccgccgctgcagcgctgccctgccactgccatgcgcgtcgccgctcgggccggtctcaatgccggacgcttcttgcgctcagccgcggccagaattggaggtgccatttgccaggggcgtactccattgattcgggctgagttgtgcaaattgtgatagaactttcccgagattcaagcccatacaatgcagggcatctctatatgcggttcagttgcctcaccccatggagcaaactgcagaagggcttgtgttgcaaggaacgatgtgaggctgccttgtgaagttaatgcagtaagccagggattgcactctctgcattggtggtgtgcacacaaaccgcaaatgaagaacaatggaagaagaatgaatgccgcagtgaaaactaatgccagatggttgtttggaggagatgggcgtagcaatgatgcaaggctggagcgcagtgagtctgctaatgaagatattttgatcttctacttccagatggatctacagacccggatacagtatgcattgaatatagaacaatttgatgtggcaaagcaattgagggaaaaactaaccgagattgaaacagaaattattaggcagcgtgaagctagaaggggttcaccaaagactgaagcccaagacaaagctctaaatcttatacgtgtgcgtgcagacttgcagaaggctattgacagtgaaaactatgctttggcagctggtctccgtgatgacattgccaaacttgaggttgagtctcttgcagtatctgctaaagctcttgcttatcaaaatgtgaaatatgcatttcgattagggcagaaagtacgtcacaatatacatgaggcgtgatatgtggcatggacccggtgtgctgtgaatccaagtcctggatggagacagcaaacgtggagaagctgtctaagggtccaaatcaacctttttatcaggtcctggttgatgtatatgttgatccagaactgctggttgcatatgtcgcagaagaaaatctttctgcagctgaagaatcagaaaaaggaaggtttgatcacccctacattgagtttctcttttacggtgaggacacagctggggatttcattcctatcaagcagctccgtgagaagtatgaccagccacgctatgaagcttctggagatgaaagtgacaacgatggcaacacaaatagctaaaggtcaagtgccttcgtgttgctagagttgttttggaaccattttgattcacctccaccaactcagatgtgaagtgctgaactatctggtacagatgcagatgtaagacaaggcaaccattggcgaactgggcatcctcagtaacctgcagtaattctctgcatatgccgtccaaccttgcagatcgaaaattactcttttagagttttaccgtcaccaatcgattaagccatgcttgagataagctacgtgtgccttgcttttacattataataccatcgataaatataaacgaaggaaagaaaggaagaaagaaagaaagaaaaaaatatatatccctatggatgttctgtgtatagttctctgagatctatctagttctgtactgtaccctctggtggacaattgtgcatatgtaacactggcaacttgtgtggagtctcgaataaattacgcgaagacttcacatgcagttgtttggactctgcattcatggaatcaatcatgtggaaataacattttttgttgactgctt

SEQ ID NO: 75048 - DNA, 2304 bp, Zea Mays
cccacacctacagcagcagaactgcagaagcggtccctctccacagaactgcagaagcagcgcggcgcggccgttaactcggctccctcaccttgctgccccctccgcaggcgcaggcgctcgcttccggtaaaaagtgagctagttcctctccgcaccactatgattgaagattcaccccaagttcggttccacacaaaatttagctctgctcaccgcggtgggccgccgctgcagcgctgccctgccactgccatgcgcgtcgccgctcgggccggtctcaatgccggacgcttcttgcgctcagccgcggccaggtctggtccggtcatccccatcccttacgccttgcgcgccggcgtataggcgtgggtgcgttccgtgcgcgagcgcggattgacccatgcgattgcctgtaactgtgaacagacaacaggttgtcctcaatctagagaaagaagctagaaattgctgtcccttgcttcgttcttgtaacaaattgtagggtgtcgtgaaatactaccgagtgaaccactccgtcttgtctcctgaagccaaagtcccaagcactgattagttgacagagtaaccttactagtttcagagcactaagcaatttgctgaaagttttgcatgcaccaggcaaaatttgctgtgctaatagcagatcgtgctttgccagaattggaggtgccatttgccaggggcgtactccattgattcgggctgagttgtgcaaattgtgatagaactttcccgagattcaagcccatacaatgcagggcatctctatatgcggttcagttgcctcaccccatggagcaaactgcagaagggcttgtgttgcaaggaacgatgtgaggctgccttgtgaagttaatgcagtaagccagggattgcactctctgcattggtggtgtgcacacaaaccgcaaatgaagaacaatggaagaagaatgaatgccgcagtgaaaactaatgccagatggttgtttggaggagatgggcgtagcaatgatgcaaggctggagcgcagtgagtctgctaatgaagatattttgatcttctacttccagatggatctacagacccggatacagtatgcattgaatatagaacaatttgatgtggcaaagcaattgagggaaaaactaaccgagattgaaacagaaattattaggcagcgtgaagctagaaggggttcaccaaagactgaagcccaagacaaagctctaaatcttatacgtgtgcgacttgcagaaggctattgacagtgaaaactatgctttggcagctggtctccgtgatgacattgccaaacttgaggttgagtctcttgcagtatctgctaaagctcttgcttatcaaaatgtgaaatatgcatttcgattagggcagaaagtacgtcacaatatacatgaggcgtgatatgtggcatggacccggtgtgctgtgaatccaagtcctggatggagacagcaaacgtggagaagctgtctaagggtccaaatcaacctttttatcaggtcctggttgatgtatatgttgatccagaactgctggttgcatatgtcgcagaagaaaatctttctgcagctgaagaatcagaaaaaggaaggtttgatcacccctacattgagtttctcttttacggtgaggacacagctggggatttcattcctatcaagcagctccgtgagaagtatgaccagccacgctatgaagcttctggagatgaaagtgacaacgatggcaacacaaatagctaaaggtcaagtgccttcgtgttgctagagttgttttggaaccattttgattcacctccaccaactcagatgtgaagtgctgaactatctggtacagatgcagatgtaagacaaggcaaccattggcgaactgggcatcctcagtaacctgcagtaattctctgcatatgccgtccaaccttgcagatcgaaaattactcttttagagttttaccgtcaccaatcgattaagccatgcttgagataagctacgtgtgccttgcttttacattataataccatcgataaatataaacgaaggaaagaaaggaagaaagaaagaaagaaaaaaatatatatccctatggatgttctgtgtatagttctctgagatctatctagttctgtactgtaccctctggtggacaattgtgcatatgtaacactggcaacttgtgtggagtctcgaataaattacgcgaagacttcacatgcagttgtttggactctgcattcatggaatcaatcatgtggaaataacattttttgttgactgctt

SEQ ID NO: 75049 - DNA, 1758 bp, Zea Mays
cccacacctacagcagcagaactgcagaagcggtccctctccacagaactgcagaagcagcgcggcgcggccgttaactcggctccctcaccttgctgccccctccgcaggcgcaggcgctcgcttccggtaaaaaaattggaggtgccatttgccaggggcgtactccattgattcgggctgagttgtgcaaattgtgatagaactttcccgagattcaagcccatacaatgcagggcatctctatatgcggttcagttgcctcaccccatggagcaaactgcagaagggcttgtgttgcaaggaacgatgtgaggctgccttgtgaagttaatgcagtaagccagggattgcactctctgcattggtggtgtgcacacaaaccgcaaatgaagaacaatggaagaagaatgaatgccgcagtgaaaactaatgccagatggttgtttggaggagatgggcgtagcaatgatgcaaggctggagcgcagtgagtctgctaatgaagatattttgatcttctacttccagatggatctacagacccggatacagtatgcattgaatatagaacaatttgatgtggcaaagcaattgagggaaaaactaaccgagattgaaacagaaattattaggcagcgtgaagctagaaggggttcaccaaagactgaagcccaagacaaagctctaaatcttatacgtgtgcgacttgcagaaggctattgacagtgaaaactatgctttggcagctggtctccgtgatgacattgccaaacttgaggttgagtctcttgcagtatctgctaaagctcttgcttatcaaaatgtgaaatatgcatttcgattagggcagaaagtacgtcacaatatacatgaggcgtgatatgtggcatggacccggtgtgctgtgaatccaagtcctggatggagacagcaaacgtggagaagctgtctaagggtccaaatcaacctttttatcaggtcctggttgatgtatatgttgatccagaactgctggttgcatatgtcgcagaagaaaatctttctgcagctgaagaatcagaaaaaggaaggtttgatcacccctacattgagtttctcttttacggtgaggacacagctggggatttcattcctatcaagcagctccgtgagaagtatgaccagccacgctatgaagcttctggagatgaaagtgacaacgatggcaacacaaatagctaaaggtcaagtgccttcgtgttgctagagttgttttggaaccattttgattcacctccaccaactcagatgtgaagtgctgaactatctggtacagatgcagatgtaagacaaggcaaccattggcgaactgggcatcctcagtaacctgcagtaattctctgcatatgccgtccaaccttgcagatcgaaaattactcttttagagttttaccgtcaccaatcgattaagccatgcttgagataagctacgtgtgccttgcttttacattataataccatcgataaatataaacgaaggaaagaaaggaagaaagaaagaaagaaaaaaatatatatccctatggatgttctgtgtatagttctctgagatctatctagttctgtactgtaccctctggtggacaattgtgcatatgtaacactggcaacttgtgtggagtctcgaataaattacgcgaagacttcacatgcagttgtttggactctgcattcatggaatcaatcatgtggaaataacattttttgttgactgctt

SEQ ID NO: 75050 - DNA, 1946 bp, Zea Mays
cccacacctacagcagcagaactgcagaagcggtccctctccacagaactgcagaagcagcgcggcgcggccgttaactcggctccctcaccttgctgccccctccgcaggcgcaggcgctcgcttccggtaaaaagtgagctagttcctctccgcaccactatgattgaagattcaccccaagttcggttccacacaaaatttagctctgctcaccgcggtgggccgccgctgcagcgctgccctgccactgccatgcgcgtcgccgctcgggccggtctcaatgccggacgcttcttgcgctcagccgcggccagaattggaggtgccatttgccaggggcgtactccattgattcgggctgagttgtgcaaattgtgatagaactttcccgagattcaagcccatacaatgcagggcatctctatatgcggttcagttgcctcaccccatggagcaaactgcagaagggcttgtgttgcaaggaacgatgtgaggctgccttgtgaagttaatgcagtaagccagggattgcactctctgcattggtggtgtgcacacaaaccgcaaatgaagaacaatggaagaagaatgaatgccgcagtgaaaactaatgccagatggttgtttggaggagatgggcgtagcaatgatgcaaggctggagcgcagtgagtctgctaatgaagatattttgatcttctacttccagatggatctacagacccggatacagtatgcattgaatatagaacaatttgatgtggcaaagcaattgagggaaaaactaaccgagattgaaacagaaattattaggcagcgtgaagctagaaggggttcaccaaagactgaagcccaagacaaagctctaaatcttatacgtgtgcgacttgcagaaggctattgacagtgaaaactatgctttggcagctggtctccgtgatgacattgccaaacttgaggttgagtctcttgcagtatctgctaaagctcttgcttatcaaaatgtgaaatatgcatttcgattagggcagaaagtacgtcacaatatacatggatatagaggcgtgatatgtggcatggacccggtgtgctgtgaatccaagtcctggatggagacagcaaacgtggagaagctgtctaagggtccaaatcaacctttttatcaggtcctggttgatgtatatgttgatccagaactgctggttgcatatgtcgcagaagaaaatctttctgcagctgaagaatcagaaaaaggaaggtttgatcacccctacattgagtttctcttttacggtgaggacacagctggggatttcattcctatcaagcagctccgtgagaagtatgaccagccacgctatgaagcttctggagatgaaagtgacaacgatggcaacacaaatagctaaaggtcaagtgccttcgtgttgctagagttgttttggaaccattttgattcacctccaccaactcagatgtgaagtgctgaactatctggtacagatgcagatgtaagacaaggcaaccattggcgaactgggcatcctcagtaacctgcagtaattctctgcatatgccgtccaaccttgcagatcgaaaattactcttttagagttttaccgtcaccaatcgattaagccatgcttgagataagctacgtgtgccttgcttttacattataataccatcgataaatataaacgaaggaaagaaaggaagaaagaaagaaagaaaaaaatatatatccctatggatgttctgtgtatagttctctgagatctatctagttctgtactgtaccctctggtggacaattgtgcatatgtaacactggcaacttgtgtggagtctcgaataaattacgcgaagacttcacatgcagttgtttggactctgcattcatggaatcaatcatgtggaaataacattttttgttgactgctt

SEQ ID NO: 75051 - DNA, 1753 bp, Zea Mays
cccacacctacagcagcagaactgcagaagcggtccctctccacagaactgcagaagcagcgcggcgcggccgttaactcggctccctcaccttgctgccccctccgcaggcgcaggcgctcgcttccggtaaaaaaattggaggtgccatttgccaggggcgtactccattgattcgggctgagttgtgcaaattgtgatagaactttcccgagattcaagcccatacaatgcagggcatctctatatgcggttcagttgcctcaccccatggagcaaactgcagaagggcttgtgttgcaaggaacgatgtgaggctgccttgtgaagttaatgcagtaagccagggattgcactctctgcattggtggtgtgcacacaaaccgcaaatgaagaacaatggaagaagaatgaatgccgcagtgaaaactaatgccagatggttgtttggaggagatgggcgtagcaatgatgcaaggctggagcgcagtgagtctgctaatgaagatattttgatcttctacttccagatggatctacagacccggatacagtatgcattgaatatagaacaatttgatgtggcaaagcaattgagggaaaaactaaccgagaaattattaggcagcgtgaagctagaaggggttcaccaaagactgaagcccaagacaaagctctaaatcttatacgtgtgcgtgcagacttgcagaaggctattgacagtgaaaactatgctttggcagctggtctccgtgatgacattgccaaacttgaggttgagtctcttgcagtatctgctaaagctcttgcttatcaaaatgtgaaatatgcatttcgattagggcagaaagtacgtcacaatatacatgaggcgtgatatgtggcatggacccggtgtgctgtgaatccaagtcctggatggagacagcaaacgtggagaagctgtctaagggtccaaatcaacctttttatcaggtcctggttgatgtatatgttgatccagaactgctggttgcatatgtcgcagaagaaaatctttctgcagctgaagaatcagaaaaaggaaggtttgatcacccctacattgagtttctcttttacggtgaggacacagctggggatttcattcctatcaagcagctccgtgagaagtatgaccagccacgctatgaagcttctggagatgaaagtgacaacgatggcaacacaaatagctaaaggtcaagtgccttcgtgttgctagagttgttttggaaccattttgattcacctccaccaactcagatgtgaagtgctgaactatctggtacagatgcagatgtaagacaaggcaaccattggcgaactgggcatcctcagtaacctgcagtaattctctgcatatgccgtccaaccttgcagatcgaaaattactcttttagagttttaccgtcaccaatcgattaagccatgcttgagataagctacgtgtgccttgcttttacattataataccatcgataaatataaacgaaggaaagaaaggaagaaagaaagaaagaaaaaaatatatatccctatggatgttctgtgtatagttctctgagatctatctagttctgtactgtaccctctggtggacaattgtgcatatgtaacactggcaacttgtgtggagtctcgaataaattacgcgaagacttcacatgcagttgtttggactctgcattcatggaatcaatcatgtggaaataacattttttgttgactgctt

SEQ ID NO: 75052 - DNA, 2316 bp, Zea Mays
cccacacctacagcagcagaactgcagaagcggtccctctccacagaactgcagaagcagcgcggcgcggccgttaactcggctccctcaccttgctgccccctccgcaggcgcaggcgctcgcttccggtaaaaagtgagctagttcctctccgcaccactatgattgaagattcaccccaagttcggttccacacaaaatttagctctgctcaccgcggtgggccgccgctgcagcgctgccctgccactgccatgcgcgtcgccgctcgggccggtctcaatgccggacgcttcttgcgctcagccgcggccaggtctggtccggtcatccccatcccttacgccttgcgcgccggcgtataggcgtgggtgcgttccgtgcgcgagcgcggattgacccatgcgattgcctgtaactgtgaacagacaacaggttgtcctcaatctagagaaagaagctagaaattgctgtcccttgcttcgttcttgtaacaaattgtagggtgtcgtgaaatactaccgagtgaaccactccgtcttgtctcctgaagccaaagtcccaagcactgattagttgacagagtaaccttactagtttcagagcactaagcaatttgctgaaagttttgcatgcaccaggcaaaatttgctgtgctaatagcagatcgtgctttgccagaattggaggtgccatttgccaggggcgtactccattgattcgggctgagttgtgcaaattgtgatagaactttcccgagattcaagcccatacaatgcagggcatctctatatgcggttcagttgcctcaccccatggagcaaactgcagaagggcttgtgttgcaaggaacgatgtgaggctgccttgtgaagttaatgcagtaagccagggattgcactctctgcattggtggtgtgcacacaaaccgcaaatgaagaacaatggaagaagaatgaatgccgcagtgaaaactaatgccagatggttgtttggaggagatgggcgtagcaatgatgcaaggctggagcgcagtgagtctgctaatgaagatattttgatcttctacttccagatggatctacagacccggatacagtatgcattgaatatagaacaatttgatgtggcaaagcaattgagggaaaaactaaccgagattgaaacagaaattattaggcagcgtgaagctagaaggggttcaccaaagactgaagcccaagacaaagctctaaatcttatacgtgtgcgtgcagacttgcagaaggctattgacagtgaaaactatgctttggcagctggtctccgtgatgacattgccaaacttgaggttgagtctcttgcagtatctgctaaagctcttgcttatcaaaatgtgaaatatgcatttcgattagggcagaaagtacgtcacaatatacatggatatagaggcgtgatatgtggcatggacccggtgtgctgtgaatccaagtcctggatggagacagcaaacgtggagaagctgtctaagggtccaaatcaacctttttatcaggtcctggttgatgtatatgttgatccagaactgctggttgcatatgtcgcagaagaaaatctttctgcagctgaagaatcagaaaaaggaaggtttgatcacccctacattgagtttctcttttacggtgaggacacagctggggatttcattcctatcaagcagctccgtgagaagtatgaccagccacgctatgaagcttctggagatgaaagtgacaacgatggcaacacaaatagctaaaggtcaagtgccttcgtgttgctagagttgttttggaaccattttgattcacctccaccaactcagatgtgaagtgctgaactatctggtacagatgcagatgtaagacaaggcaaccattggcgaactgggcatcctcagtaacctgcagtaattctctgcatatgccgtccaaccttgcagatcgaaaattactcttttagagttttaccgtcaccaatcgattaagccatgcttgagataagctacgtgtgccttgcttttacattataataccatcgataaatataaacgaaggaaagaaaggaagaaagaaagaaagaaaaaaatatatatccctatggatgttctgtgtatagttctctgagatctatctagttctgtactgtaccctctggtggacaattgtgcatatgtaacactggcaacttgtgtggagtctcgaataaattacgcgaagacttcacatgcagttgtttggactctgcattcatggaatcaatcatgtggaaataacattttttgttgactgctt

SEQ ID NO: 75053 - DNA, 1756 bp, Zea Mays
cccacacctacagcagcagaactgcagaagcggtccctctccacagaactgcagaagcagcgcggcgcggccgttaactcggctccctcaccttgctgccccctccgcaggcgcaggcgctcgcttccgaattggaggtgccatttgccaggggcgtactccattgattcgggctgagttgtgcaaattgtgatagaactttcccgagattcaagcccatacaatgcagggcatctctatatgcggttcagttgcctcaccccatggagcaaactgcagaagggcttgtgttgcaaggaacgatgtgaggctgccttgtgaagttaatgcagtaagccagggattgcactctctgcattggtggtgtgcacacaaaccgcaaatgaagaacaatggaagaagaatgaatgccgcagtgaaaactaatgccagatggttgtttggaggagatgggcgtagcaatgatgcaaggctggagcgcagtgagtctgctaatgaagatattttgatcttctacttccagatggatctacagacccggatacagtatgcattgaatatagaacaatttgatgtggcaaagcaattgagggaaaaactaaccgagattgaaacagaaattattaggcagcgtgaagctagaaggggttcaccaaagactgaagcccaagacaaagctctaaatcttatacgtgtgcgtgcagacttgcagaaggctattgacagtgaaaactatgctttggcagctggtctccgtgatgacattgccaaacttgaggttgagtctcttgcagtatctgctaaagctcttgcttatcaaaatgtgaaatatgcatttcgattagggcagaaagtacgtcacaatatacatgaggcgtgatatgtggcatggacccggtgtgctgtgaatccaagtcctggatggagacagcaaacgtggagaagctgtctaagggtccaaatcaacctttttatcaggtcctggttgatgtatatgttgatccagaactgctggttgcatatgtcgcagaagaaaatctttctgcagctgaagaatcagaaaaaggaaggtttgatcacccctacattgagtttctcttttacggtgaggacacagctggggatttcattcctatcaagcagctccgtgagaagtatgaccagccacgctatgaagcttctggagatgaaagtgacaacgatggcaacacaaatagctaaaggtcaagtgccttcgtgttgctagagttgttttggaaccattttgattcacctccaccaactcagatgtgaagtgctgaactatctggtacagatgcagatgtaagacaaggcaaccattggcgaactgggcatcctcagtaacctgcagtaattctctgcatatgccgtccaaccttgcagatcgaaaattactcttttagagttttaccgtcaccaatcgattaagccatgcttgagataagctacgtgtgccttgcttttacattataataccatcgataaatataaacgaaggaaagaaaggaagaaagaaagaaagaaaaaaatatatatccctatggatgttctgtgtatagttctctgagatctatctagttctgtactgtaccctctggtggacaattgtgcatatgtaacactggcaacttgtgtggagtctcgaataaattacgcgaagacttcacatgcagttgtttggactctgcattcatggaatcaatcatgtggaaataacattttttgttgactgctt

SEQ ID NO: 75054 - DNA, 1712 bp, Zea Mays
cccacacctacagcagcagaactgcagaagcggtccctctccacagaactgcagaagcagcgcggcgcggccgttaactcggctccctcaccttgctgccccctccgcaggcgcaggcgctcgcttccgaattggaggtgccatttgccaggggcgtactccattgattcgggctgagttgtgcaaattgtgatagaactttcccgagattcaagcccatacaatgcagggcatctctatatgcggttcagttgcctcaccccatggagcaaactgcagaagggcttgtgttgcaaggaacgatgtgaggctgccttgtgaagttaatgcagtaagccagggattgcactctctgcattggtggtgtgcacacaaaccgcaaatgaagaacaatggaagaagaatgaatgccgcagtgaaaactaatgccagatggttgtttggaggagatgggcgtagcaatgatgcaaggctggagcgcagtgagtctgctaatgaagatattttgatcttctacttccagatggatctacagacccggatacagtatgcattgaatatagaacaatttgatgtggcaaagcaattgagggaaaaactaaccgagaaattattaggcagcgtgaagctagaaggggttcaccaaagactgaagcccaagacaaagctctaaatcttatacgtgtgcgtgcagacttgcagaaggctattgacagtgaaaactatgctttggcagctggtctccgtgatgacattgccaaacttgaggttgagtctcttgcagtatctgctaaagctcttgcttatcaaaatgtgaaatatgcatttcgattagggcagaaagtacgtcacaatatacatggatatagaggcgtgatatgtggcatggacccggtgtgctgtgaatccaagtcctggatggagacagcaaacgtggagaagctgtctaagggtccaaatcaacctttttatcaggtcctggttgatgtatatgttgatccagaactgctggttgcatatgggaaggtttgatcacccctacattgagtttctcttttacggtgaggacacagctggggatttcattcctatcaagcagctccgtgagaagtatgaccagccacgctatgaagcttctggagatgaaagtgacaacgatggcaacacaaatagctaaaggtcaagtgccttcgtgttgctagagttgttttggaaccattttgattcacctccaccaactcagatgtgaagtgctgaactatctggtacagatgcagatgtaagacaaggcaaccattggcgaactgggcatcctcagtaacctgcagtaattctctgcatatgccgtccaaccttgcagatcgaaaattactcttttagagttttaccgtcaccaatcgattaagccatgcttgagataagctacgtgtgccttgcttttacattataataccatcgataaatataaacgaaggaaagaaaggaagaaagaaagaaagaaaaaaatatatatccctatggatgttctgtgtatagttctctgagatctatctagttctgtactgtaccctctggtggacaattgtgcatatgtaacactggcaacttgtgtggagtctcgaataaattacgcgaagacttcacatgcagttgtttggactctgcattcatggaatcaatcatgtggaaataacattttttgttgactgctt

SEQ ID NO: 75055 - DNA, 1760 bp, Zea Mays
cccacacctacagcagcagaactgcagaagcggtccctctccacagaactgcagaagcagcgcggcgcggccgttaactcggctccctcaccttgctgccccctccgcaggcgcaggcgctcgcttccggtaaaaaaattggaggtgccatttgccaggggcgtactccattgattcgggctgagttgtgcaaattgtgatagaactttcccgagattcaagcccatacaatgcagggcatctctatatgcggttcagttgcctcaccccatggagcaaactgcagaagggcttgtgttgcaaggaacgatgtgaggctgccttgtgaagttaatgcagtaagccagggattgcactctctgcattggtggtgtgcacacaaaccgcaaatgaagaacaatggaagaagaatgaatgccgcagtgaaaactaatgccagatggttgtttggaggagatgggcgtagcaatgatgcaaggctggagcgcagtgagtctgctaatgaagatattttgatcttctacttccagatggatctacagacccggatacagtatgcattgaatatagaacaatttgatgtggcaaagcaattgagggaaaaactaaccgagaaattattaggcagcgtgaagctagaaggggttcaccaaagactgaagcccaagacaaagctctaaatcttatacgtgtgcgtgcagacttgcagaaggctattgacagtgaaaactatgctttggcagctggtctccgtgatgacattgccaaacttgaggttgagtctcttgcagtatctgctaaagctcttgcttatcaaaatgtgaaatatgcatttcgattagggcagaaagtacgtcacaatatacatggatatagaggcgtgatatgtggcatggacccggtgtgctgtgaatccaagtcctggatggagacagcaaacgtggagaagctgtctaagggtccaaatcaacctttttatcaggtcctggttgatgtatatgttgatccagaactgctggttgcatatgtcgcagaagaaaatctttctgcagctgaagaatcagaaaaaggaaggtttgatcacccctacattgagtttctcttttacggtgaggacacagctggggatttcattcctatcaagcagctccgtgagaagtatgaccagccacgctatgaagcttctggagatgaaagtgacaacgatggcaacacaaatagctaaaggtcaagtgccttcgtgttgctagagttgttttggaaccattttgattcacctccaccaactcagatgtgaagtgctgaactatctggtacagatgcagatgtaagacaaggcaaccattggcgaactgggcatcctcagtaacctgcagtaattctctgcatatgccgtccaaccttgcagatcgaaaattactcttttagagttttaccgtcaccaatcgattaagccatgcttgagataagctacgtgtgccttgcttttacattataataccatcgataaatataaacgaaggaaagaaaggaagaaagaaagaaagaaaaaaatatatatccctatggatgttctgtgtatagttctctgagatctatctagttctgtactgtaccctctggtggacaattgtgcatatgtaacactggcaacttgtgtggagtctcgaataaattacgcgaagacttcacatgcagttgtttggactctgcattcatggaatcaatcatgtggaaataacattttttgttgactgctt

SEQ ID NO: 75056 - DNA, 2269 bp, Zea Mays
cccacacctacagcagcagaactgcagaagcggtccctctccacagaactgcagaagcagcgcggcgcggccgttaactcggctccctcaccttgctgccccctccgcaggcgcaggcgctcgcttccggtaaaaagtgagctagttcctctccgcaccactatgattgaagattcaccccaagttcggttccacacaaaatttagctctgctcaccgcggtgggccgccgctgcagcgctgccctgccactgccatgcgcgtcgccgctcgggccggtctcaatgccggacgcttcttgcgctcagccgcggccaggtctggtccggtcatccccatcccttacgccttgcgcgccggcgtataggcgtgggtgcgttccgtgcgcgagcgcggattgacccatgcgattgcctgtaactgtgaacagacaacaggttgtcctcaatctagagaaagaagctagaaattgctgtcccttgcttcgttcttgtaacaaattgtagggtgtcgtgaaatactaccgagtgaaccactccgtcttgtctcctgaagccaaagtcccaagcactgattagttgacagagtaaccttactagtttcagagcactaagcaatttgctgaaagttttgcatgcaccaggcaaaatttgctgtgctaatagcagatcgtgctttgccagaattggaggtgccatttgccaggggcgtactccattgattcgggctgagttgtgcaaattgtgatagaactttcccgagattcaagcccatacaatgcagggcatctctatatgcggttcagttgcctcaccccatggagcaaactgcagaagggcttgtgttgcaaggaacgatgtgaggctgccttgtgaagttaatgcagtaagccagggattgcactctctgcattggtggtgtgcacacaaaccgcaaatgaagaacaatggaagaagaatgaatgccgcagtgaaaactaatgccagatggttgtttggaggagatgggcgtagcaatgatgcaaggctggagcgcagtgagtctgctaatgaagatattttgatcttctacttccagatggatctacagacccggatacagtatgcattgaatatagaacaatttgatgtggcaaagcaattgagggaaaaactaaccgagattgaaacagaaattattaggcagcgtgaagctagaaggggttcaccaaagactgaagcccaagacaaagctctaaatcttatacgtgtgcgctggtctccgtgatgacattgccaaacttgaggttgagtctcttgcagtatctgctaaagctcttgcttatcaaaatgtgaaatatgcatttcgattagggcagaaagtacgtcacaatatacatggatatagaggcgtgatatgtggcatggacccggtgtgctgtgaatccaagtcctggatggagacagcaaacgtggagaagctgtctaagggtccaaatcaacctttttatcaggtcctggttgatgtatatgttgatccagaactgctggttgcatatgtcgcagaagaaaatctttctgcagctgaagaatcagaaaaaggaaggtttgatcacccctacattgagtttctcttttacggtgaggacacagctggggatttcattcctatcaagcagctccgtgagaagtatgaccagccacgctatgaagcttctggagatgaaagtgacaacgatggcaacacaaatagctaaaggtcaagtgccttcgtgttgctagagttgttttggaaccattttgattcacctccaccaactcagatgtgaagtgctgaactatctggtacagatgcagatgtaagacaaggcaaccattggcgaactgggcatcctcagtaacctgcagtaattctctgcatatgccgtccaaccttgcagatcgaaaattactcttttagagttttaccgtcaccaatcgattaagccatgcttgagataagctacgtgtgccttgcttttacattataataccatcgataaatataaacgaaggaaagaaaggaagaaagaaagaaagaaaaaaatatatatccctatggatgttctgtgtatagttctctgagatctatctagttctgtactgtaccctctggtggacaattgtgcatatgtaacactggcaacttgtgtggagtctcgaataaattacgcgaagacttcacatgcagttgtttggactctgcattcatggaatcaatcatgtggaaataacattttttgttgactgctt

SEQ ID NO: 75057 - DNA, 1753 bp, Zea Mays
cccacacctacagcagcagaactgcagaagcggtccctctccacagaactgcagaagcagcgcggcgcggccgttaactcggctccctcaccttgctgccccctccgcaggcgcaggcgctcgcttccgaattggaggtgccatttgccaggggcgtactccattgattcgggctgagttgtgcaaattgtgatagaactttcccgagattcaagcccatacaatgcagggcatctctatatgcggttcagttgcctcaccccatggagcaaactgcagaagggcttgtgttgcaaggaacgatgtgaggctgccttgtgaagttaatgcagtaagccagggattgcactctctgcattggtggtgtgcacacaaaccgcaaatgaagaacaatggaagaagaatgaatgccgcagtgaaaactaatgccagatggttgtttggaggagatgggcgtagcaatgatgcaaggctggagcgcagtgagtctgctaatgaagatattttgatcttctacttccagatggatctacagacccggatacagtatgcattgaatatagaacaatttgatgtggcaaagcaattgagggaaaaactaaccgagaaattattaggcagcgtgaagctagaaggggttcaccaaagactgaagcccaagacaaagctctaaatcttatacgtgtgcgtgcagacttgcagaaggctattgacagtgaaaactatgctttggcagctggtctccgtgatgacattgccaaacttgaggttgagtctcttgcagtatctgctaaagctcttgcttatcaaaatgtgaaatatgcatttcgattagggcagaaagtacgtcacaatatacatggatatagaggcgtgatatgtggcatggacccggtgtgctgtgaatccaagtcctggatggagacagcaaacgtggagaagctgtctaagggtccaaatcaacctttttatcaggtcctggttgatgtatatgttgatccagaactgctggttgcatatgtcgcagaagaaaatctttctgcagctgaagaatcagaaaaaggaaggtttgatcacccctacattgagtttctcttttacggtgaggacacagctggggatttcattcctatcaagcagctccgtgagaagtatgaccagccacgctatgaagcttctggagatgaaagtgacaacgatggcaacacaaatagctaaaggtcaagtgccttcgtgttgctagagttgttttggaaccattttgattcacctccaccaactcagatgtgaagtgctgaactatctggtacagatgcagatgtaagacaaggcaaccattggcgaactgggcatcctcagtaacctgcagtaattctctgcatatgccgtccaaccttgcagatcgaaaattactcttttagagttttaccgtcaccaatcgattaagccatgcttgagataagctacgtgtgccttgcttttacattataataccatcgataaatataaacgaaggaaagaaaggaagaaagaaagaaagaaaaaaatatatatccctatggatgttctgtgtatagttctctgagatctatctagttctgtactgtaccctctggtggacaattgtgcatatgtaacactggcaacttgtgtggagtctcgaataaattacgcgaagacttcacatgcagttgtttggactctgcattcatggaatcaatcatgtggaaataacattttttgttgactgctt

SEQ ID NO: 75058 - DNA, 1758 bp, Zea Mays
cccacacctacagcagcagaactgcagaagcggtccctctccacagaactgcagaagcagcgcggcgcggccgttaactcggctccctcaccttgctgccccctccgcaggcgcaggcgctcgcttccgaattggaggtgccatttgccaggggcgtactccattgattcgggctgagttgtgcaaattgtgatagaactttcccgagattcaagcccatacaatgcagggcatctctatatgcggttcagttgcctcaccccatggagcaaactgcagaagggcttgtgttgcaaggaacgatgtgaggctgccttgtgaagttaatgcagtaagccagggattgcactctctgcattggtggtgtgcacacaaaccgcaaatgaagaacaatggaagaagaatgaatgccgcagtgaaaactaatgccagatggttgtttggaggagatgggcgtagcaatgatgcaaggctggagcgcagtgagtctgctaatgaagatattttgatcttctacttccagatggatctacagacccggatacagtatgcattgaatatagaacaatttgatgtggcaaagcaattgagggaaaaactaaccgagattgaaacagaaattattaggcagcgtgaagctagaaggggttcaccaaagactgaagcccaagacaaagctctaaatcttatacgtgtgcgacttgcagaaggctattgacagtgaaaactatgctttggcagctggtctccgtgatgacattgccaaacttgaggttgagtctcttgcagtatctgctaaagctcttgcttatcaaaatgtgaaatatgcatttcgattagggcagaaagtacgtcacaatatacatggatatagaggcgtgatatgtggcatggacccggtgtgctgtgaatccaagtcctggatggagacagcaaacgtggagaagctgtctaagggtccaaatcaacctttttatcaggtcctggttgatgtatatgttgatccagaactgctggttgcatatgtcgcagaagaaaatctttctgcagctgaagaatcagaaaaaggaaggtttgatcacccctacattgagtttctcttttacggtgaggacacagctggggatttcattcctatcaagcagctccgtgagaagtatgaccagccacgctatgaagcttctggagatgaaagtgacaacgatggcaacacaaatagctaaaggtcaagtgccttcgtgttgctagagttgttttggaaccattttgattcacctccaccaactcagatgtgaagtgctgaactatctggtacagatgcagatgtaagacaaggcaaccattggcgaactgggcatcctcagtaacctgcagtaattctctgcatatgccgtccaaccttgcagatcgaaaattactcttttagagttttaccgtcaccaatcgattaagccatgcttgagataagctacgtgtgccttgcttttacattataataccatcgataaatataaacgaaggaaagaaaggaagaaagaaagaaagaaaaaaatatatatccctatggatgttctgtgtatagttctctgagatctatctagttctgtactgtaccctctggtggacaattgtgcatatgtaacactggcaacttgtgtggagtctcgaataaattacgcgaagacttcacatgcagttgtttggactctgcattcatggaatcaatcatgtggaaataacattttttgttgactgctt

SEQ ID NO: 75059 - DNA, 1763 bp, Zea Mays
cccacacctacagcagcagaactgcagaagcggtccctctccacagaactgcagaagcagcgcggcgcggccgttaactcggctccctcaccttgctgccccctccgcaggcgcaggcgctcgcttccggtaaaaaaattggaggtgccatttgccaggggcgtactccattgattcgggctgagttgtgcaaattgtgatagaactttcccgagattcaagcccatacaatgcagggcatctctatatgcggttcagttgcctcaccccatggagcaaactgcagaagggcttgtgttgcaaggaacgatgtgaggctgccttgtgaagttaatgcagtaagccagggattgcactctctgcattggtggtgtgcacacaaaccgcaaatgaagaacaatggaagaagaatgaatgccgcagtgaaaactaatgccagatggttgtttggaggagatgggcgtagcaatgatgcaaggctggagcgcagtgagtctgctaatgaagatattttgatcttctacttccagatggatctacagacccggatacagtatgcattgaatatagaacaatttgatgtggcaaagcaattgagggaaaaactaaccgagattgaaacagaaattattaggcagcgtgaagctagaaggggttcaccaaagactgaagcccaagacaaagctctaaatcttatacgtgtgcgtgcagacttgcagaaggctattgacagtgaaaactatgctttggcagctggtctccgtgatgacattgccaaacttgaggttgagtctcttgcagtatctgctaaagctcttgcttatcaaaatgtgaaatatgcatttcgattagggcagaaagtacgtcacaatatacatgaggcgtgatatgtggcatggacccggtgtgctgtgaatccaagtcctggatggagacagcaaacgtggagaagctgtctaagggtccaaatcaacctttttatcaggtcctggttgatgtatatgttgatccagaactgctggttgcatatgtcgcagaagaaaatctttctgcagctgaagaatcagaaaaaggaaggtttgatcacccctacattgagtttctcttttacggtgaggacacagctggggatttcattcctatcaagcagctccgtgagaagtatgaccagccacgctatgaagcttctggagatgaaagtgacaacgatggcaacacaaatagctaaaggtcaagtgccttcgtgttgctagagttgttttggaaccattttgattcacctccaccaactcagatgtgaagtgctgaactatctggtacagatgcagatgtaagacaaggcaaccattggcgaactgggcatcctcagtaacctgcagtaattctctgcatatgccgtccaaccttgcagatcgaaaattactcttttagagttttaccgtcaccaatcgattaagccatgcttgagataagctacgtgtgccttgcttttacattataataccatcgataaatataaacgaaggaaagaaaggaagaaagaaagaaagaaaaaaatatatatccctatggatgttctgtgtatagttctctgagatctatctagttctgtactgtaccctctggtggacaattgtgcatatgtaacactggcaacttgtgtggagtctcgaataaattacgcgaagacttcacatgcagttgtttggactctgcattcatggaatcaatcatgtggaaataacattttttgttgactgctt

SEQ ID NO: 75060 - DNA, 1332 bp, Zea Mays
atcctagatccatgacttcgtgtttgtgcatggtcgttgtcgtggactgtggtgactcggtcgtggtgtggtcactcttctctagagagactcgcgattgtgttgattctcagttggggatttgtcgtttgggtagagagggttgatcgaagtgacatattgacattggatagcatcagacaagttttgattagactagaagacagcatcatatttggccttttggagagagcacagttttgttacaatgctgatacatatgatagcaatgctttccacatggatggttttggaggatctttggttgaatatatagttagagaaactgaaaagctccatgcacaggttgggagatacaagagcccagatgagcaccctttcttttccaaggatctgcctgagccccggttgccacctatgcaatacccaagggttttgcatcccattgctgattctatcaatatcaacaaagagatttggaaaatgtattttgatgaacttcttccaagattggtgaaagaaggaagtgatggtaatgctggatccagtgctctttgtgacacaacctgcttgcaggcactctccagaaggatccactatgggaagtttgtggcagaggccaagtttcaagagtcccctgaagcttacacgccagccataatagcccaagaccgtgatcaactcatgaaccttctcacatatgaaacggtggagcgtgctatcgaacacagggtggaggccaaagccaagatcttcgggcaagaggtgaacattggtgctaaggacaacggcagcccaccggtctacaaaatcaggccgagcttggtcgccgagctgtacagctacagaatcatgccgctaaccaaggaggttgaggtcgcgtacttgcttaagaggctggattgagtgtgtttacgtagctgtaaaactgccagatccgaactcctggtattaaaccataacatcggtaagtacccatttctgtgaagaggatgatccgaactcctgtcattaaaccagaacatcagtaagtacccagttttggggagaggatggaaaatataccatgtgtggcaagcaacatgcataatatcatctggagttgcgcttactcgcccctcgtgcgtaatgctaatggttgtagcctgtatggaatgctgggtcactttctttggctgggtgcccttttgaatcagagtaaattcgctcattgtcgctggaacttattctttgatgcacactattcgaagtttgcatttccttggttgccgttcctgttaaaatctgttaagttgtacgtgtaccacatgactagagattgtcggcaccgtt

SEQ ID NO: 75061 - DNA, 1462 bp, Zea Mays
gctggcgccatggccaccacggcccaactggcgggcacggggacagcgcgaagcgcccaaggcccaccgaatcagaagcgatcggaccctcggtccctcgctaagccatccagctctcgttccgttccccccttcaagctggtcaccaagcccgcggcggcgtcgcccgctgctgctcactggggagatctcgcccgggggccgcagggtacgagccgcgttgccttcggaccagcgcccaggaacaaggggctccgcacggccaacaactccgcaacgcccatggctaagtacgaacgctccttctcctgggaagagagggttgatcgaagtgaaatattgacattggatagcatcagacaagttttgattagactagaagacagcatcatatttggacttttggagagagcacagttttgttacaacgctgacacatatgatagcaatgctttccacatggatggttttggagggtctttggttgaatatatggttagagaaactgaaaagctccatgcacaggttgggaggtacaagagcccagatgagcaccctttcttttccaaggatctgcctgagccccagttgccacctatgcaatacccaagggttttgcatcccattgctgattctatcaatatcaacaaagagatttggacaatgtattttgatgaacttcttccaagattggtgaaagaaggaagtgatggtaatgctggatccaatgctctttgtgacacaacctgcttgcaggcactctccaaaaggatccactatgggaagtttgtggcagaggccaagtttcaagagtcccctgaagcttacacgccagccataatagcccaagaccgtgatcaactcatgcgccttctcacatatgaaacggtggagcgtgctgtcgaacacagggtggaagccaaagccaagatcttcgggcaagaggtgaacattggtgctaaggacaacggcagccaaccagtctacaaaatcaggccgagcttggtcgccgagctgtacagctacagaatcatgccgctaaccaaggaggttgaggtcgcgtacttgcttaggaggctggattgagtgtgtttacgtagctgtaaaactgccagatccgaaactcgtgcaattaaaccattacatcggtaagtactcatttctgtggagaggatgatccgaactcctggcattaaaccagaacgtcagtaagtacccagttttggggagaagatgggaactgtggcaataaacatgcagaatatcatgtggagttgtcgctttctttggctgtatggaatgctacgtcactttctttggctgggtgcccagtgcccttttgaatcggagtaaattctctcattgtcgttggatttatacagatcctctcagtgccatggaaattttcagctttctttgattcaaactatttgatgtttgcatttccttggttgccgttcct

SEQ ID NO: 75062 - DNA, 1228 bp, Zea Mays
cagaactgacaacagcgctgccgcacctacccctctccactacgactccacattttccaacggatttttatttttctaagaaaattagtttttttagaaaaatagaaatcacttggttgcactaaaaaaacaggcacactcgtcactcggtcgccgcgcgacctcccagttcgtctattaaaggggaaccagtgaaccacccgatgcaacttgcgtagagagttgggcgcagagaatccccaagcaaacaaacagggtagagggagaggagaggagaggagaggagaggttgggtctgggacaccatggctccgatgaagctgtacggggcggtgatgtcgtggaacgtgacgaggtgcgcaacggcgctggaggaggctggctccgactacgagatcgtgcccatcaacttcgccaccgccgagcacaagagccccgagcacctcgtccgcaacccgtttggtcaggttccagctctgcaggatggtgacttgtacctcttcgaatcacgagcaatctgcaagtacgctgctcgcaaaaacaagccagagctgttgagggaaggaaacctcgaggaggcagcaatggtggatgtttggatcgaggtggaggctaaccagtacaccgctgcactgaatcccatcctcttccaggtcctcatcagtcctatgcttgggggaaccaccgaccagaaagttgtggatgagaaccttgagaagctgaagaaggtgctagaggtgtacgaggcacgcctgaccaagtgcaagtaccttgctggagacttcctcagcctcgccgacctgaaccatgtgtctgtcactctctgcctgttcgctacgccctacgcatctgtgctcgacgcctacccgcatgtgaaggcctggtggtctggtctgatggagaggccgtctgtccagaaggtcgctgccctgatgaagccatctgcttgaaacggttgccctgtcaatcggtgaatggaataagccaagtctgttctgggttgtttgcttgttcagtgatgtgtcttctatgacgaaagatcttgatggtttggttgctgctgcaatcttcaggttcgatgttatcgatcatggccatggcaaatgcatctgcatagtctaactctaatggatagcaagcctggatgtcacgaccattatgcctttaaaaaaggccaactgacggtaggcttcctaacgaaattaccaagatggattaatgtgtgttc

SEQ ID NO: 75063 - DNA, 1328 bp, Zea Mays
cagaactgacaacagcgctgccgcacctacccctctccactacgactccacattttccaacggatttttatttttctaagaaaattagtttttttagaaaaatagaaatcacttggttgcactaaaaaaacaggcacactcgtcactcggtcgccgcgcgacctcccagttcgtctattaaaggggaaccagtgaaccacccgatgcaacttgcgtagagagttgggcgcagagaatccccaagcaaacaaacagggtagagggagaggagaggagaggagaggagaggttgggtctgggacaccatggctccgatgaagctgtacggggcggtgatgtcgtggaacgtgacgaggtgcgcaacggcgctggaggaggctggctccgactacgagatcgtgcccatcaacttcgccaccgccgagcacaagagccccgagcacctcccgtttggtcaggttccagctctgcaggatggtgacttgtacctcttcgaatcacgagcaatctgcaagtacgctgctcgcaaaaacaagccagagctgttgagggaaggaaacctcgaggaggcagcaatggtggatgtttggatcgaggtggaggctaaccagtacaccgctgcactgaatcccatcctcttccaggtcctcatcagtcctatgcttgggggaaccaccgaccagaaagttgtggatgagaaccttgagaagctgaagaaggtgctagaggtgtacgaggcacgcctgaccaagtgcaagtaccttgctggagacttcctcagcctcgccgacctgaaccatgtgtctgtcactctctgcctgttcgctacgccctacgcatctgtgctcgacgcctacccgcatgtgaaggcctggtggtctggtctgatggagaggccgtctgtccagaaggtcgctgccctgatgaagccatctgcttgaaacggttgccctgtcaatcggtgaatggaataagccaagtctgttctgggttgtttgcttgttcagtgatgtgtcttctatgacgaaagttgagtgcctatgtgtgagcatgcttgcttgtaacgagacattgaattgttcggaaatgagcattcctgtgctcttcttgaaaataaactttgcgttaggttcctcaggatcttgatggtttggttgctgctgcaatcttcaggttcgatgttatcgatcatggccatggcaaatgcatctgcatagtctaactctaatggatagcaagcctggatgtcacgaccattatgcctttaaaaaaggccaactgacggtaggcttcctaacgaaattaccaagatggattaatgtgtgttc

SEQ ID NO: 75064 - DNA, 1122 bp, Zea Mays
gccaaggcatgggctgagccaactggacactccccttgcgttgtgaaggcaacggtccgcataatagctgttgccatttggtgcggcccatgttctcgcccaacagaaacctgagcccattgccatttccagcgtctcgtctcgctgtatcgttcggtctcccacccctttcccctcttcgtcgatctcaccaccgcgccgaccccgatggcctccgccgcctcatcggccgccgccgctggcaaatcgctgttccaggggttccgcaggttcctcaaaaagccgtgggagatcacgggcccctgcgcctcgcccgagtaccgcagcgcgctgcctggcgcgctcgagtaccgcgtcaagtgcccggccaccgtgcgcgacgaccgcgacaaggccatcgtgcccacatccgatccggagacagtctacgacatcaagtacttcacccgcgaccgccgccggaaccgtccgcccgtgcgccgcaccctgctccgcaagcccgacctcgagcgctacatggtcaccaagcagtttgaccccaccaaggacttccccgtgccatacgtcaacaccactgtcgaggaggacgacaacacggtcggcggtggctaccagaaatgatccagtggcaggagctttgcctagcattcaagtagggggaaacataatgcttgattagaattgatatatccgggctgcaaaacgagctattgctggcttgccacaaaacatgaagcagttatctggacatggtgtgtttgatgtcgtgtgcgttacgtgcattagctaactggacaggcctgcaatgtaagacaaggcatccttgttgtgcttggactccatgagcagctgcacaaatttcgtttcagctttcaaatatctcctttttctgcaagttttctggttgtaaaagatgatggtggcaataatatggtacttgagctcacaggatgcacatttcttgtaacctgtattccaaaactttatctacctgaaaccatagttactgtttaagaataaccaaaggttttctaatgtgcacatcatctccaacttaaccagttatgatgttttgacaaaagggcgaaaacacttcgtttgtacttctgtacgattagaaca

SEQ ID NO: 75065 - DNA, 998 bp, Zea Mays
gccatttggtgcggcccatgttctcgcccaacagaaacctgagcccattgccatttccagcgtctcgtctcgctgtatcgttcggtctcccacccctttcccctcttcgtcgatctcaccaccgcgccgaccccgatggcctccgccgcctcatcggccgccgccgctggcaaatcgctgttccaggggttccgcaggttcctcaaaaagccgtgggagatcacgggcccctgcgcctcgcccgagtaccgcagcgcgctgcctggcgcgctcgagtaccgcgtcaagtgcccggccaccgtgcgcgacgaccgcgacaaggccatcgtgcccacatccgatccggagacagtctacgacatcaagtacttcacccgcgaccgccgccggaaccgtccgcccgtgcgccgcaccctgctccgcaagcccgacctcgagcgctacatggtcaccaagcagtttgaccccaccaaggacttccccgtgccatacgtcaacaccactgtcgaggaggacgacaacacggtcggcggtggctaccagaaatgatccaggagctttgcctagcattcaagtagggggaaacataatgcttgattagaattgatatatccgggctgcaaaacgagctattgctggcttgccacaaaacatgaagcagttatctggacatggtgtgtttgatgtcgtgtgcgttacgtgcattagctaactggacaggcctgcaatgtaagacaaggtaccatttcatcagaatcaaacactccacataatttgacatgatcaaggcattagtaattagatgcccatatctttatggcttgcattattgtctcatagagggacgtttctctattattgtttgtaatttggtatctccgttttttaatgcttgaaatgcaatttcttcaggtgtagggtttcacaatagagtagttattttcttcatgaatgtttcactttactgtgtactgagaaacctctattattggggctta

SEQ ID NO: 75066 - DNA, 1561 bp, Zea Mays
ccactgttgggctgccggcccattagggttagggttgagtccctatatatatgtacccatctcctatcaatatagtgaattcacccttctacatttctggaccccttgtgttgtgcatactttgaaatttggatcttgctttgaagagcatctgtgctcctagggaattgaagatctgctttatactaaattccagtggattagcgaagtcattggagatgccattataattaaaaaaaattcatcatgaatcactccatgaggttgtctatgttcaatgagcatagcaacctgaaattccttgccattgctgacacaagatttacctctgctgttgtgatgttgaagagatttattgctataaaagatgctctttcagtgatggtagtgagtgaaaagtggagtgcctatagggaagataatccacgtcaggctcaatttgtcaaggagaagattgtgaatgatctgtgttgggatcaagtgcgcctatttccttagtttcactgaccctatctatgctatgatacgggcagctgatactgacaagctatgcctccatttgatatatgagatgtgggacacaatgatatagaaggtgaagagcatgatctatcgtcatgaaatgaaagagacacatggagaatctatcttttactcatatgtgcatgacatcttggtaagtcgatggacaaaaagcaacacgcccttgcattgcttggcacactcactaaatccaaattattacaccgatgcatggatcaatgaggtccccaaccgacaagctcctcataataatgaggaaaactcagagatgagaaatgcttgtttcaggaggtatttttctggtgaagaattaaaaaagattaagctgcagcatgctaatttctctttgtttggaactggattcaattcatttgagtcacttgaggatagaggttatgcgaaagggtgttatggatcctgctgcggcgcgtaggacggggaggcgtacaccacgaagagtgggctagcagggtggattgagtggaggagcgcagggaatagggcacacaacgtggcggttgaagaacacgatcaccaggggcgtgaggttcgccaccgtgattcaagagtcgtccacgtaggtgcaacttcttttcataaaaccctattacaatctaaggcacccttatagctccagggcctaacaactcaggagattattaaagggataagccccagggaggataagcctcctcaaacttctctaacaaccagccgccatctaacaaatggctggcctaatgaccctggcgcctggcatatttccggcccacaaaggagtctataacacttcccccctcctcgacaaagagctcgtccgcaagcgcggaagttggatgctgctgtttgaattcttccacctgttcccatgaagtatctgcttctgaacacccaatccatttgaccaacacttcccacactcctctgttgagtctggcccttagaaccttctctggagctggaacaacatgcccatgtagaagaggtggcagtggaaccaactgggatggagcaggtc

SEQ ID NO: 75067 - DNA, 1502 bp, Zea Mays
atgaatctagaccgttcgtttcatccagggcgatccgaccgtgctccgcccccgcccccgccccctccccctccctcgtcccagccgtccctgcctttggcaaccaccccgcccccatccatcgtcgtgcaggcaccgcctcactcacccttcggcggcgtcacccacgaggccgatccaccgccaacagcccgccaccgccaccacccgcctccgcgccgtctcgccgtccccgtccccgccctcccccgtgggctcgttcggcttcgacgcactcaaggagaccttctccgtggacgtgtcggtggccggcgcgcgcccgctccgtgtcccacccgtcgcgccttcaccatcgcgtcctcgcgcctcgccgcgctctccaacgtcaccgtgtgcgtcgagctctgcagcggcaccgtcgactggggcgaggcgcccgtgctgccctccgtcaccgctggggaccagccggcggtgctcggcgctgcgggccgggcgtgcgccgtgctcgccgctgccctcgcggcgcccctcggcgccctgctacaagacgttgccggtgtgctcccgggacacaacttcgcctcagtgagggatccgcagcttctcttgtcctgcttcggcaagcctcagactaaggatgctaggataaatgctatgcgttcagctatatctgagacatttcctgagcccaatcggaggttgttgcagagaattttaaaaatgatgcacactgttgcatctcacacttctgaaaatcgaatgactgcatcggcagttgctgcctgtatggcgcctcttctgttgcgtccacttctggctggtgaatgtgagatggatgaagtatttgatatggatggtgacgattctgcgcagcttcttgctgcagcaaacgccgcaaacagtgctcaaggaattgtcgcaactctcttggaggaatatgagggcatttttcatgatgaacacctcatatgttccttgtcacctgaatctcaaattgaagatagtggtactgaagcatcaactgatgatggtaatttggaagccaagggcaatggatttcatgatgcagaaaatgatgtagatcaagaattggatgatgacaatggcgtggagcatatacttagtgggaaattgagtgagagcagtggatatgctggcagtgacctctatgactacaagtctcgagaaccagattactgcattggagaacaagtgctcaggtgattaccaatggattggtttctgtcacaatgatcttcagaatggcaatatcatgattgatgaaaagaccaacgtgctgaccatcattaaaatggccatcggtgtccctaaaaagcggaatgacaaatggatggataatcagcttttgaagctacatctggagtaaaaagcttcgaaggatgctcatcttcagtttatgcgctactatttgttgactgacatggacttgcaaaagcgcacttaatacttgtcagttttggatccatttgttgcattgg

SEQ ID NO: 75068 - DNA, 1616 bp, Zea Mays
ctaaaaaccggtcacatgtaccaacccggtcggcagggcactatggtaaaagcaaagggaaaaaaaacgtccccaaaacagcacacagctctttggctggaggcggtggcagggggaatctccgtggtctggtctgagacaacctcaggcttcccacccacggtttcccacactcgccgtcccccgcttcccaccacccatttcatccccccagcaaatccaaccccacccctctcactctcgtctcctgttcgccagagccacctcgctccagaagctttcctcccctagatctccctcccgtgcctggtcgcgctgccgacccggccatggcgaccaaggggaagctcggggagctagtgtgggagcaccgggtgcaggcggccgcagcggtggctttcgtggccgcggccgccgtctcgatctccgccgtcgggcccaggctcggcgccgtggtgtcattcttctggccgctgctcgtctccacgggcctcttcctggtggcggtcgccgtgctgctccggatctcgccgccgcccgcgggcgacgacgacgagtccggcaaggagctcatcgacttcgtcgccgggtgccgcccggagcacctcgtcccggatgcggcgccgccggcggccgtagcccccgtggaggctccgcccgagctgcagatctaacgggctgccggaggaggaggctgacagcagcgtagctgtgctgctgtgcgtggcatggcgtgctccgtccccgggtgaacttcctccagtggcacgggtgggggcaaccgttgcgggcccacctgtaagtgtcaggccggcgcgccgccgtggctcggtagcctaggacttctccatgtcttgctctgctccggtgtaagataccgtggattttaataatgaatcatggcataaaataaaaggctgtcctcgccggagcgatctgtgtctttcgctgtcgttgtcaggttggctgtggcttgtgacgctaatctcaagtaaagtgggggtttatactgacatgacatggcgccgacgaacagatgatgagaggtcgtaaggcttgacgatccaaggttttgcaatttgcgttgctgctccacgacgacgcgcagctggagatcaatcccacagttgcaatcctcagaatcattcatgagacattacagatcttcagagctcagcagtcagcatcactgatgacaatccaatttttttcctctatacgcagccgcactctctccctaggcggccagaacggctggtgagtggtgaccgaccaccgtggcgacgcctcccgtgaccgtggccctgtcgctgtctgttcttgaaggcccccaccagtcatactaaactcgggcctggcgagtcgctgtcgccgcactaaatttttatctgcttcgaactttgaaggaacggcgctttccattccagctgctgtcatcctcatcaatctgtgtatgtcataataataatatgaaagtcagtcatggcttcatggctactcctagtgacccgtgtgaccgtttttttattgaggacatatctggtgcacatggtgcacatattaaatcatcaccactcattttagatctaacgtctctagttgattatttaatttac

SEQ ID NO: 75069 - DNA, 1709 bp, Zea Mays
gttccggactccatagaccatagtcatctcatccctcccaagtcccaactccgctgctacgccttcttctacatcgcaatcacgcgcccgtccggctctcccccttctccctcgccctcacgcgctcacgccctcacctcagtcctcatcgctctcggccgcctgcttaaaccctccgctcgaaccggaacccaaccaagaacagatccaaaacgcaagccgcaccatgtctcgtgtcgcgggctcgcgcctcctccctaggatctctgcgctctccttctgcaccgcctccccggcaaccgccgccgcttcctcctcctcatccacagcggcggtggcagcggcagccgccaccgcctccgaggcttcctccaccgccggagacccatcctcccagccgccccagactgcccgcaagccgtggggcgcgctcaagttcgccgccttcgccgccgtgtccaccgcggttggcggcacgggctacgtcagctacgcttattctctagaggaagtggatcagatgacgcgggagctccggaagaagtcgaagcagcccattcctgaggatgcttctggctttgagaggtttcaggctatggcttattcagcagctatgaaagttcctgttgccgctattgaggtatacatggatgtgaggagccaaattgaagatcaaattcgggtcagtacaaatgggatttagcgaaccagtatcagacaaacttcttccagatcttgctcctcaagagcagcatgtattgactctagttctggatctgaacgagactcttgtatactcagattggaagcgtgagagaggatggaggacctttaagaggccaggagtggatgcttttcttgaacatctcgggaggttttatgaaattgttgtgtattctgatcagcttagtatgtatgttgatcctgttgttgataggctggatccaaagggcaatattcgacataggctatcaagagttgcaactaagtatgaaaatggaaaacattatcgggatttgtcgaagctgaacagaaatcctgctcaagttctttatatcagcgctcatgctaaagagtcaagtctgcagcctgaaaattctgtggaaattaaaccttggaagcttgaaaatgatgacactcaactgcttgatcttattccatttctagaatatgttgctatggcaagaccttctgacatcagggctgttcttgcatcctatcaaagtggtgatattgctgccgagtttattgagcgctctaaggagcaccagaggcgcatgcaagaacaaaagaaatcaggacgcatatggaggcggtgaggactaaaagttggaaggaaaacataccaatgattttgacgcttcaatccgaatcaagtgaatggatccatcaaggattacaattttgtcatcttttgccttggcggttaataaacatactaaacgttatttataatcattcagaagacgccataccggctgaagtatagcgcttgctgtttgtatttttaagggtaatgaaagtattaatgtggcggttgctgctttgttttaagagtcgcgatagtattaattaatgtggtatttgcgttttttatggattttatgatggtactccatcaccatctctttcaaaatactatagcctgttctaaatcaaacatggctaagtttaacaagaaatatatcaagatttacaatgtcgaatta

SEQ ID NO: 75070 - DNA, 1562 bp, Zea Mays
tagtcatctcatccctcccaagtcccaactccgctgctacgccttcttctacatcgcaatcacgcgcccgtccggctctcccccttctccctcgccctcacgcgctcacgccctcacctcagtcctcatcgctctcggccgcctgcttaaaccctccgctcgaaccggaacccaaccaagaacagatccaaaacgcaagccgcaccatgtctcgtgtcgcgggctcgcgcctcctccctaggatctctgcgctctccttctgcaccgcctccccggcaaccgccgccgcttcctcctcctcatccacagcggcggtggcagcggcagccgccaccgcctccgaggcttcctccaccgccggagacccatcctcccagccgccccagactgcccgcaagccgtggggcgcgctcaagttcgccgccttcgccgccgtgtccaccgcggttggcggcacgggctacgtcagctacgcttattctctagaggaagtggatcagatgacgcgggagctccggaagaagtcgaagcagcccattcctgaggatgcttctggctttgagaggtttcaggctatggcttattcagcagctatgaaagttcctgttgccgctattgaggtatacatggatgtgaggagccaaattgaagatcaaattcggcgtgagagaggatggaggacctttaagaggccaggagtggatgcttttcttgaacatctcgggaggttttatgaaattgttgtgtattctgatcagcttagtatgtatgttgatcctgttgttgataggctggatccaaagggcaatattcgacataggctatcaagagttgcaactaagtatgaaaatggaaaacattatcgggatttgtcgaagctgaacagaaatcctgctcaagttctttatatcagcgctcatgctaaagagtcaagtctgcagcctgaaaattctgtggaaattaaaccttggaagcttgaaaatgatgacactcaactgcttgatcttattccatttctagaatatgttgctatggcaagaccttctgacatcagggctgttcttgcatcctatcaaagtggtgatattgctgccgagtttattgagcgctctaaggagcaccagaggcgcatgcaagaacaaaagaaatcaggacgcatatggaggcggtgaggactaaaagttggaaggaaaacataccaatgattttgacgcttcaatccgaatcaagtgaatggatccatcaaggattacaattttgtcatcttttgccttggcggttaataaacatactaaacgttatttataatcattcagaagacgccataccggctgaagtatagcgcttgctgtttgtatttttaagggtaatgaaagtattaatgtggcggttgctgctttgttttaagagtcgcgatagtattaattaatgtggtatttgcgttttttatggattttatgatggtactccatcaccatctctttcaaaatactatagcctgttctaaatcaaacatggctaagtttaacaagaaatatatcaagatttacaatgtcgaatta

SEQ ID NO: 75071 - DNA, 1651 bp, Zea Mays
gtcatctcatccctcccaagtcccaactccgctgctacgccttcttctacatcgcaatcacgcgcccgtccggctctcccccttctccctcgccctcacgcgctcacgccctcacctcagtcctcatcgctctcggccgcctgcttaaaccctccgctcgaaccggaacccaaccaagaacagatccaaaacgcaagccgcaccatgtctcgtgtcgcgggctcgcgcctcctccctaggatctctgcgctctccttctgcaccgcctccccggcaaccgccgccgcttcctcctcctcatccacagcggcggtggcagcggcagccgccaccgcctccgaggcttcctccaccgccggagacccatcctcccagccgccccagactgcccgcaagccgtggggcgcgctcaagttcgccgccttcgccgccgtgtccaccgcggttggcggcacgggctacgtcagctacgcttattctctagaggaagtggatcagatgacgcgggagctccggaagaagtcgaagcagcccattcctgaggatgcttctggctttgagaggtttcaggctatggcttattcagcagctatgaaagttcctgttgccgctattgaggtatacatggatgtgaggagccaaattgaagatcaaattcggggatttagcgaaccagtatcagacaaacttcttccagatcttgctcctcaagagcagcatgtattgactctagttctggatctgaacgagactcttgtatactcagattggaagcgtgagagaggatggaggacctttaagaggccaggagtggatgcttttcttgaacatctcgggaggttttatgaaattgttgtgtattctgatcagcttagtatggctggatccaaagggcaatattcgacataggctatcaagagttgcaactaagtatgaaaatggaaaacattatcgggatttgtcgaagctgaacagaaatcctgctcaagttctttatatcagcgctcatgctaaagagtcaagtctgcagcctgaaaattctgtggaaattaaaccttggaagcttgaaaatgatgacactcaactgcttgatcttattccatttctagaatatgttgctatggcaagaccttctgacatcagggctgttcttgcatcctatcaaagtggtgatattgctgccgagtttattgagcgctctaaggagcaccagaggcgcatgcaagaacaaaagaaatcaggacgcatatggaggcggtgaggactaaaagttggaaggaaaacataccaatgattttgacgcttcaatccgaatcaagtgaatggatccatcaaggattacaattttgtcatcttttgccttggcggttaataaacatactaaacgttatttataatcattcagaagacgccataccggctgaagtatagcgcttgctgtttgtatttttaagggtaatgaaagtattaatgtggcggttgctgctttgttttaagagtcgcgatagtattaattaatgtggtatttgcgttttttatggattttatgatggtactccatcaccatctctttcaaaatactatagcctgttctaaatcaaacatggctaagtttaacaagaaatatatcaagatttacaatgtcgaatta

SEQ ID NO: 75072 - DNA, 1660 bp, Zea Mays
ctcatccctcccaagtcccaactccgctgctacgccttcttctacatcgcaatcacgcgcccgtccggctctcccccttctccctcgccctcacgcgctcacgccctcacctcagtcctcatcgctctcggccgcctgcttaaaccctccgctcgaaccggaacccaaccaagaacagatccaaaacgcaagccgcaccatgtctcgtgtcgcgggctcgcgcctcctccctaggatctctgcgctctccttctgcaccgcctccccggcaaccgccgccgcttcctcctcctcatccacagcggcggtggcagcggcagccgccaccgcctccgaggcttcctccaccgccggagacccatcctcccagccgccccagactgcccgcaagccgtggggcgcgctcaagttcgccgccttcgccgccgtgtccaccgcggttggcggcacgggctacgtcagctacgcttattctctagaggaagtggatcagatgacgcgggagctccggaagaagtcgaagcagcccattcctgaggatgcttctggctttgaggctatggcttattcagcagctatgaaagttcctgttgccgctattgaggtatacatggatgtgaggagccaaattgaagatcaaattcggggatttagcgaaccagtatcagacaaacttcttccagatcttgctcctcaagagcagcatgtattgactctagttctggatctgaacgagactcttgtatactcagattggaagcgtgagagaggatggaggacctttaagaggccaggagtggatgcttttcttgaacatctcgggaggttttatgaaattgttgtgtattctgatcagcttagtatgtatgttgatcctgttgttgataggctggatccaaagggcaatattcgacataggctatcaagagttgcaactaagtatgaaaatggaaaacattatcgggatttgtcgaagctgaacagaaatcctgctcaagttctttatatcagcgctcatgctaaagagtcaagtctgcagcctgaaaattctgtggaaattaaaccttggaagcttgaaaatgatgacactcaactgcttgatcttattccatttctagaatatgttgctatggcaagaccttctgacatcagggctgttcttgcatcctatcaaagtggtgatattgctgccgagtttattgagcgctctaaggagcaccagaggcgcatgcaagaacaaaagaaatcaggacgcatatggaggcggtgaggactaaaagttggaaggaaaacataccaatgattttgacgcttcaatccgaatcaagtgaatggatccatcaaggattacaattttgtcatcttttgccttggcggttaataaacatactaaacgttatttataatcattcagaagacgccataccggctgaagtatagcgcttgctgtttgtatttttaagggtaatgaaagtattaatgtggcggttgctgctttgttttaagagtcgcgatagtattaattaatgtggtatttgcgttttttatggattttatgatggtactccatcaccatctctttcaaaatactatagcctgttctaaatcaaacatggctaagtttaacaagaaatatatcaagatttacaatgtcgaatta

SEQ ID NO: 75073 - DNA, 1178 bp, Zea Mays
atatgagcttactattaatctactcatcctggatactggttcttttggttaacatcttcatctactcatcgtgttagaaaaaaaaataaagttcctgttcagttcctgttgccgctattgaggtatacatggatgtgaggagccaaattgaagatcaaattcggggatttagcgaaccagtatcagacaaacttcttccagatcttgctcctcaagagcagcatgtattgactctagttctggatctgaacgagactcttgtatactcagattggaagcgtgagagaggatggaggacctttaagaggccaggagtggatgcttttcttgaacatctcgggaggttttatgaaattgttgtgtattctgatcagcttagtatgtatgttgatcctgttgttgataggctggatccaaagggcaatattcgacataggctatcaagagttgcaactaagtatgaaaatggaaaacattatcgggatttgtcgaagctgaacagaaatcctgctcaagttctttatatcagcgctcatgctaaagagtcaagtctgcagcctgaaaattctgtggaaattaaaccttggaagcttgaaaatgatgacactcaactgcttgatcttattccatttctagaatatgttgctatggcaagaccttctgacatcagggctgttcttgcatcctatcaaagtggtgatattgctgccgagtttattgagcgctctaaggagcaccagaggcgcatgcaagaacaaaagaaatcaggacgcatatggaggcggtgaggactaaaagttggaaggaaaacataccaatgattttgacgcttcaatccgaatcaagtgaatggatccatcaaggattacaattttgtcatcttttgccttggcggttaataaacatactaaacgttatttataatcattcagaagacgccataccggctgaagtatagcgcttgctgtttgtatttttaagggtaatgaaagtattaatgtggcggttgctgctttgttttaagagtcgcgatagtattaattaatgtggtatttgcgttttttatggattttatgatggtactccatcaccatctctttcaaaatactatagcctgttctaaatcaaacatggctaagtttaacaagaaatatatcaagatttacaatgtcgaatta

SEQ ID NO: 75074 - DNA, 2540 bp, Zea Mays
gcgtacgagtggacgttcacgcgaccacaaactgtcgtattactatcggagaactcgagcagcggtcgcggccggccgtgcagcacatcagcacatcagcgggcgggagcagctcagaccgcagcgatgcaggggagcggcgcactgccgggccttaccggcaccgggcgcggcggcggcttcctcccgtgcggcagcctcggcaagcgaactcccgctggccgacgcggcgccaccagcgttcgcgccgtcgacggggcttccgttgcggccgccgcctccgcggccgccgattccccgctcccgcccgtgcaggtcacctggcagattgccgtcggtgctctagctggagtgacgcctttcgtcgttgcaggagtcgagttcggcaaaagaatcaagaaatgccaagtctgcggaggctctggtcttgtaacgaagaacgactattacgttcgatgccaaaagtgtggtaagaagagccccacgatggcatacttgtggagaatcaaacgtgacaatggttttcttccgcaggtggttttcttccgtggcagtcttggcgaagattcttcacggggtgaacgtggtctctgatcagtggtcttcagtactcaactagcgctgtaactaaggccccgtttggtttgggctaactaaagtttagtgactaaagtttagtcacttttagccactaaagaagcaaacatattgactaaagtggagtgactaaactttagttctttagtcaccaaatgagtgactaaaagggactaaagtagtatttttaccatatttgccctctacactttctttttatagcaaacatccattaattaataggggtaaaacagtcattattcacagcaattaatactctttagtccggtttagtcactggaaccaaacgggttactttagcgcctaaactttagtcactaaaatttagtttagtgactaaaggaaccaaacagggcctaaagatacaatagatggacatcaccgtgctttaaatgcctcctcactagaccataaatgaagcaatatgccgtagtccgtagacatgtagaattactcatgcatgttgtattttacaaaaggcatcttacataaactatattttgccccttatgtatcatccagtgatacaggagatgtgtctgaagtttggtataatgcggttaatgaaaccaggcagacttatagttgctacacaaatacagcaaactgaacttttgctgcaaaagctgaatgagaatatatttccttgtttgttgggttgtgggctagttcttgccgtggctttaatccggctgtgacgttgaaagtcgcctaaagggggtgaataggcgaaacctaaaatttataactttaaacacacactacaatccggggttagcgttacagttaaattcaagtccgaaagagagaagaaaacaaatcaaacaagattcaaggcgagtctcttgcttcgattacaagtcacttgagagcaagaatgagaaagaagaaagacaatccaagaaataagagcgcaaaagaacacgaacacactctctcataagtcactaaatgtttgagttaaattctaggcttgaagagggtttgatctttgaaaatgtgtcttagagagaatgcactagctcttgtattgaatgtgatctctgaaaaacttggatgccaaaagttgtggtggttgaggggtatttatagcccccaaccaccttggtagctattggggaggctgctggggatgggcgcaccggacagtccggtacgccaccggacatgcactgttctttgtccggtgcgccgctacgtcacccaaccgttagggttcggaggtcgaccgttggagctttgtccacaccggacagtccggtgccataccggacagtccggtaccctctgacttctgtcgtggcactgtagcccaatgtagcactttgcagagtcgaccgttgtcgctggatagtcgttgcccgctggctcaccggacagtctggtgaattatagcggagtgcgccctgagatttccgagaatgactggttgacatctgtatggtcctggtgcaccggacattgtctggtggcacacgagacagtccgttgcgccaattcttagccacttaagttctttgctccgtttcaaattgagtccgtaatttgattttttttgttgatttgtgttgaaccttatagacctgtaatacatgaattttagaacaaactagttagtcaatgtgtttatgttgattatcaaccaccaaaattagctataggaaatggttaacccaatttctgtttcagatgcctatagtattttgtctctatacgttagagtaccagcagtctgaatagcagcagctgcggctgcgatttggaattattcccaattttcttacgagttttccacacacggggacatctcggtctcggtcccttactggagctaatgaaggcgaccagtagctcctcaaggaaaacattatataatctgtagttagaaaactggaaagaatggagacaactttatattgaca

SEQ ID NO: 75075 - DNA, 4503 bp, Zea Mays
cgcacgcggctgttttccccatccttccactccacctccgcaagaacggcgagagagcgcacccaaaccagagacacctacggcgggtcggcggccgaccccggggccgcgcccatcccgacgttttcccgattctccggctacctcctcccttatctccttgcgcgtgacgcgcccacgactcctcgtcgtcctcttgtgatctggtccccatctcgctgccgcctcctcccgacttaccaaactccaacacgccatgcgaccatgcgctcatgcatagcatagatatagctgtagccaagctgcccaagcacgagcaccactcgtcttctccgaccttccagctctagctctgatccgagccgaaacagccatccaagacgcccgcggccgccgtgagcgggtgaccctctgcgctgcgctgcgtcaccacccaaatggatgacatcgccagcgaggcgcccgtgggggcgttcgccatcggcccatccacggcgctgggcggcgccgtcgcgctccgggtgctgctctgcggctccgcggcgcgcctgcgtcatcgtctagccgcggcactgcgcgccgcgctgcccgtcgcggcggcgtggctgcacccgcgcgacaacacgcgcgggatcctgctcgccgtctgcgccgtcgcgctcctgctgcggggccgacgcggcagggcggggctgcgggcgagggtgcagtccgcctaccgctgcaagttctggcggaacatgatgcgcgccgcgctcacctacgaggagtgggcgcacgcggcgcggatgctggagctcgaggccgcgccgcgccgcgccagcgacgccgacctctacgacgaggagctcgtccgcaataagctccgcgagctcaggcaccggcgccaggagggatcgctcagggacatcgtcttctgcatgcgtgctgacctgctcaggaacctcggcaatatgtgcaaccctgaactgcacaaggggaggctgcaggtgcctagactcataaaggaatacattgaggaagtatctactcaactgaaaatggtctgtgattctgattcagatgagttgcctctcgaagagaaactcgcatttatgcatgagacaagacatgcctttggtagaacagccttgctgctaagtggaggtgcttcgttaggatcctttcatgtgggtgttgttaaaaccttggtagaacataaacttctgccaaggatagtttcaggatcaagtgtaggctcaataatgtgttctatagtagcaacaagatcatggcctgagctggagagcttttttgaagagtggcattccctgaaattttttgaccagatgggtggaatctttcctgtggttaaaagaattttgacgcatggcgctcttcatgatataaggcacttgcaggtgcttttgagaaaccttaccagcaatctgacatttcaagaagcttatgacattactggtcggattcttgttgtcactgtgtgttctccaaggaagcatgagccgcctcgatgcctaaactatttaacatcacctcatgttcttatctggagtgcagtaacagcttcctgcgcttttcctggactttttgaggcccaagaattgatggcaaaagatagatttggtcaaaccattcctttccatgctccattcttattaggcatggaggaacgaactgttgctccaacccgccgctggagagatgggagcttagaaagcgatttacccatgaagcaattgaaggaactattcaatgtgaatcatttcatagtaagtcaagccaatcctcacatagctccactattgagactaaaggaaatcatcagggcttatggaggcagctttgctgccaagcttgctgaacttgccgagatggaagttaaacataggtgtaatcaagttctggaacttggattccctttaggaggattagctaaactatttgctcaagattgggaaggtgatgttacagttgttatgccagccactcttgcacagtattccaagatgatacaaaacccgtcttatgctgagcttcagaaggctgcgaatcaaggctaaagaggagtgcagaaagagcatccgcatcgcaaggatatggtccagtaatcaggttctgcccatctaggaggattccatcctggaatctcatagcgagagaaaattcaactggttctcttgatgaagaaatgctcgcatctcctcatacaaatcatcaaggacctggaggagttgctggaacatctaccagaaatcagtatcttcagagaaatgcacacgagagcagtgacagtgaatctgagagtattgatttacactcttggacaagaaatggtggccctcttatgaggacagcctcagccaataaattcatcagctttgttcagaatcttgagatcgacacagaattcagaacaattccatcgagggaaaacctaactgatcttgtgacaccaaatgctggtaccttggcagctcatgcagtgagtagagaagcaaccgataggagcttggacatttcagctttagatatccatgataccgctacccctagatcgacatttggccgttcaacaagcatcgttgtttctgaaggtgacttgttgcagcctgaaaagattgaaaatggtattttgtttaatgttgtaaggagggatactctgctggagtctagtagcggagttgagtctcaaggatctcctcgggaaccagatgttgaaacagtgcagacagagtgccttgatggcatttcagcttccgatgacgacgacaaggaactaaatgtcattgttgatgaagcaaccgatcccatgagcagcaataatctacaagatcaggggtcctcactggaagaaaattcatatagtcattttcccttaaattctgcagacgagacaagcacaaacaaaccagaaactgcatctatttttgatatatgtacagagatgcatccggcgtccattagcctaccgcaaggatcttcagaaaaggcagaactctgaaacagcaaagatccctgacgacgattcagctgctatgagtgatgaagttgcctcatgtgctggtaactaaagagttgtcctcctccctctagctttgaggcatcagatgtaagtgatgtactataatctaagcatcatgaattggatggtgaagctttatgttgttcaagtttcagaagaaggagatccaatggctttggttcttcgaatgtactgtagttgttttggggaaataaagcgcttcttagaaaaacccgggagaagttttgcgcttgggagctctcgagcttcttttttttttggccgagaaattgcccaaagccgtagtctctactctctcgtcagtcgtcacgacttcgtgaaagggaaatgtgcccttgggccatttctaagtattttggtgattgggtgtcaacacaagtgcttaaatgtgaattaatgcccatggatgaacaaagtgaaaatctagagcaaaggtatgtttctaagtcttagtacattggttttgtgtactaatatatttgtctaagtgttagaaacagaaagaagaagagaagagaagacttggctgtgtacagccaagaggctgtttcggtctggggcaccggactgtccggtggtgcaccggacagtgtacggtgcgccaggctgccccggccgaagaggccgctctcgggaattcgccgacggcgtacggctaaaattcaccggactgtccggtgtacaccggactgtccggtgagccaacggtcggtcaggaccaacggtcggccgcgcgatcagcgcaggacacgtggccgagccaacggtcggaagggggcaccggactgtccggtgtgcaccggacatgtccggtgcgccaacggctcccgcatctgcaacggtcgtcttcgccatttaaggaaaggaatcgggcaccggactgtccggtgcgcccgacgatagaaggcaaagatggccttccagatttgctctcaacggctcctagctgccttggggctataaaagggacccctaggcgcatggaggagacatccaagcaactcttgagcattcttgatcatccacactcagtctttgcgcatccatttgtgattctaagtgattcgagctctgttcttgtgagaaactgtgagatagtctttgagctcgaatcttggccgtgtgtgtgcgcgtttcgctgtggatttgtgtgtgttgctcccctcacttactccgtgcttctgtgtgaatcttaagtgtaagggcgagagactccaatttgtggagattcctcgcaagtgggataaagataagcaaggcaaaatactgtggtattcaagtgggtctttggactgcttgagaggggttgattgcaaccctcgtccgttgggacgccacaacgtggagtaggcaagttttgtacttggccgaaccacgggataaatcaccgtgtcttctctgtgttgaattctctgtgattgtcgtattgtgcaagatcttctctttagccacttggcaat

SEQ ID NO: 75076 - DNA, 1795 bp, Zea Mays
agaacggcgagagagcgcacccaaaccagagacacctacggcgggtcggcggccgaccccggggccgcgcccatcccgacgttttcccgattctccggctacctcctcccttatctccttgcgcgtgacgcgcccacgactcctcgtcgtcctcttgtgatctggtccccatctcgctgccgcctcctcccgacttaccaaactccaacacgccatgcgaccatgcgctcatgcatagcatagatatagctgtagccaagctgcccaagcacgagcaccactcgtcttctccgaccttccagctctagctctgatccgagccgaaacagccatccaagacgcccgcggccgccgtgagcgggtgaccctctgcgctgcgctgcgtcaccacccaaatggatgacatcgccagcgaggcgcccgtgggggcgttcgccatcggcccatccacggcgctgggcggcgccgtcgcgctccgggtgctgctctgcggctccgcggcgcgcctgcgtcatcgtctagccgcggcactgcgcgccgcgctgcccgtcgcggcggcgtggctgcacccgcgcgacaacacgcgcgggatcctgctcgccgtctgcgccgtcgcgctcctgctgcggggccgacgcggcagggcggggctgcgggcgagggtgcagtccgcctaccgctgcaagttctggcggaacatgatgcgcgccgcgctcacctacgaggagtgggcgcacgcggcgcggatgctggagctcgaggccgcgccgcgccgcgccagcgacgccgacctctacgacgaggagctcgtccgcaataagctccgcgagctcaggcaccggcgccaggagggatcgctcagggacatcgtcttctgcatgcgtgctgacctgctcaggaacctcggcaatatgtgcaaccctgaactgcacaaggggaggctgcaggtgcctagactcataaaggaatacattgaggaagtatctactcaactgaaaatggtctgtgattctgattcagatgagttgcctctcgaagagaaactcgcatttatgcatgagacaagacatgcctttggtagaacagccttgctgctaagtggaggtgcttcgttaggatcctttcatgtgggtgttgttaaaaccttggtagaacataaacttctgccaaggatagtttcaggatcaagtgtaggctcaataatgtgttctatagtagcaacaagatcatggcctgagctggagagcttttttgaagagtggcattccctgaaattttttgaccagatgggtggaatctttcctgtggttaaaagaattttgacgcatggcgctcttcatgatataaggcacttgcaggtgcttttgagaaaccttaccagcaatctgacatttcaagaagcttatgacattactggtcggattcttgttgtcactgtgtgttctccaaggaagcatgagccgcctcgatgcctaaactatttaacatcacctcatgttcttatctggagtgcagtaacagcttcctgcgcttttcctggactttttgaggcccaagaattgatggcaaaagatagatttggtcaaaccattcctttccatgctccattcttattaggcatggaggaacgaactgttgctccaacccgccgctggagagatgggagcttagaaagcgatttacccatgaagcaattgaaggaactattcaatgtgaatcatttcataaatgcagaaacactttttattggacatgcttcagtccatgtaaaacatgaagatatttcttcttttgc

SEQ ID NO: 75077 - DNA, 4476 bp, Zea Mays
cgcacccaaaccagagacacctacggcgggtcggcggccgaccccggggccgcgcccatcccgacgttttcccgattctccggctacctcctcccttatctccttgcgcgtgacgcgcccacgactcctcgtcgtcctcttgtgatctggtccccatctcgctgccgcctcctcccgacttaccaaactccaacacgccatgcgaccatgcgctcatgcatagcatagatatagctgtagccaagctgcccaagcacgagcaccactcgtcttctccgaccttccagctctagctctgatccgagccgaaacagccatccaagacgcccgcggccgccgtgagcgggtgaccctctgcgctgcgctgcgtcaccacccaaatggatgacatcgccagcgaggcgcccgtgggggcgttcgccatcggcccatccacggcgctgggcggcgccgtcgcgctccgggtgctgctctgcggctccgcggcgcgcctgcgtcatcgtctagccgcggcactgcgcgccgcgctgcccgtcgcggcggcgtggctgcacccgcgcgacaacacgcgcgggatcctgctcgccgtctgcgccgtcgcgctcctgctgcggggccgacgcggcagggcggggctgcgggcgagggtgcagtccgcctaccgctgcaagttctggcggaacatgatgcgcgccgcgctcacctacgaggagtgggcgcacgcggcgcggatgctggagctcgaggccgcgccgcgccgcgccagcgacgccgacctctacgacgaggagctcgtccgcaataagctccgcgagctcaggcaccggcgccaggagggatcgctcagggacatcgtcttctgcatgcgtgctgacctgctcaggaacctcggcaatatgtgcaaccctgaactgcacaaggggaggctgcaggtgcctagactcataaaggaatacattgaggaagtatctactcaactgaaaatggtctgtgattctgattcagatgagttgcctctcgaagagaaactcgcatttatgcatgagacaagacatgcctttggtagaacagccttgctgctaagtggaggtgcttcgttaggatcctttcatgtgggtgttgttaaaaccttggtagaacataaacttctgccaaggatagtttcaggatcaagtgtaggctcaataatgtgttctatagtagcaacaagatcatggcctgagctggagagcttttttgaagagtggcattccctgaaattttttgaccagatgggtggaatctttcctgtggttaaaagaattttgacgcatggcgctcttcatgatataaggcacttgcaggtgcttttgagaaaccttaccagcaatctgacatttcaagaagcttatgacattactggtcggattcttgttgtcactgtgtgttctccaaggaagcatgagccgcctcgatgcctaaactatttaacatcacctcatgttcttatctggagtgcagtaacagcttcctgcgcttttcctggactttttgaggcccaagaattgatggcaaaagatagatttggtcaaaccattcctttccatgctccattcttattaggcatggaggaacgaactgttgctccaacccgccgctggagagatgggagcttagaaagcgatttacccatgaagcaattgaaggaactattcaatgtgaatcatttcatagtaagtcaagccaatcctcacatagctccactattgagactaaaggaaatcatcagggcttatggaggcagctttgctgccaaggaggattagctaaactatttgctcaagattgggaaggtgatgttacagttgttatgccagccactcttgcacagtattccaagatgatacaaaacccgtcttatgctgagcttcagaaggctgcgaatcaaggtaggagatgcacttgggaaaagttatcagccatcagggcaaattgtgctattgagcttgcactggatgaatgtgttgccctcctgaaccacttgcgtaggctaaagaggagtgcagaaagagcatccgcatcgcaaggatatggtccagtaatcaggttctgcccatctaggaggattccatcctggaatctcatagcgagagaaaattcaactggttctcttgatgaagaaatgctcgcatctcctcatacaaatcatcaaggacctggaggagttgctggaacatctaccagaaatcagtatcttcagagaaatgcacacgagagcagtgacagtgaatctgagagtattgatttacactcttggacaagaaatggtggccctcttatgaggacagcctcagccaataaattcatcagctttgttcagaatcttgagatcgacacagaattcagaacaattccatcgagggaaaacctaactgatcttgtgacaccaaatgctggtaccttggcagctcatgcagtgagtagagaagcaaccgataggagcttggacatttcagctttagatatccatgataccgctacccctagatcgacatttggccgttcaacaagcatcgttgtttctgaaggtgacttgttgcagcctgaaaagattgaaaatggtattttgtttaatgttgtaaggagggatactctgctggagtctagtagcggagttgagtctcaaggatctcctcgggaaccagatgttgaaacagtgcagacagagtgccttgatggcatttcagcttccgatgacgacgacaaggaactaaatgtcattgttgatgaagcaaccgatcccatgagcagcaataatctacaagatcaggggtcctcactggaagaaaattcatatagtcattttcccttaaattctgcagacgagacaagcacaaacaaaccagaaactgcatctatttttgatatatgtacagagatgcatccggcgtccattagcctaccgcaaggatcttcagaaaaggcagaactctgaaacagcaaagatccctgacgacgattcagctgctatgagtgatgaagttgcctcatgtgctggtaactaaagagttgtcctcctccctctagctttgaggcatcagatgtaagtgatgtactataatctaagcatcatgaattggatggtgaagctttatgttgttcaagtttcagaagaaggagatccaatggctttggttcttcgaatgtactgtagttgttttggggaaataaagcgcttcttagaaaaacccgggagaagttttgcgcttgggagctctcgagcttcttttttttttggccgagaaattgcccaaagccgtagtctctactctctcgtcagtcgtcacgacttcgtgaaagggaaatgtgcccttgggccatttctaagtattttggtgattgggtgtcaacacaagtgcttaaatgtgaattaatgcccatggatgaacaaagtgaaaatctagagcaaaggtatgtttctaagtcttagtacattggttttgtgtactaatatatttgtctaagtgttagaaacagaaagaagaagagaagagaagacttggctgtgtacagccaagaggctgtttcggtctggggcaccggactgtccggtggtgcaccggacagtgtacggtgcgccaggctgccccggccgaagaggccgctctcgggaattcgccgacggcgtacggctaaaattcaccggactgtccggtgtacaccggactgtccggtgagccaacggtcggtcaggaccaacggtcggccgcgcgatcagcgcaggacacgtggccgagccaacggtcggaagggggcaccggactgtccggtgtgcaccggacatgtccggtgcgccaacggctcccgcatctgcaacggtcgtcttcgccatttaaggaaaggaatcgggcaccggactgtccggtgcgcccgacgatagaaggcaaagatggccttccagatttgctctcaacggctcctagctgccttggggctataaaagggacccctaggcgcatggaggagacatccaagcaactcttgagcattcttgatcatccacactcagtctttgcgcatccatttgtgattctaagtgattcgagctctgttcttgtgagaaactgtgagatagtctttgagctcgaatcttggccgtgtgtgtgcgcgtttcgctgtggatttgtgtgtgttgctcccctcacttactccgtgcttctgtgtgaatcttaagtgtaagggcgagagactccaatttgtggagattcctcgcaagtgggataaagataagcaaggcaaaatactgtggtattcaagtgggtctttggactgcttgagaggggttgattgcaaccctcgtccgttgggacgccacaacgtggagtaggcaagttttgtacttggccgaaccacgggataaatcaccgtgtcttctctgtgttgaattctctgtgattgtcgtattgtgcaagatcttctctttagccacttggcaat

SEQ ID NO: 75078 - DNA, 1535 bp, Zea Mays
aagagaagagaagagaagaggggagtcgaggtcgagagcagcagggagagggaaaatccactaatccccccaccccggctctctcgaaacccgccattcccctccgccgcaaacacgcgtcggagctcgtggcgagcgccgccaccccgcactcgggctggggggcgtccctccgcccccttcgatctagagccggcggccgcgatcccgccgcgggtcctcgcggccgccgcgaattgggtttgtactgacgttaccggtgggcggaggcgctttgatcctgtagctgccgggttgggttcagtagatggcgggcaaggagcagggcggtggaggcccgccgcagaggcctcccatgcccgcagcgtccatgcagccgccaatcaagaagctggtaaggcagctggacttcaactcggcggcgttggcggggaaccccgcgatggcggcagcggcggccgccgtgtctagggctcttcagccgagggcgttgcccgcggggttccagcatccgcagcacgtgagggctgccgtgccgatggtggtgccgcagcagctgcaccagcgggcgctgccggtgatgcgcccgcatccggtggtgggtcatgtgccgcggcacgcggtgccgctggcggtccctgtaccgcagctccgtccgatgccgccacagccagtccagcgtcccccggtcgccgttcccttgaaaccagactcaccaaaaccgtgggcaagactttacgaagggaaagatagcactcccacgaagaaaaagtgctgcaactgcaggaactccagatgtttgaagttatactgtgaatgcttcgcttctggtactcactgtgatggttgcaactgcaccaactgttttaataatcctgagaatgaggttgccagacgtgaagctattgaagctacattggagcgtaatccagatgcttttaggcctaagatcgggagcagtccacatacgaataggaataattgatctccctttagtagggaagcataataaagggtgccattgcaagaagtcaggatgcctcaagaagtactgtgagtgcttccaagctaatatactatgctctgaaaactgcaagtgtatggattgcaagaattttgaaggaagtgaagagagaagaaatcttttccaaggggatcataaaaatgcaattaacattcagcaggcgacaaatgcagctgtaaatggtgctattggaaccacaggattcccttctccctccacgtcaaggaagaggaaacatattgatccttcacttgaccattcaaacaaggaacatgcagcgcacaggaattgtcacatacctcagaaaaatgcagtgcctgatggttcaattccaataagccagtctgcacatcctccaactctgggcccctttaaagttacctacaggccccttttagcagacattgtccaagcagaggacgtaaaggagctatgcaagcttttagtggtggtatcaggagaagccgccaaaacatatgctggtactgctcttgtctttatgctgatttaa

SEQ ID NO: 75079 - DNA, 2621 bp, Zea Mays
aagagaagagaagagaagaggggagtcgaggtcgagagcagcagggagagggaaaatccactaatccccccaccccggctctctcgaaacccgccattcccctccgccgcaaacacgcgtcggagctcgtggcgagcgccgccaccccgcactcgggctggggggcgtccctccgcccccttcgatctagagccggcggccgcgatcccgccgcgggtcctcgcggccgccgcgaattgggtttgtactgacgttaccggtgggcggaggcgctttgatcctgtagctgccgggttgggttcagtagatggcgggcaaggagcagggcggtggaggcccgccgcagaggcctcccatgcccgcagcgtccatgcagccgccaatcaagaagctggtaaggcagctggacttcaactcggcggcgttggcggggaaccccgcgatggcggcagcggcggccgccgtgtctagggctcttcagccgagggcgttgcccgcggggttccagcatccgcagcacgtgagggctgccgtgccgatggtggtgccgcagcagctgcaccagcgggcgctgccggtgatgcgcccgcatccggtggtgggtcatgtgccgcggcacgcggtgccgctggcggtccctgtaccgcagctccgtccgatgccgccacagccagtccagcgtcccccggtcgccgttcccttgaaaccagactcaccaaaaccgtgggcaagactttacgaagggaaagatagcactcccacgaagaaaaagtgctgcaactgcaggaactccagatgtttgaagttatactgtgaatgcttcgcttctggtactcactgtgatggttgcaactgcaccaactgttttaataatcctgagaatgaggttgccagacgtgaagctattgaagctacattggagcgtaatccagatgcttttaggcctaagatcgggagcagtccacatacgaataggaataatgaggtgtctagtgatctccctttagtagggaagcataataaagggtgccattgcaagaagtcaggatgcctcaagaagtactgtgagtgcttccaagctaatatactatgctctgaaaactgcaagtgtatggattgcaagaattttgaaggaagtgaagagagaagaaatcttttccaaggggatcataaaaatgcaattaacattcagcaggcgacaaatgcagctgtaaatggtgctattggaaccacaggattcccttctccctccacgtcaaggaagaggaaacatattgatccttcacttgaccattcaaacaaggaacatgcagcgcacaggaattgtcacatacctcagaaaaatgcagtgcctgatggttcaattccaataagccagtctgcacatcctccaactctgggcccctttaaagttacctacaggccccttttagcagacattgtccaagcagaggacgtaaaggagctatgcaagcttttagtggtggtatcaggagaagccgccaaaacatatgctgaccggaaagcgaaggaagagagggttggcaagaaggaagatgaaagggcagaacaaaaggaagatgacagggcaggttccctagcattgacaaaccatgacagagaaggaaataatcaagatccagataaaaaagcatcaatcgatgaccattcaagcagaggaactcatacgggcaaagctaatcaagaagaatccagacctaactgcgctgatgatcagaagtccaatagacctatgtctcctggaacactagcactgatgtgtgacgaacaagcgttcgagaaaatgtgtgacgaacaagatacagtgtttacggcttctcaaaatgctgttcctcagcagacagttactgtcaaccaaaaccaatctgcactgtacgcagaacaagaaagaattgtgctgacagaattccgtgattgcctccgcaaacttgtgacatacggaagaatgaaagaggaaaggtacgccatggaaatcaaatctgaaacatctggccatcctggacaggtaaatggtgtttctcaagtaccatattcaaaagtagaggtgcctgttgtaaaaacagacccacagagttccagcagccatcctgttgctggaaaacctgttactggccttttggacaaaaactgaagcctgggtgttccaggtttgtattcggggtgttgcaatgatcaagggaatcatgttttcaccctcctaatttgttgatcagatacatgtatcagtcttgatagataatctagattttagggaattccaatttattctcattggtcagagtaagtgtgatgctggaatgtggatagttagtttagtcataaatgccaaccttgtcgtattttctacattgtagtttctcccttttcttttccttgtctacatttcatcattttgccatccacctaattcgagccaagatatggctgggtggatgtttatttcaaaataaaataaaaagtcaaaaggaagaaaaggtaacactggagagatgagcctagatgtcattgttgcactgatgctattcttaactcgcagatctttgtagcaccagcaggtgctacaccgattccatggctttacaacttggagctgccattgt

SEQ ID NO: 75080 - DNA, 2630 bp, Zea Mays
aagagaagagaagagaagaggggagtcgaggtcgagagcagcagggagagggaaaatccactaatccccccaccccggctctctcgaaacccgccattcccctccgccgcaaacacgcgtcggagctcgtggcgagcgccgccaccccgcactcgggctggggggcgtccctccgcccccttcgatctagagccggcggccgcgatcccgccgcgggtcctcgcggccgccgcgaattgggtttgtactgacgttaccggtgggcggaggcgctttgatcctgtagctgccgggttgggttcagtagatggcgggcaaggagcagggcggtggaggcccgccgcagaggcctcccatgcccgcagcgtccatgcagccgccaatcaagaagctggtaaggcagctggacttcaactcggcggcgttggcggggaaccccgcgatggcggcagcggcggccgccgtgtctagggctcttcagccgagggcgttgcccgcggggttccagcatccgcagcacgtgagggctgccgtgccgatggtggtgccgcagcagctgcaccagcgggcgctgccggtgatgcgcccgcatccggtggtgggtcatgtgccgcggcacgcggtgccgctggcggtccctgtaccgcagctccgtccgatgccgccacagccagtccagcgtcccccggtcgccgttcccttgaaaccagactcaccaaaaccgtgggcaagactttacgaagggaaagatagcactcccacgaagaaaaagtgctgcaactgcaggaactccagatgtttgaagttgtaagtcagatactgtgaatgcttcgcttctggtactcactgtgatggttgcaactgcaccaactgttttaataatcctgagaatgaggttgccagacgtgaagctattgaagctacattggagcgtaatccagatgcttttaggcctaagatcgggagcagtccacatacgaataggaataatgaggtgtctagtgatctccctttagtagggaagcataataaagggtgccattgcaagaagtcaggatgcctcaagaagtactgtgagtgcttccaagctaatatactatgctctgaaaactgcaagtgtatggattgcaagaattttgaaggaagtgaagagagaagaaatcttttccaaggggatcataaaaatgcaattaacattcagcaggcgacaaatgcagctgtaaatggtgctattggaaccacaggattcccttctccctccacgtcaaggaagaggaaacatattgatccttcacttgaccattcaaacaaggaacatgcagcgcacaggaattgtcacatacctcagaaaaatgcagtgcctgatggttcaattccaataagccagtctgcacatcctccaactctgggcccctttaaagttacctacaggccccttttagcagacattgtccaagcagaggacgtaaaggagctatgcaagcttttagtggtggtatcaggagaagccgccaaaacatatgctgaccggaaagcgaaggaagagagggttggcaagaaggaagatgaaagggcagaacaaaaggaagatgacagggcaggttccctagcattgacaaaccatgacagagaaggaaataatcaagatccagataaaaaagcatcaatcgatgaccattcaagcagaggaactcatacgggcaaagctaatcaagaagaatccagacctaactgcgctgatgatcagaagtccaatagacctatgtctcctggaacactagcactgatgtgtgacgaacaagcgttcgagaaaatgtgtgacgaacaagatacagtgtttacggcttctcaaaatgctgttcctcagcagacagttactgtcaaccaaaaccaatctgcactgtacgcagaacaagaaagaattgtgctgacagaattccgtgattgcctccgcaaacttgtgacatacggaagaatgaaagaggaaaggtacgccatggaaatcaaatctgaaacatctggccatcctggacaggtaaatggtgtttctcaagtaccatattcaaaagtagaggtgcctgttgtaaaaacagacccacagagttccagcagccatcctgttgctggaaaacctgttactggccttttggacaaaaactgaagcctgggtgttccaggtttgtattcggggtgttgcaatgatcaagggaatcatgttttcaccctcctaatttgttgatcagatacatgtatcagtcttgatagataatctagattttagggaattccaatttattctcattggtcagagtaagtgtgatgctggaatgtggatagttagtttagtcataaatgccaaccttgtcgtattttctacattgtagtttctcccttttcttttccttgtctacatttcatcattttgccatccacctaattcgagccaagatatggctgggtggatgtttatttcaaaataaaataaaaagtcaaaaggaagaaaaggtaacactggagagatgagcctagatgtcattgttgcactgatgctattcttaactcgcagatctttgtagcaccagcaggtgctacaccgattccatggctttacaacttggagctgccattgt

SEQ ID NO: 75081 - DNA, 2443 bp, Zea Mays
aagagaagagaagagaagaggggagtcgaggtcgagagcagcagggagagggaaaatccactaatccccccaccccggctctctcgaaacccgccattcccctccgccgcaaacacgcgtcggagctcgtggcgagcgccgccaccccgcactcgggctggggggcgtccctccgcccccttcgatctagagccggcggccgcgatcccgccgcgggtcctcgcggccgccgcgaattgggtttgtactgacgttaccggtgggcggaggcgctttgatcctgtagctgccgggttgggttcagtagatggcgggcaaggagcagggcggtggaggcccgccgcagaggcctcccatgcccgcagcgtccatgcagccgccaatcaagaagctggtaaggcagctggacttcaactcggcggcgttggcggggaaccccgcgatggcggcagcggcggccgccgtgtctagggctcttcagccgagggcgttgcccgcggggttccagcatccgcagcacgtgagggctgccgtgccgatggtggtgccgcagcagctgcaccagcgggcgctgccggtgatgcgcccgcatccggtggtgggtcatgtgccgcggcacgcggtgccgctggcggtccctgtaccgcagctccgtccgatgccgccacagccagtccagcgtcccccggtcgccgttcccttgaaaccagactcaccaaaaccgtgggcaagactttacgaagggaaagatagcactcccacgaagaaaaagtgctgcaactgcaggaactccagatgtttgaagttatactgtgaatgcttcgcttctggtactcactgtgatggttgcaactgcaccaactgttttaataatcctgagaatgaggttgccagacgtgaagctattgaagctacattggagcgtaatccagatgcttttaggcctaagatcgggagcagtccacatacgaataggaataatgaggtgtctagtgatctccctttagtagggaagcataataaagggtgccattgcaagaagtcaggatgcctcaagaagtactgtgagtgcttccaagctaatatactatgctctgaaaactgcaagtgtatggattgcaagaattttgaaggaagtgaagagagaagaaatcttttccaaggggatcataaaaatgcaattaacattcagcaggcgacaaatgcagctgtaaatggtgctattggaaccacaggattcccttctccctccacgtcaaggaagaggaaacatattgatccttcacttgaccattcaaacaaggaacatgcagcgcacaggaattgtcacatacctcagaccggaaagcgaaggaagagagggttggcaagaaggaagatgaaagggcagaacaaaaggaagatgacagggcaggttccctagcattgacaaaccatgacagagaaggaaataatcaagatccagataaaaaagcatcaatcgatgaccattcaagcagaggaactcatacgggcaaagctaatcaagaagaatccagacctaactgcgctgatgatcagaagtccaatagacctatgtctcctggaacactagcactgatgtgtgacgaacaagcgttcgagaaaatgtgtgacgaacaagatacagtgtttacggcttctcaaaatgctgttcctcagcagacagttactgtcaaccaaaaccaatctgcactgtacgcagaacaagaaagaattgtgctgacagaattccgtgattgcctccgcaaacttgtgacatacggaagaatgaaagaggaaaggtacgccatggaaatcaaatctgaaacatctggccatcctggacaggtaaatggtgtttctcaagtaccatattcaaaagtagaggtgcctgttgtaaaaacagacccacagagttccagcagccatcctgttgctggaaaacctgttactggccttttggacaaaaactgaagcctgggtgttccaggtttgtattcggggtgttgcaatgatcaagggaatcatgttttcaccctcctaatttgttgatcagatacatgtatcagtcttgatagataatctagattttagggaattccaatttattctcattggtcagagtaagtgtgatgctggaatgtggatagttagtttagtcataaatgccaaccttgtcgtattttctacattgtagtttctcccttttcttttccttgtctacatttcatcattttgccatccacctaattcgagccaagatatggctgggtggatgtttatttcaaaataaaataaaaagtcaaaaggaagaaaaggtaacactggagagatgagcctagatgtcattgttgcactgatgctattcttaactcgcagatctttgtagcaccagcaggtgctacaccgattccatggctttacaacttggagctgccattgt

SEQ ID NO: 75082 - DNA, 2289 bp, Zea Mays
aagagaagagaagagaagaggggagtcgaggtcgagagcagcagggagagggaaaatccactaatccccccaccccggctctctcgaaacccgccattcccctccgccgcaaacacgcgtcggagctcgtggcgagcgccgccaccccgcactcgggctggggggcgtccctccgcccccttcgatctagagccggcggccgcgatcccgccgcgggtcctcgcggccgccgcgaattgggtttgtactgacgttaccggtgggcggaggcgctttgatcctgtagctgccgggttgggttcagtagatggcgggcaaggagcagggcggtggaggcccgccgcagaggcctcccatgcccgcagcgtccatgcagccgccaatcaagaagctggtaaggcagctggacttcaactcggcggcgttggcggggaaccccgcgatggcggcagcggcggccgccgtgtctagggctcttcagccgagggcgttgcccgcggggttccagcatccgcagcacgtgagggctgccgtgccgatggtggtgccgcagcagctgcaccagcgggcgctgccggtgatgcgcccgcatccggtggtgggtcatgtgccgcggcacgcggtgccgctggcggtccctgtaccgcagctccgtccgatgccgccacagccagtccagcgtcccccggtcgccgttcccttgaaaccagactcaccaaaaccgtgggcaagactttacgaagggaaagatagcactcccacgaagaaaaagtgctgcaactgcaggaactccagatgtttgaagttatactgtgaatgcttcgcttctggtactcactgtgatggttgcaactgcaccaactgttttaataatcctgagaatgaggttgccagacgtgaagctattgaagctacattggagcgtaatccagatgcttttaggcctaagatcgggagcagtccacatacgaataggaataatgaggtgtctagtgatctccctttagtagggaagcataataaagggtgccattgcaagaagtcaggatgcctcaagaagtactgtgagtgcttccaagctaatatactatgctctgaaaactgcaagtgtatggattgcaagaattttgaaggaagtgaagagagaagaaatcttttccaaggggatcataaaaatgcaattaacattcagcaggcgacaaatgcagctgtaaatggtgctattggaaccacaggattcccttctccctccacgtcaaggaagaggaaacatattgatccttcacttgaccattcaaacaaggaacatgcagcgcacaggaattgtcacatacctcagaaaaatgcagtgcctgatggttcaattccaataagccagtctgcacatcctccaactctgggcccctttaaagttacctacaggccccttttagcagacattgtccaagcagaggacgtaaaggagctatgcaagcttttagtggtggtatcaggagaagccgccaaaacatatgctgaccggaaagcgaaggaagagagggttggcaagaaggaagatgaaagggcagaacaaaaggaagatgacagggcaggttccctagcattgacaaaccatgacagagaaggaaataatcaagatccagataaaaaagcatcaatcgatgaccattcaagcagaggaactcatacgggcaaagctaatcaagaagaatccagacctaactgcgctgatgatcagaagtccaatagacctatgtctcctggaacactagcactgatgtgtgacgaacaagcgttcgagaaaatgtgtgacgaacaagatacagtgtttacggcttctcaaaatgctgttcctcagcagacagttactgtcaaccaaaaccaatctgcactgtacgcagaacaagaaagaattgtgctgacagaattccgtgattgcctccgcaaacttgtgacatacggaagaatgaaagaggaaaggtacgccatggaaatcaaatctgaaacatctggccatcctggacagagaacccatgacagagtggttgctgtcaactgtcgcctacaaaggttactgccccaggattcgagatcctgagcttttgatgttctctagaaattctttcctgcagataatatggactaatcaatccaaaacgcacaataggagccgtgatggatcgagcagctgttcataactacaatgcttaaattactctcttggaatcatttcacgttgatttttttttcttgaaggctttgtttgggtactctataatattcacgtca

SEQ ID NO: 75083 - DNA, 3684 bp, Zea Mays
aagagaagagaagagaagaggggagtcgaggtcgagagcagcagggagagggaaaatccactaatccccccaccccggctctctcgaaacccgccattcccctccgccgcaaacacgcgtcggagctcgtggcgagcgccgccaccccgcactcgggctggggggcgtccctccgcccccttcgatctagagccggcggccgcgatcccgccgcgggtcctcgcggccgccgcgaattgggtttgtactgacgttaccggtgggcggaggcgctttgatcctgtagctgccgggttgggttcagtagatggcgggcaaggagcagggcggtggaggcccgccgcagaggcctcccatgcccgcagcgtccatgcagccgccaatcaagaagctggtaaggcagctggacttcaactcggcggcgttggcggggaaccccgcgatggcggcagcggcggccgccgtgtctagggctcttcagccgagggcgttgcccgcggggttccagcatccgcagcacgtgagggctgccgtgccgatggtggtgccgcagcagctgcaccagcgggcgctgccggtgatgcgcccgcatccggtggtgggtcatgtgccgcggcacgcggtgccgctggcggtccctgtaccgcagctccgtccgatgccgccacagccagtccagcgtcccccggtcgccgttcccttgaaaccagactcaccaaaaccgtgggcaagactttacgaagggaaagatagcactcccacgaagaaaaagtgctgcaactgcaggaactccagatgtttgaagttatactgtgaatgcttcgcttctggtactcactgtgatggttgcaactgcaccaactgttttaataatcctgagaatgaggttgccagacgtgaagctattgaagctacattggagcgtaatccagatgcttttaggcctaagatcgggagcagtccacatacgaataggaataatgaggtgtctagtgatctccctttagtagggaagcataataaagggtgccattgcaagaagtcaggatgcctcaagaagtactgtgagtgcttccaagctaatatactatgctctgaaaactgcaagtgtatggattgcaagaattttgaaggaagtgaagagagaagaaatcttttccaaggggatcataaaaatgcaattaacattcagcaggcgacaaatgcagctgtaaatggtgctattggaaccacaggattcccttctccctccacgtcaaggaagaggaaacatattgatccttcacttgaccattcaaacaaggaacatgcagcgcacaggaattgtcacatacctcagaaaaatgcagtgcctgatggttcaattccaataagccagtctgcacatcctccaactctgggcccctttaaagttacctacaggccccttttagcagacattgtccaagcagaggacgtaaaggagctatgcaagcttttagtggtggtatcaggagaagccgccaaaacatatgctgaccggaaagcgaaggaagagagggttggcaagaaggaagatgaaagggcagaacaaaaggaagatgacagggcaggttccctagcattgacaaaccatgacagagaaggaaataatcaagatccagataaaaaagcatcaatcgatgaccattcaagcagaggaactcatacgggcaaagctaatcaagaagaatccagacctaactgcgctgatgatcagaagtccaatagacctatgtctcctggaacactagcactgatgtgtgacgaacaagcgttcgagaaaatgtgtgacgaacaagatacagtgtttacggcttctcaaaatgctgttcctcagcagacagttactgtcaaccaaaaccaatctgcactgtacgcagaacaagaaagaattgtgctgacagaattccgtgattgcctccgcaaacttgtgacatacggaagaatgaaagaggaaaggtacgccatggaaatcaaatctgaaacatctggccatcctggacagctactcaaatgtccaaactgggaaacggaatcggctcgagtgaaaatggtccacgacttccgcaaattactggctcaacagtatctggagctaccctcactctcaagccatatgatgttcaaccagccatcggaaaagaacataccgtggtatcagaaaacgttgaggacaacccaaggaccataagaaggtcattctcttttagagcagaggatgttcacgttgttctaggcgatcacaaaaagaagggcaaccatgggagtaacatcttgtcatttctcaagaaaaccaggcgataagcataagaactttgctaaagaaataaacataagaatcaatgcaccaacgggatagagtggaactgtagaggagtaccttttcccccctttggatagtcttttctttcgtggtactattggtcctaccggtcatgcagcgctttcactgtttcgcaataagtactgatatactgaaagcatttcttcaatgatatgtctaggttatcttcaacaacttatcaattctcatactcatatttaaactctactctatcaatattgcaacctacaatataaaacaatgttttgggtgactatattagtgaaccgctggacacggtcgatctaagtcctagggtcccttatgtcctagagtgctataaagaatagctattcaggacagttgagcaacattttaaggtattaggaccataccattttatttgtcaatcgataaggagaaagaggacacatgatacatacacactgcaatctggacctctctaactatgcgcacgctggctcccactcgtgtccaggtttagcatgaccatcaacttgtgtcatgctccctcttaactctctttctagtactctatgtatcctgatgttgttacactacaataacattcatcaatgtaaaagaagttttgatcttttattggtgtgccacacaatttaagaccatagttccaaggaagacatctcatacaatcatacagaacgtgattgttgaaaccacatatgtcacatatcattctatggtagtctcttgtatgatttctcaaaccacaaataagaatcaagtaaaaagtcttacttgcttgaataaatgacttgaccaaataagaatctggagctactgttaatgatatatatcaggggtaccaagatcaacctttatgaagaaggacatgtacggatgagcctatgggcttggccgagagcccaaagactcgatgatcaagactagaaggaggcctgaagtgacaaggatttcagaagcgtatatatggaaaagatcttatcaaaatagaagatatgccaaatgttctaacacttgtaacgatatagttcgattcacatacaaatttgggaccaactcggtcacatgttcaactaggtaccgagtctgtgtctatcctataactgatgtcgctccttagactataaaggagggtcaatgagtgattacgggcctgtttggttcactacctcagttgccacactttgcctaacttttctgtctaaggttagttattcaattcgaacgactaaccttaggcaaagtgtggcatatttagccacaaaccaaacaggcccatatatattctttgtaatctcacatgtctgtatatatgtgaggtcgaagtcttttag

SEQ ID NO: 75084 - DNA, 4660 bp, Zea Mays
aagagaagagaagagaagaggggagtcgaggtcgagagcagcagggagagggaaaatccactaatccccccaccccggctctctcgaaacccgccattcccctccgccgcaaacacgcgtcggagctcgtggcgagcgccgccaccccgcactcgggctggggggcgtccctccgcccccttcgatctagagccggcggccgcgatcccgccgcgggtcctcgcggccgccgcgaattgggtttgtactgacgttaccggtgggcggaggcgctttgatcctgtagctgccgggttgggttcagtagatggcgggcaaggagcagggcggtggaggcccgccgcagaggcctcccatgcccgcagcgtccatgcagccgccaatcaagaagctggtaaggcagctggacttcaactcggcggcgttggcggggaaccccgcgatggcggcagcggcggccgccgtgtctagggctcttcagccgagggcgttgcccgcggggttccagcatccgcagcacgtgagggctgccgtgccgatggtggtgccgcagcagctgcaccagcgggcgctgccggtgatgcgcccgcatccggtggtgggtcatgtgccgcggcacgcggtgccgctggcggtccctgtaccgcagctccgtccgatgccgccacagccagtccagcgtcccccggtcgccgttcccttgaaaccagactcaccaaaaccgtgggcaagactttacgaagggaaagatagcactcccacgaagaaaaagtgctgcaactgcaggaactccagatgtttgaagttatactgtgaatgcttcgcttctggtactcactgtgatggttgcaactgcaccaactgttttaataatcctgagaatgaggttgccagacgtgaagctattgaagctacattggagcgtaatccagatgcttttaggcctaagatcgggagcagtccacatacgaataggaataatgaggtgtctagtgatctccctttagtagggaagcataataaagggtgccattgcaagaagtcaggatgcctcaagaagtactgtgagtgcttccaagctaatatactatgctctgaaaactgcaagtgtatggattgcaagaattttgaaggaagtgaagagagaagaaatcttttccaaggggatcataaaaatgcaattaacattcagcaggcgacaaatgcagctgtaaatggtgctattggaaccacaggattcccttctccctccacgtcaaggaagaggaaacatattgatccttcacttgaccattcaaacaaggaacatgcagcgcacaggaattgtcacatacctcagaaaaatgcagtgcctgatggttcaattccaataagccagtctgcacatcctccaactctgggcccctttaaagttacctacaggccccttttagcagacattgtccaagcagaggacgtaaaggagctatgcaagcttttagtggtggtatcaggagaagccgccaaaacatatgctgaccggaaagcgaaggaagagagggttggcaagaaggaagatgaaagggcagaacaaaaggaagatgacagggcaggttccctagcattgacaaaccatgacagagaaggaaataatcaagatccagataaaaaagcatcaatcgatgaccattcaagcagaggaactcatacgggcaaagctaatcaagaagaatccagacctaactgcgctgatgatcagaagtccaatagacctatgtctcctggaacactagcactgatgtgtgacgaacaagcgttcgagaaaatgtgtgacgaacaagatacagtgtttacggcttctcaaaatgctgttcctcagcagacagttactgtcaaccaaaaccaatctgcactgtacgcagaacaagaaagaattgtgctgacagaattccgtgattgcctccgcaaacttgtgacatacggaagaatgaaagaggaaaggtacgccatggaaatcaaatctgaaacatctggccatcctggacagaggaagctctacactagggattcggtcggtgatggagatggagagccagccagtaaacaaacagcagattccttaatcaggatggacacgaaaccaaacaaaacaaaacgctagacacaagaatccaaccggcaccatctgagcaagtaccagcgcgcccgtgacgagccctgcccctgcgcacggcgccgcgccgtccgagcctctcggtcggtcctcgacctcgagctcgaggagggaaggaaaccccgtcgtcttcgcgccatcgcgtgtgcggacccgccgccccgcgccaaagggaggtcacgcgaccgcctgcgcgccttgtctccttgcccccggtttatttgtccccgaacgctcacaacttcgcgctcgtctgcgtttgccatttctgtgcaaggtagcttgcacccatcgtgaagccgagggagcggcgacacattggtacctgctgtgctgcagtgctctcgtcctggtcggagatggacgctgaggccggcgaggcgggggtgcagcagccggccggggcggcgtccacgagcaccgcggcggtgccgttcgacaggtcgtcgtcgcggctaggcgcgccgggtgccgagagcttcgacggcgcgctcagggagctcaaggatctgcggtctcagctgcacgaagcggcggactgctgcgccaaggcgttcctcagcaccgacaagaagaagatctctactctcatgcatgcgaaggattctggagggtacaaagggttacatatgcgatgcggtggtagctgtgatcgatcacctggggacagtttcgtccaagcttgagcacaagctgcaggagaggactgaagtcgcacagacggaacgaaagatcaacttcttgaaacagaggcttttgacatgcgagcagtacgccgtttctctgaagcttttgtctgtacgaggggaccctgacgccattcgatatcatcgccgttacatctcacaatctactcaaatgtccaaactgggaaacggaatcggctcgagtgaaaatggtccacgacttccgcaaattactggctcaacagtatctggagctaccctcactctcaagccatatgatgttcaaccagccatcggaaaagaacataccgtggtatcagaaaacgttgaggacaacccaaggaccataagaaggtcattctcttttagagcagaggatgttcacgttgttctaggcgatcacaaaaagaagggcaaccatgggagtaacatcttgtcatttctcaagaaaaccaggcgataagcataagaactttgctaaagaaataaacataagaatcaatgcaccaacgggatagagtggaactgtagaggagtaccttttcccccctttggatagtcttttctttcgtggtactattggtcctaccggtcatgcagcgctttcactgtttcgcaataagtactgatatactgaaagcatttcttcaatgatatgtctaggttatcttcaacaacttatcaattctcatactcatatttaaactctactctatcaatattgcaacctacaatataaaacaatgttttgggtgactatattagtgaaccgctggacacggtcgatctaagtcctagggtcccttatgtcctagagtgctataaagaatagctattcaggacagttgagcaacattttaaggtattaggaccataccattttatttgtcaatcgataaggagaaagaggacacatgatacatacacactgcaatctggacctctctaactatgcgcacgctggctcccactcgtgtccaggtttagcatgaccatcaacttgtgtcatgctccctcttaactctctttctagtactctatgtatcctgatgttgttacactacaataacattcatcaatgtaaaagaagttttgatcttttattggtgtgccacacaatttaagaccatagttccaaggaagacatctcatacaatcatacagaacgtgattgttgaaaccacatatgtcacatatcattctatggtagtctcttgtatgatttctcaaaccacaaataagaatcaagtaaaaagtcttacttgcttgaataaatgacttgaccaaataagaatctggagctactgttaatgatatatatcaggggtaccaagatcaacctttatgaagaaggacatgtacggatgagcctatgggcttggccgagagcccaaagactcgatgatcaagactagaaggaggcctgaagtgacaaggatttcagaagcgtatatatggaaaagatcttatcaaaatagaagatatgccaaatgttctaacacttgtaacgatatagttcgattcacatacaaatttgggaccaactcggtcacatgttcaactaggtaccgagtctgtgtctatcctataactgatgtcgctccttagactataaaggagggtcaatgagtgattacgggcctgtttggttcactacctcagttgccacactttgcctaacttttctgtctaaggttagttattcaattcgaacgactaaccttaggcaaagtgtggcatatttagccacaaaccaaacaggcccatatatattctttgtaatctcacatgtctgtatatatgtgaggtcgaagtcttttag

SEQ ID NO: 75085 - DNA, 3982 bp, Zea Mays
aagagaagagaagagaagaggggagtcgaggtcgagagcagcagggagagggaaaatccactaatccccccaccccggctctctcgaaacccgccattcccctccgccgcaaacacgcgtcggagctcgtggcgagcgccgccaccccgcactcgggctggggggcgtccctccgcccccttcgatctagagccggcggccgcgatcccgccgcgggtcctcgcggccgccgcgaattgggtttgtactgacgttaccggtgggcggaggcgctttgatcctgtagctgccgggttgggttcagtagatggcgggcaaggagcagggcggtggaggcccgccgcagaggcctcccatgcccgcagcgtccatgcagccgccaatcaagaagctggtaaggcagctggacttcaactcggcggcgttggcggggaaccccgcgatggcggcagcggcggccgccgtgtctagggctcttcagccgagggcgttgcccgcggggttccagcatccgcagcacgtgagggctgccgtgccgatggtggtgccgcagcagctgcaccagcgggcgctgccggtgatgcgcccgcatccggtggtgggtcatgtgccgcggcacgcggtgccgctggcggtccctgtaccgcagctccgtccgatgccgccacagccagtccagcgtcccccggtcgccgttcccttgaaaccagactcaccaaaaccgtgggcaagactttacgaagggaaagatagcactcccacgaagaaaaagtgctgcaactgcaggaactccagatgtttgaagttatactgtgaatgcttcgcttctggtactcactgtgatggttgcaactgcaccaactgttttaataatcctgagaatgaggttgccagacgtgaagctattgaagctacattggagcgtaatccagatgcttttaggcctaagatcgggagcagtccacatacgaataggaataatgaggtgtctagtgatctccctttagtagggaagcataataaagggtgccattgcaagaagtcaggatgcctcaagaagtactgtgagtgcttccaagctaatatactatgctctgaaaactgcaagtgtatggattgcaagaattttgaaggaagtgaagagagaagaaatcttttccaaggggatcataaaaatgcaattaacattcagcaggcgacaaatgcagctgtaaatggtgctattggaaccacaggattcccttctccctccacgtcaaggaagaggaaacatattgatccttcacttgaccattcaaacaaggaacatgcagcgcacaggaattgtcacatacctcagaaaaatgcagtgcctgatggttcaattccaataagccagtctgcacatcctccaactctgggcccctttaaagttacctacaggccccttttagcagacattgtccaagcagaggacgtaaaggagctatgcaagcttttagtggtggtatcaggagaagccgccaaaacatatgctgaccggaaagcgaaggaagagagggttggcaagaaggaagatgaaagggcagaacaaaaggaagatgacagggcaggttccctagcattgacaaaccatgacagagaaggaaataatcaagatccagataaaaaagcatcaatcgatgaccattcaagcagaggaactcatacgggcaaagctaatcaagaagaatccagacctaactgcgctgatgatcagaagtccaatagacctatgtctcctggaacactagcactgatgtgtgacgaacaagcgttcgagaaaatgtgtgacgaacaagatacagtgtttacggcttctcaaaatgctgttcctcagcagacagttactgtcaaccaaaaccaatctgcactgtacgcagaacaagaaagaattgtgctgacagaattccgtgattgcctccgcaaacttgtgacatacggaagaatgaaagaggaaaggtacgccatggaaatcaaatctgaaacatctggccatcctggacagggattcggtcggtgatggagatggagagccagccagtaaacaaacagcagattccttaatcaggatggacacgaaaccaaacaaaacaaaacgctagacacaagaatccaaccggcaccatctgagcaagtaccagcgcgcccgtgacgagccctgcccctgcgcacggcgccgcgccgtccgagcctctcggtcggtcctcgacctcgagctcgaggagggaaggaaaccccgtcgtcttcgcgccatcgcgtgtgcggacccgccgccccgcgccaaagggaggtcacgcgaccgcctgcgcgccttgtctccttgcccccggtttatttgtccccgaacgctcacaacttcgcgctcgtctgcgtttgccatttctgtgcaaggtagcttgcacccatcgtgaagccgagggagcggcgacacattggtacctgctgtgctgcagtgctctcgtcctggtcggagatggacgctgaggccggcgaggcgggggtgcagcagccggccggggcggcgtccacgagcaccgcggcggtgccgttcgacaggtcgtcgtcgcggctaggcgcgccgggtgccgagagcttcgacggcgcgctcagggagctcaaggatctgcggtctcagctgcacgaagcggcggactgctgcgccaaggcgttcctcagcaccgacaagaagaagatctctactctcatgcatgcgaaggattctggagggtacaaagggttacatatgcgatgcggtggtagctgtgatcgatcacctggggacagtttcgtccaagcttgagcacaagctgcaggagaggactgaagtcgcacagacggaacgaaagatcaacttcttgaaacagaggcttttgacatgcgagcagtacgccgtttctctgaagcttttgtctgtacgaggggaccctgacgccattcgatatcatcgccgttacatctcacaatctactcaaatgtccaaactgggaaacggaatcggctcgagtgaaaatggtccacgacttccgcaaattactggctcaacagtatctggagctaccctcactctcaagccatatgatgttcaaccagccatcggaaaagaacataccgtggtatcagaaaacgttgaggacaacccaaggaccataagaaggtcattctcttttagagcagaggatgttcacgttgttctaggcgatcacaaaaagaagggcaaccatgggagtaacatcttgtcatttctcaagaaaaccaggcgataagcataagaactttgctaaagaaataaacataagaatcaatgcaccaacgggatagagtggaactgtagaggagtaccttttcccccctttggatagtcttttctttcgtggtactattggtcctaccggtcatgcagcgctttcactgtttcgcaataagtactgatatactgaaagcatttcttcaatgatatgtctaggggtaccaagatcaacctttatgaagaaggacatgtacggatgagcctatgggcttggccgagagcccaaagactcgatgatcaagactagaaggaggcctgaagtgacaaggatttcagaagcgtatatatggaaaagatcttatcaaaatagaagatatgccaaatgttctaacacttgtaacgatatagttcgattcacatacaaatttgggaccaactcggtcacatgttcaactaggtaccgagtctgtgtctatcctataactgatgtcgctccttagactataaaggagggtcaatgagtgattacgggcctgtttggttcactacctcagttgccacactttgcctaacttttctgtctaaggttagttattcaattcgaacgactaaccttaggcaaagtgtggcatatttagccacaaaccaaacaggcccatatatattctttgtaatctcacatgtctgtatatatgtgaggtcgaagtcttttag

SEQ ID NO: 75086 - DNA, 2811 bp, Zea Mays
tgctgctgctgcaggccaccggcgagagccgctgcagaacgagacggaattgagaggcacgcacgaggcggcgcgcggtgggtgatgcgtgtgggggtgggtggaaccacgcgacgaagactagagctgcttgcttggcctcctccggcgcgtcttgctgcggcgggcgcagcagataggaagctctacactagggattcggtcggtgatggagatggagagccagccagtaaacaaacagcagattccttaatcaggatggacacgaaaccaaacaaaacaaaacgctagacacaagaatccaaccggcaccatctgagcaagtaccagcgcgcccgtgacgagccctgcccctgcgcacggcgccgcgccgtccgagcctctcggtcggtcctcgacctcgagctcgaggagggaaggaaaccccgtcgtcttcgcgccatcgcgtgtgcggacccgccgccccgcgccaaagggaggtcacgcgaccgcctgcgcgccttgtctccttgcccccggtttatttgtccccgaacgctcacaacttcgcgctcgtctgcgtttgccatttctgtgcaaggtagcttgcacccatcgtgaagccgagggagcggcgacacattggtacctgctgtgctgcagtgctctcgtcctggtcggagatggacgctgaggccggcgaggcgggggtgcagcagccggccggggcggcgtccacgagcaccgcggcggtgccgttcgacaggtcgtcgtcgcggctaggcgcgccgggtgccgagagcttcgacggcgcgctcagggagctcaaggatctgcggtctcagctgcacgaagcggcggactgctgcgccaaggcgttcctcagcaccgacaagaagaagatctctactctcatgcatgcgaaggattctggagggtacaaagggttacatatgcgatgcggtggtagctgtgatcgatcacctggggacagtttcgtccaagcttgagcacaagctgcaggagaggactgaagtcgcacagacggaacgaaagatcaacttcttgaaacagaggcttttgacatgcgagcagtacgccgtttctctgaagcttttgtctgtacgaggggaccctgacgccattcgatatcatcgccgttacatctcacaatctactcaaatgtccaaactgggaaacggaatcggctcgagtgaaaatggtccacgacttccgcaaattactggctcaacagtatctggagctaccctcactctcaagccatatgatgttcaaccagccatcggaaaagaacataccgtggtatcagaaaacgttgaggacaacccaaggaccataagaaggtcattctcttttagagcagaggatgttcacgttgttctaggcgatcacaaaaagaagggcaaccatgggagtaacatcttgtcatttctcaagaaaaccaggcgataagcataagaactttgctaaagaaataaacataagaatcaatgcaccaacgggatagagtggaactgtagaggagtaccttttcccccctttggatagtcttttctttcgtggtactattggtcctaccggtcatgcagcgctttcactgtttcgcaataagtactgatatactgaaagcatttcttcaatgatatgtctaggttatcttcaacaacttatcaattctcatactcatatttaaactctactctatcaatattgcaacctacaatataaaacaatgttttgggtgactatattagtgaaccgctggacacggtcgatctaagtcctagggtcccttatgtcctagagtgctataaagaatagctattcaggacagttgagcaacattttaaggtattaggaccataccattttatttgtcaatcgataaggagaaagaggacacatgatacatacacactgcaatctggacctctctaactatgcgcacgctggctcccactcgtgtccaggtttagcatgaccatcaacttgtgtcatgctccctcttaactctctttctagtactctatgtatcctgatgttgttacactacaataacattcatcaatgtaaaagaagttttgatcttttattggtgtgccacacaatttaagaccatagttccaaggaagacatctcatacaatcatacagaacgtgattgttgaaaccacatatgtcacatatcattctatggtagtctcttgtatgatttctcaaaccacaaataagaatcaagtaaaaagtcttacttgcttgaataaatgacttgaccaaataagaatctggagctactgttaatgatatatatcaggggtaccaagatcaacctttatgaagaaggacatgtacggatgagcctatgggcttggccgagagcccaaagactcgatgatcaagactagaaggaggcctgaagtgacaaggatttcagaagcgtatatatggaaaagatcttatcaaaatagaagatatgccaaatgttctaacacttgtaacgatatagttcgattcacatacaaatttgggaccaactcggtcacatgttcaactaggtaccgagtctgtgtctatcctataactgatgtcgctccttagactataaaggagggtcaatgagtgattacgggcctgtttggttcactacctcagttgccacactttgcctaacttttctgtctaaggttagttattcaattcgaacgactaaccttaggcaaagtgtggcatatttagccacaaaccaaacaggcccatatatattctttgtaatctcacatgtctgtatatatgtgaggtcgaagtcttttag

SEQ ID NO: 75087 - DNA, 2791 bp, Zea Mays
tgctgctgctgcaggccaccggcgagagccgctgcagaacgagacggaattgagaggcacgcacgaggcggcgcgcggtgggtgatgcgtgtgggggtgggtggaaccacgcgacgaagactagagctgcttgcttggcctcctccggcgcgtcttgctgcggcgggcgcagcagatagaggaagctctacactagggattcggtcggtgatggagatggagagccagccagtaaacaaacagcagattccttaatcaggatggacacgaaaccaaacaaaacaaaacgctagacacaagaatccaaccggcaccatctgagcaagtaccagcgcgcccgtgacgagccctgcccctgcgcacggcgccgcgccgtccgagcctctcggtcggtcctcgacctcgagctcgaggagggaaggaaaccccgtcgtcttcgcgccatcgcgtgtgcggacccgccgccccgcgccaaagggaggtcacgcgaccgcctgcgcgccttgtctccttgcccccggtttatttgtccccgaacgctcacaacttcgcgctcgtctgcgtttgccatttctgtgcaaggtagcttgcacccatcgtgaagccgagggagcggcgacacattggtacctgctgtgctgcagtgctctcgtcctggtcggagatggacgctgaggccggcgaggcgggggtgcagcagccggccggggcggcgtccacgagcaccgcggcggtgccgttcgacaggtcgtcgtcgcggctaggcgcgccgggtgccgagagcttcgacggcgcgctcagggagctcaaggatctgcggtctcagctgcacgaagcggcggactgctgcgccaaggcgttcctcagcaccgacaagaagaagatgattctggagggtacaaagggttacatatgcgatgcggtggtagctgtgatcgatcacctggggacagtttcgtccaagcttgagcacaagctgcaggagaggactgaagtcgcacagacggaacgaaagatcaacttcttgaaacagaggcttttgacatgcgagcagtacgccgtttctctgaagcttttgtctgtacgaggggaccctgacgccattcgatatcatcgccgttacatctcacaatctactcaaatgtccaaactgggaaacggaatcggctcgagtgaaaatggtccacgacttccgcaaattactggctcaacagtatctggagctaccctcactctcaagccatatgatgttcaaccagccatcggaaaagaacataccgtggtatcagaaaacgttgaggacaacccaaggaccataagaaggtcattctcttttagagcagaggatgttcacgttgttctaggcgatcacaaaaagaagggcaaccatgggagtaacatcttgtcatttctcaagaaaaccaggcgataagcataagaactttgctaaagaaataaacataagaatcaatgcaccaacgggatagagtggaactgtagaggagtaccttttcccccctttggatagtcttttctttcgtggtactattggtcctaccggtcatgcagcgctttcactgtttcgcaataagtactgatatactgaaagcatttcttcaatgatatgtctaggttatcttcaacaacttatcaattctcatactcatatttaaactctactctatcaatattgcaacctacaatataaaacaatgttttgggtgactatattagtgaaccgctggacacggtcgatctaagtcctagggtcccttatgtcctagagtgctataaagaatagctattcaggacagttgagcaacattttaaggtattaggaccataccattttatttgtcaatcgataaggagaaagaggacacatgatacatacacactgcaatctggacctctctaactatgcgcacgctggctcccactcgtgtccaggtttagcatgaccatcaacttgtgtcatgctccctcttaactctctttctagtactctatgtatcctgatgttgttacactacaataacattcatcaatgtaaaagaagttttgatcttttattggtgtgccacacaatttaagaccatagttccaaggaagacatctcatacaatcatacagaacgtgattgttgaaaccacatatgtcacatatcattctatggtagtctcttgtatgatttctcaaaccacaaataagaatcaagtaaaaagtcttacttgcttgaataaatgacttgaccaaataagaatctggagctactgttaatgatatatatcaggggtaccaagatcaacctttatgaagaaggacatgtacggatgagcctatgggcttggccgagagcccaaagactcgatgatcaagactagaaggaggcctgaagtgacaaggatttcagaagcgtatatatggaaaagatcttatcaaaatagaagatatgccaaatgttctaacacttgtaacgatatagttcgattcacatacaaatttgggaccaactcggtcacatgttcaactaggtaccgagtctgtgtctatcctataactgatgtcgctccttagactataaaggagggtcaatgagtgattacgggcctgtttggttcactacctcagttgccacactttgcctaacttttctgtctaaggttagttattcaattcgaacgactaaccttaggcaaagtgtggcatatttagccacaaaccaaacaggcccatatatattctttgtaatctcacatgtctgtatatatgtgaggtcgaagtcttttag

SEQ ID NO: 75088 - DNA, 2675 bp, Zea Mays
ttcggtcggtgatggagatggagagccagccagtaaacaaacagcagattccttaatcaggatggacacgaaaccaaacaaaacaaaacgctagacacaagaatccaaccggcaccatctgagcaagtaccagcgcgcccgtgacgagccctgcccctgcgcacggcgccgcgccgtccgagcctctcggtcggtcctcgacctcgagctcgaggagggaaggaaaccccgtcgtcttcgcgccatcgcgtgtgcggacccgccgccccgcgccaaagggaggtcacgcgaccgcctgcgcgccttgtctccttgcccccggtttatttgtccccgaacgctcacaacttcgcgctcgtctgcgtttgccatttctgtgcaaggtagcttgcacccatcgtgaagccgagggagcggcgacacattggtacctgctgtgctgcagtgctctcgtcctggtcggagatggacgctgaggccggcgaggcgggggtgcagcagccggccggggcggcgtccacgagcaccgcggcggtgccgttcgacaggtcgtcgtcgcggctaggcgcgccgggtgccgagagcttcgacggcgcgctcagggagctcaaggatctgcggtctcagctgcacgaagcggcggactgctgcgccaaggcgttcctcagcaccgacaagaagaagatgattctggagggtacaaagggttacatatgcgatgcggtggtagctgtgatcgatcacctggggacagtttcgtccaagcttgagcacaagctgcaggagaggactgaagtcgcacagacggaacgaaagatcaacttcttgaaacaggtgatcttcggaccagagcttcattcttctctgtcactgcgattttatcaggagatcagcatagacatctgcatgcggcaaggaggcttttgacatgcgagcagtacgccgtttctctgaagcttttgtctgtacgaggggaccctgacgccattcgatatcatcgccgttacatctcacaatctactcaaatgtccaaactgggaaacggaatcggctcgagtgaaaatggtccacgacttccgcaaattactggctcaacagtatctggagctaccctcactctcaagccatatgatgttcaaccagccatcggaaaagaacataccgtggtatcagaaaacgttgaggacaacccaaggaccataagaaggtcattctcttttagagcagaggatgttcacgttgttctaggcgatcacaaaaagaagggcaaccatgggagtaacatcttgtcatttctcaagaaaaccaggcgataagcataagaactttgctaaagaaataaacataagaatcaatgcaccaacgggatagagtggaactgtagaggagtaccttttcccccctttggatagtcttttctttcgtggtactattggtcctaccggtcatgcagcgctttcactgtttcgcaataagtactgatatactgaaagcatttcttcaatgatatgtctaggttatcttcaacaacttatcaattctcatactcatatttaaactctactctatcaatattgcaacctacaatataaaacaatgttttgggtgactatattagtgaaccgctggacacggtcgatctaagtcctagggtcccttatgtcctagagtgctataaagaatagctattcaggacagttgagcaacattttaaggtattaggaccataccattttatttgtcaatcgataaggagaaagaggacacatgatacatacacactgcaatctggacctctctaactatgcgcacgctggctcccactcgtgtccaggtttagcatgaccatcaacttgtgtcatgctccctcttaactctctttctagtactctatgtatcctgatgttgttacactacaataacattcatcaatgtaaaagaagttttgatcttttattggtgtgccacacaatttaagaccatagttccaaggaagacatctcatacaatcatacagaacgtgattgttgaaaccacatatgtcacatatcattctatggtagtctcttgtatgatttctcaaaccacaaataagaatcaagtaaaaagtcttacttgcttgaataaatgacttgaccaaataagaatctggagctactgttaatgatatatatcaggggtaccaagatcaacctttatgaagaaggacatgtacggatgagcctatgggcttggccgagagcccaaagactcgatgatcaagactagaaggaggcctgaagtgacaaggatttcagaagcgtatatatggaaaagatcttatcaaaatagaagatatgccaaatgttctaacacttgtaacgatatagttcgattcacatacaaatttgggaccaactcggtcacatgttcaactaggtaccgagtctgtgtctatcctataactgatgtcgctccttagactataaaggagggtcaatgagtgattacgggcctgtttggttcactacctcagttgccacactttgcctaacttttctgtctaaggttagttattcaattcgaacgactaaccttaggcaaagtgtggcatatttagccacaaaccaaacaggcccatatatattctttgtaatctcacatgtctgtatatatgtgaggtcgaagtcttttag

SEQ ID NO: 75089 - DNA, 2617 bp, Zea Mays
aaacaaaacgctagacacaagaatccaaccggcaccatctgagcaagtaccagcgcgcccgtgacgagccctgcccctgcgcacggcgccgcgccgtccgagcctctcggtcggtcctcgacctcgagctcgaggagggaaggaaaccccgtcgtcttcgcgccatcgcgtgtgcggacccgccgccccgcgccaaagggaggtcacgcgaccgcctgcgcgccttgtctccttgcccccggtttatttgtccccgaacgctcacaacttcgcgctcgtctgcgtttgccatttctgtgcaaggtagcttgcacccatcgtgaagccgagggagcggcgacacattggtacctgctgtgctgcagtgctctcgtcctggtcggagatggacgctgaggccggcgaggcgggggtgcagcagccggccggggcggcgtccacgagcaccgcggcggtgccgttcgacaggtcgtcgtcgcggctaggcgcgccgggtgccgagagcttcgacggcgcgctcagggagctcaaggatctgcggtctcagctgcacgaagcggcggactgctgcgccaaggcgttcctcagcaccgacaagaagaagatctctactctcatgcatgcgaaggattctggagggtacaaagggttacatatgcgatgcggtggtagctgtgatcgatcacctggggacagtttcgtccaagcttgagcacaagctgcaggagaggactgaagtcgcacagacggaacgaaagatcaacttcttgaaacaggtgatcttcggaccagagcttcattcttctctgtcactgcgattttatcaggagatcagcatagacatctgcatgcggcaaggaggcttttgacatgcgagcagtacgccgtttctctgaagcttttgtctgtacgaggggaccctgacgccattcgatatcatcgccgttacatctcacaatctactcaaatgtccaaactgggaaacggaatcggctcgagtgaaaatggtccacgacttccgcaaattactggctcaacagtatctggagctaccctcactctcaagccatatgatgttcaaccagccatcggaaaagaacataccgtggtatcagaaaacgttgaggacaacccaaggaccataagaaggtcattctcttttagagcagaggatgttcacgttgttctaggcgatcacaaaaagaagggcaaccatgggagtaacatcttgtcatttctcaagaaaaccaggcgataagcataagaactttgctaaagaaataaacataagaatcaatgcaccaacgggatagagtggaactgtagaggagtaccttttcccccctttggatagtcttttctttcgtggtactattggtcctaccggtcatgcagcgctttcactgtttcgcaataagtactgatatactgaaagcatttcttcaatgatatgtctaggttatcttcaacaacttatcaattctcatactcatatttaaactctactctatcaatattgcaacctacaatataaaacaatgttttgggtgactatattagtgaaccgctggacacggtcgatctaagtcctagggtcccttatgtcctagagtgctataaagaatagctattcaggacagttgagcaacattttaaggtattaggaccataccattttatttgtcaatcgataaggagaaagaggacacatgatacatacacactgcaatctggacctctctaactatgcgcacgctggctcccactcgtgtccaggtttagcatgaccatcaacttgtgtcatgctccctcttaactctctttctagtactctatgtatcctgatgttgttacactacaataacattcatcaatgtaaaagaagttttgatcttttattggtgtgccacacaatttaagaccatagttccaaggaagacatctcatacaatcatacagaacgtgattgttgaaaccacatatgtcacatatcattctatggtagtctcttgtatgatttctcaaaccacaaataagaatcaagtaaaaagtcttacttgcttgaataaatgacttgaccaaataagaatctggagctactgttaatgatatatatcaggggtaccaagatcaacctttatgaagaaggacatgtacggatgagcctatgggcttggccgagagcccaaagactcgatgatcaagactagaaggaggcctgaagtgacaaggatttcagaagcgtatatatggaaaagatcttatcaaaatagaagatatgccaaatgttctaacacttgtaacgatatagttcgattcacatacaaatttgggaccaactcggtcacatgttcaactaggtaccgagtctgtgtctatcctataactgatgtcgctccttagactataaaggagggtcaatgagtgattacgggcctgtttggttcactacctcagttgccacactttgcctaacttttctgtctaaggttagttattcaattcgaacgactaaccttaggcaaagtgtggcatatttagccacaaaccaaacaggcccatatatattctttgtaatctcacatgtctgtatatatgtgaggtcgaagtcttttag

SEQ ID NO: 75090 - DNA, 2090 bp, Zea Mays
tacgctttaccataatctaatttatataatataggatagaaataagtaccgtaagttgataaaacgaattttaattgggaaatttggatccataccattaaaagatcactattttggatccataccattactatctcacctacatgtgggtccacatgagtcaatgacatgtggggtctatggtatatatctaaagtttagattttttaatggtatagatccaattgttccattttaatttgggacactatagatgcatttttggcactattggagatgtcttaggtcctgggcatcctagctcgtgcgtctctcacccggtacctgctcctcggcgcctccccaaccaagcctccgcaccttcctcccgacgcgcccctcatggcgaggaggcgctgctgatgcctcccggcgtcggattggacgcggcggccacgacacctagccgcttgcggtggtgctcgccgagctctaggcgcctaatccgccgacgctgctcctcggatcctccccgagagattcaggcctcgtctcgtctcgtcctgcctagttcaatcgacttccccaagtgcccgacccctacaaggtagagacggagtggcgcgccagcggccacgccggcgaagagaggacgacagcgtgcaagaagagaaggcctgtgtcaggggcagctataggtggcaggtgcaaagataggcaacaagtgttcaacaacacgactgtggatcaattgacctgcatttcagcttttcagttgaggattaaagtggagctttaagaagcttgaaaattgacattatctcaataatacattgaagtgcaagatgccaaaaataaagaatctctctaatgcatgcaaagtatcattttctccggaaggtcccatatctgaagaggtgcttgagagagtccgtgcactgttagatgagataagacctctagatgttggcctagataatgaagcacaaattgcacgcaattggagtagtactacgcgtccatcaaatgggagacgaggacgtaatggggctaaccagttcactgctccaatcaaatatttgcacattcatgaatgtgaaagtttctctatgggtatattttgtatgccaccttcttcagttattccacttcataatcatcctggaatgacagtacttagcaagcttctttatggaagactgcatgctgagtcttatgactgggttgatgtacctgatcatcctattgatcaattgcaaccaaggccagccaagcttgttaaagattgtgaaatgacggctccagagacaactattctataccctaatgcaggtggtaacatccacacattcagagccatcacaccttgtgctctcttcgacgtcctttctccgccatactccgctgaggatgggcggcactgttcatacttccgcaagtctcaaatgaatcaaccatctgttgttttgcctgctgagatagatagcacacaagtagtttggttggaggagttggaggaccatcagcccccagaaggctttgttgttgcgagaggtatgtataaaggccctgtaattaggagataatttgctttggggcacagaatccaccaaactgcaaatcagctgaaagacgatattgcaagcatcctcaggtcatgtgcagcctacggtttactttgtacatgtcaaagtgacctgtgataattcaacagcagttttacaggacaagaatggatgtttttttgtttggttgcttttttaattgtgtcccactgctgtagtatctctgacctagttatggagctcttatcagaccaagaccgtggagcacctacttttgagcatagtctagcatattgtcatgatgtattgatgtactagggacatcaatggacaaccttttccatttggtgatttcagaaagagtttggttggggctaccattttgtctgtgtaatagcaccattactatttttgggcaagactgtaaattacgggggaggaactgtaataatatcgttagatttatcatgaaatatattttcacgatatacctatcatttttaataaaatcttaaacatcaatgttttttcataaactaagtcaaa

SEQ ID NO: 75091 - DNA, 2139 bp, Zea Mays
tacgctttaccataatctaatttatataatataggatagaaataagtaccgtaagttgataaaacgaattttaattgggaaatttggatccataccattaaaagatcactattttggatccataccattactatctcacctacatgtgggtccacatgagtcaatgacatgtggggtctatggtatatatctaaagtttagattttttaatggtatagatccaattgttccattttaatttgggacactatagatgcatttttggcactattggagatgtcttaggtcctgggcatcctagctcgtgcgtctctcacccggtacctgctcctcggcgcctccccaaccaagcctccgcaccttcctcccgacgcgcccctcatggcgaggaggcgctgctgatgcctcccggcgtcggattggacgcggcggccacgacacctagccgcttgcggtggtgctcgccgagctctaggcgcctaatccgccgacgctgctcctcggatcctccccgagagattcaggcctcgtctcgtctcgtcctgcctagcagttcaatcgacttccccaagtgcccgacccctacaaggtagtgcgcgtgcgtcgccccaaccccttgcatgcgctgacgctaaccctatctaggagacggagtggcgcgccagcggccacgccggcgaagagaggacgacagcgtgcaagaagagaaggcctgtgtcaggggcagctataggtgcaaagataggcaacaagtgttcaacaacacgactgtggatcaattgacctgcatttcagcttttcagttgaggattaaagtggagctttaagaagcttgaaaattgacattatctcaataatacattgaagtgcaagatgccaaaaataaagaatctctctaatgcatgcaaagtatcattttctccggaaggtcccatatctgaagaggtgcttgagagagtccgtgcactgttagatgagataagacctctagatgttggcctagataatgaagcacaaattgcacgcaattggagtagtactacgcgtccatcaaatgggagacgaggacgtaatggggctaaccagttcactgctccaatcaaatatttgcacattcatgaatgtgaaagtttctctatgggtatattttgtatgccaccttcttcagttattccacttcataatcatcctggaatgacagtacttagcaagcttctttatggaagactgcatgctgagtcttatgactgggttgatgtacctgatcatcctattgatcaattgcaaccaaggccagccaagcttgttaaagattgtgaaatgacggctccagagacaactattctataccctaatgcaggtggtaacatccacacattcagagccatcacaccttgtgctctcttcgacgtcctttctccgccatactccgctgaggatgggcggcactgttcatacttccgcaagtctcaaatgaatcaaccatctgttgttttgcctgctgagatagatagcacacaagtagtttggttggaggagttggaggaccatcagcccccagaaggctttgttgttgcgagaggtatgtataaaggccctgtaattaggagataatttgctttggggcacagaatccaccaaactgcaaatcagctgaaagacgatattgcaagcatcctcaggtcatgtgcagcctacggtttactttgtacatgtcaaagtgacctgtgataattcaacagcagttttacaggacaagaatggatgtttttttgtttggttgcttttttaattgtgtcccactgctgtagtatctctgacctagttatggagctcttatcagaccaagaccgtggagcacctacttttgagcatagtctagcatattgtcatgatgtattgatgtactagggacatcaatggacaaccttttccatttggtgatttcagaaagagtttggttggggctaccattttgtctgtgtaatagcaccattactatttttgggcaagactgtaaattacgggggaggaactgtaataatatcgttagatttatcatgaaatatattttcacgatatacctatcatttttaataaaatcttaaacatcaatgttttttcataaactaagtcaaa

SEQ ID NO: 75092 - DNA, 2093 bp, Zea Mays
tacgctttaccataatctaatttatataatataggatagaaataagtaccgtaagttgataaaacgaattttaattgggaaatttggatccataccattaaaagatcactattttggatccataccattactatctcacctacatgtgggtccacatgagtcaatgacatgtggggtctatggtatatatctaaagtttagattttttaatggtatagatccaattgttccattttaatttgggacactatagatgcatttttggcactattggagatgtcttaggtcctgggcatcctagctcgtgcgtctctcacccggtacctgctcctcggcgcctccccaaccaagcctccgcaccttcctcccgacgcgcccctcatggcgaggaggcgctgctgatgcctcccggcgtcggattggacgcggcggccacgacacctagccgcttgcggtggtgctcgccgagctctaggcgcctaatccgccgacgctgctcctcggatcctccccgagagattcaggcctcgtctcgtctcgtcctgcctagcagttcaatcgacttccccaagtgcccgacccctacaaggtagagacggagtggcgcgccagcggccacgccggcgaagagaggacgacagcgtgcaagaagagaaggcctgtgtcaggggcagctataggtggcaggtgcaaagataggcaacaagtgttcaacaacacgactgtggatcaattgacctgcatttcagcttttcagttgaggattaaagtggagctttaagaagcttgaaaattgacattatctcaataatacattgaagtgcaagatgccaaaaataaagaatctctctaatgcatgcaaagtatcattttctccggaaggtcccatatctgaagaggtgcttgagagagtccgtgcactgttagatgagataagacctctagatgttggcctagataatgaagcacaaattgcacgcaattggagtagtactacgcgtccatcaaatgggagacgaggacgtaatggggctaaccagttcactgctccaatcaaatatttgcacattcatgaatgtgaaagtttctctatgggtatattttgtatgccaccttcttcagttattccacttcataatcatcctggaatgacagtacttagcaagcttctttatggaagactgcatgctgagtcttatgactgggttgatgtacctgatcatcctattgatcaattgcaaccaaggccagccaagcttgttaaagattgtgaaatgacggctccagagacaactattctataccctaatgcaggtggtaacatccacacattcagagccatcacaccttgtgctctcttcgacgtcctttctccgccatactccgctgaggatgggcggcactgttcatacttccgcaagtctcaaatgaatcaaccatctgttgttttgcctgctgagatagatagcacacaagtagtttggttggaggagttggaggaccatcagcccccagaaggctttgttgttgcgagaggtatgtataaaggccctgtaattaggagataatttgctttggggcacagaatccaccaaactgcaaatcagctgaaagacgatattgcaagcatcctcaggtcatgtgcagcctacggtttactttgtacatgtcaaagtgacctgtgataattcaacagcagttttacaggacaagaatggatgtttttttgtttggttgcttttttaattgtgtcccactgctgtagtatctctgacctagttatggagctcttatcagaccaagaccgtggagcacctacttttgagcatagtctagcatattgtcatgatgtattgatgtactagggacatcaatggacaaccttttccatttggtgatttcagaaagagtttggttggggctaccattttgtctgtgtaatagcaccattactatttttgggcaagactgtaaattacgggggaggaactgtaataatatcgttagatttatcatgaaatatattttcacgatatacctatcatttttaataaaatcttaaacatcaatgttttttcataaactaagtcaaa

SEQ ID NO: 75093 - DNA, 1693 bp, Zea Mays
tacgctttaccataatctaatttatataatataggatagaaataagtaccgtaagttgataaaacgaattttaattgggaaatttggatccataccattaaaagatcactattttggatccataccattactatctcacctacatgtgggtccacatgagtcaatgacatgtggggtctatggtatatatctaaagtttagattttttaatggtatagatccaattgttccattttaatttgggacactatagatgcatttttggcactattggagatgtcttaggtcctgggcatcctagctcgtgcgtctctcacccggtacctgctcctcggcgcctccccaaccaagcctccgcaccttcctcccgacgcgcccctcatggcgaggaggcgctgctgatgcctcccggcgtcggattggacgcggcggccacgacacctagccgcttgcggtggtgctcgccgagctctaggcgcctaatccgccgacgctgctcctcggatcctccccgagagattcaggcctcgtctcgtctcgtcctgcctagttcaatcgacttccccaagtgcccgacccctacaaggtagtgcgcgtgcgtcgccccaaccccttgcatgcgctgacgctaaccctatctaggagacggagtggcgcgccagcggccacgccggcgaagagaggacgacagcgtgcaagaagagaaggcctgtgtcaggggcagctataggtggcaggtgcaaagataggcaacaagtgttcaacaacacgactgtggatcaattgacctgcatttcagcttttcagttgaggattaaagtggagctttaagaagcttgaaaattgacattatctcaataatacattgaagtgcaagatgccaaaaataaagaatctctctaatgcatgcaaagtatcattttctccggaaggtcccatatctgaagaggtgcttgagagagtccgtgcactgttagatgagataagacctctagatgttggcctagataatgaagcacaaattgcacgcaattggagtagtactacgcgtccatcaaatgggagacgaggacgtaatggggctaaccagttcactgctccaatcaaatatttgcacattcatgaatgtgaaagtttctctatgggtatattttgtatgccaccttcttcagttattccacttcataatcatcctggaatgacagtacttagcaagcttctttatggaagactgcatgctgagtcttatgactgggttgatgtacctgatcatcctattgatcaattgcaaccaaggccagccaagcttgttaaagattgtgaaatgacggctccagagacaactattctataccctaatgcaggtggtaacatccacacattcagagccatcacaccttgtgctctcttcgacgtcctttctccgccatactccgctgaggatgggcggcactgttcatacttccgcaagtctcaaatgaatcaaccatctgttgttttgcctgctgagatagatagcacacaagtagtttggttggaggagttggaggaccatcagcccccagaaggctttgttgttgcgagaggtgatgatacaatggaatccataattgacgccttgtgatccagctggggccgtacgtgtagccgtgtgcgccatatcatcggctgggcggacgcagccggtcatggg

SEQ ID NO: 75094 - DNA, 1513 bp, Zea Mays
tacgctttaccataatctaatttatataatataggatagaaataagtaccgtaagttgataaaacgaattttaattgggaaatttggatccataccattaaaagatcactattttggatccataccattactatctcacctacatgtgggtccacatgagtcaatgacatgtggggtctatggtatatatctaaagtttagattttttaatggtatagatccaattgttccattttaatttgggacactatagatgcatttttggcactattggagatgtcttaggtcctgggcatcctagctcgtgcgtctctcacccggtacctgctcctcggcgcctccccaaccaagcctccgcaccttcctcccgacgcgcccctcatggcgaggaggcgctgctgatgcctcccggcgtcggattggacgcggcggccacgacacctagccgcttgcggtggtgctcgccgagctctaggcgcctaatccgccgacgctgctcctcggatcctccccgagagattcaggcctcgtctcgtctcgtcctgcctaggtggcaggtgcaaagataggcaacaagtgttcaacaacacgactgtggatcaattgacctgcatttcagcttttcagttgaggattaaagtggagctttaagaagcttgaaaattgacattatctcaataatacattgaagtgcaagatgccaaaaataaagaatctctctaatgcatgcaaagtatcattttctccggaaggtcccatatctgaagaggtgcttgagagagtccgtgcactgttagatgagataagacctctagatgttggcctagataatgaagcacaaattgcacgcaattggagtagtactacgcgtccatcaaatgggagacgaggacgtaatggggctaaccagttcactgctccaatcaaatatttgcacattcatgaatgtgaaagtttctctatgggtatattttgtatgccaccttcttcagttattccacttcataatcatcctggaatgacagtacttagcaagcttctttatggaagactgcatgctgagtcttatgactgggttgatgtacctgatcatcctattgatcaattgcaaccaaggccagccaagcttgttaaagattgtgaaatgacggctccagagacaactattctataccctaatgcaggtggtaacatccacacattcagagccatcacaccttgtgctctcttcgacgtcctttctccgccatactccgctgaggatgggcggcactgttcatacttccgcaagtctcaaatgaatcaaccatctgttgttttgcctgctgagatagatagcacacaagtagtttggttggaggagttggaggaccatcagcccccagaaggctttgttgttgcgagaggtgatgatacaatggaatccataattgacgccttgtgatccagctggggccgtacgtgtagccgtgtgcgccatatcatcggctgggcggacgcagccggtcatggg

SEQ ID NO: 75095 - DNA, 2321 bp, Zea Mays
ggaaccgagcggcacaactctctcgcaggcttctctcccctctgcgcccttcccgcagcaccctgctcgcagcgctctctccacaggactgctccgcgcgcgccgcccccatcgccggcaaggcggcggtgctgctgcatattctcccggtcccccctccggagccaccctccccttctccgggaccttgagtaactttggagtaccagtgatgcaaagggacactagctctagcgatgtttctgcttctcatgtagggcgtgtaagacgtcgcaaacatccatctgaggctaccacagatgggaatagagctaatggacaaccgttgcttgtcaatgatcagaacaagtataaatcaatgcttatccgtacatattctacagtatggatgattggaggctttgcctttattatttatgtgggtcatctatatatctgggctatggtggttgtgattcaaatatacatggcaagagaacttttcaacctactcagaaaatccagtgaagagaaacaacttcctgggttcaggctactgaattggcacttctttttcacggcaatgctgtacacttatgggcgctttcttagtcggcagcttgtgaatacagtaacttcagatcacttgctttataaggtcgttagtggcctaataaagtatcagatgtttatctgttattttctttatattgcaggttttgtatggtttattttgactctcaagaaaaagacatataagtaccagttcaaacagtatgcctggacgcacatgatacttctaacggtttttgcacagtctgctttcactgtggcaaacatatttgaagggatattctggtttcttttgcctgcttcacttattgtgatcaacgatatatttgcttatttatttgggttctttcttgggagaacaccattaatcaagttgtccccaaagaaaacatgggaaggttttattggtgcatccgtgacaactatcatctctgcatttctgttagcaaatgtaatgggccgtttccaatggttgacatgcccaagaaaggatctgtcaactgggtggctttattgtgatcctggtccaatgtttaagccagagcattactcattgggagagtcggtgccacattggaatattcaggtagatactttgacaaatataacagatatcgtctccatgatatatgggcactacatgtgatgacatcatatttatggaatcagaaaatagccatgattgatcatagaactcttctgttaatcttttggcgggacgggagaggctgacagagaggcttaagaaattaatgaaggttttggacccaagcggaaaaggaaggttttgtagatattttactctgccagagtgtcattgatataacctctcttctattaatgtggctgtgtagaacacagtttaaataacttgcaaccggataaaagataaccatcttgcaatggaacacatcttattataaacaacggaataagacagtgagttgtatgtcacacacatgttttttttctcggacacgcatgagagctgcgtatcattgtgttaagaagaaagtgtggggataagaaccccagtacaacacacagtccacacacaaatctttgattacatgatctcccgtgaacatgagcaaaaaagaagttcccatggaaagatctagccattatgcctgtgcagtggcatgctttagccctaggtttatttgcgtcaataatagcaccattcggaggattttttgcgagtggcttcaagagggctttcaaaataaaggattttggtgacagcatacctgggcatggtggaattactgatagaatggattgccaaatggttatggcagtgtttgcatacatataccaccagtcattcattgcacctcagaacttctctgttgagataatcttggatcagattctaagaaacctgacctatgaggagcaaaaatacctatatgaacaacttggggaaatgttccatgagaggcaattagggcaaaactgagagttagcgtgcttatgaaatgcatgataatttcttgtgtatttaagcattctgctcattatgtagctatagtccttgtccaaacctttgtatagaatggtagaatggagagaatgattgggttttaggtgctttattcactcttcactgacgctgcttaattcactccccttgtcatgatttctgcactctttgtaaaaggggacctgggaagttttattgtttcttatcacttcgtggtgctgtcctcagatcatatattcgaggattcacagaatataagatgaagcagcagtgctagttctta

SEQ ID NO: 75096 - DNA, 3788 bp, Zea Mays
ccgagcggcacaactctctcgcaggcttctctcccctctgcgcccttcccgcagcaccctgctcgcagcgctctctccacaggactgctccgcgcgcgccgcccccatcgccggcaaggcggcggtgctgctgcatattctcccggtcccccctccggagccaccctccccttctccgggaccttgagtaactttggagtaccagtgatgcaaagggacactagctctagcgatgtttctgcttctcatgtagggcgtgtaagacgtcgcaaacatccatctgaggctaccacagatgggaatagagctaatggacaaccgttgcttgtcaatgatcagaacaagtataaatcaatgcttatccgtacatattctacagtatggatgattggaggctttgcctttattatttatgtgggtcatctatatatctgggctatggtggttgtgattcaaatatacatggcaagagaacttttcaacctactcagaaaatccagtgaagagaaacaacttcctgggttcaggctactgaattggcacttctttttcacggcaatgctgtacacttatgggcgctttcttagtcggcagcttgtgaatacagtaacttcagatcacttgctttataaggtcgttagtggcctaataaagtatcagatgtttatctgttattttctttatattgcaggttttgtatggtttattttgactctcaagaaaaagacatataagtaccagttcaaacagtatgcctggacgcacatgatacttctaacggtttttgcacagtctgctttcactgtggcaaacatatttgaagggatattctggtttcttttgcctgcttcacttattgtgatcaacgatatatttgcttatttatttgggttctttcttgggagaacaccattaatcaagttgtccccaaagaaaacatgggaaggttttattggtgcatccgtgacaactatcatctctgcatttctgttagcaaatgtaatgggccgtttccaatggttgacatgcccaagaaaggatctgtcaactgggtggctttattgtgatcctggtccaatgtttaagccagagcattactcattgggagagtcggtgccacattgggtgaggaaaacagttcttttgctcaatttattcattttaatattatttcttgtactaagtctctaagatggcatctttgcaatgttcccaatcataaaaaattcctcaaagtaatgcattatggtcttttgaaccttatactagctcgtattgcacttagacattttgcatggttgttgattgtaatccctaatcaataagtcattccaaaagaaacaaagttttccttccagattatttttctgtgcattgctatggaaaaggctggctcttaggctatctccagtagcttattcatccatatttatcatttcaaactacatttttgtaaacaatgcagtccatagtgcaaaaccatgttttgcacgaccatatgcacgatatgctgacaatagccttaatatatactccctccgttctttttttttgtcgcattttagttcaaaaatgaactagcggacgacaaatattcaagaacggagatagtattgaacttgaaaaaaagggatgaaagtatgtattaactcagcaatcctttttgatatagcatattgtagattgtagaataatactaatgcatttgtgttcactcagaatattcaggtagatactttgacaaatataacagatatcgtctccatgatatatgggcactacatgtgatgacatcatatttatggaatcagaaaatagccatgattgatcatagaactcttctgttaatcttttggcgggacgggagaggctgacagagaggcttaagaaattaatgaaggttttggacccaagcggaaaaggaaggttttgtagatattttactctgccagagtgtcattgatataacctctcttctattaatgtggctgtgtagaacacagtttaaataacttgcaaccggataaaagataaccatcttgcaatggaacacatcttattataaacaacggaataagacagtgagttgtatgtcacacacatgttttttttctcggacacgcatgagagctgcgtatcattgtgttaagaagaaagtgtggggataagaaccccagtacaacacacagtccacacacaaatctttgattacatgatctcccgtgaacatgagcaaaaaagaaggtattgtccccattgccaacttccgcggccagtgcaaaactactgttctaaaaaaaatatagacaaagcacgtgttctgagtagcatagattttaagaacagtagtagacaatgatttgtctttgtttttttgaattgggtactctctgaaatcaataataagatcaagtctagttcttgatgatagatcaatggagaagttacttcgatatgggccatatggctgcaccatggtgaaacaatcataatcatgcccctagcttatttctaaattctaataaagaactaagggcatgtttggttccatgagacaacatttagtccctcttttttagtcctaaattaccaaaaataggactaaagagagaggaggaaatctgatttattctcttttatttcctatatttagtaatttagggactaaaatagactaaaagtgagggactaaagtttagtcccatgaaaccaaacaacccctaagtctaactcagttggtgggaggtgtacgtgtacttactcaccaaccaggttcgattccttcaaacttgaactcaggtgcttatttcttcttatatgcaataccacttagttcctcctagttggttgattttactgagtctgatgttctcaactggaaaggcagattgagggtttgctcgattaattttaccagataatatcatctcgtgttttttttatttactagtgttatagatattacaattactgatatttactctactgcatcatcattggttttgcgttatccttttttagatgtttgattgtgtactctatcatcattggttttgcgttatctctttagagtttctagatgtttgatttgtactctgtttgattacgtgtctcttaacagttcccatggaaagatctagccattatgcctgtgcagtggcatgctttagccctaggtttatttgcgtcaataatagcaccattcggaggattttttgcgagtggcttcaagagggctttcaaaataaaggattttggtgacagcatacctgggcatggtggaattactgatagaatggattgccaaatggttatggcagtgtttgcatacatataccaccagtcattcattgcacctcagaacttctctgttgagataatcttggatcagattctaagaaacctgacctatgaggagcaaaaatacctatatgaacaacttggggaaatgttccatgagaggcaattagggcaaaactgagagttagcgtgcttatgaaatgcatgataatttcttgtgtatttaagcattctgctcattatgtagctatagtccttgtccaaacctttgtatagaatggtagaatggagagaatgattgggttttaggtgctttattcactcttcactgacgctgcttaattcactccccttgtcatgatttctgcactctttgtaaaaggggacctgggaagttttattgtttcttatcacttcgtggtgctgtcctcagatcatatattcgaggattcacagaatataagatgaagcagcagtgctagttctta

SEQ ID NO: 75097 - DNA, 1170 bp, Zea Mays
caactctctcgcaggcttctctcccctctgcgcccttcccgcagcaccctgctcgcagcgctctctccacaggactgctccgcgcgcgccgcccccatcgccggcaaggcggcggtgctgctgcatattctcccggtcccccctccggagccaccctccccttctccgggaccttgagtaactttggagtaccagtgatgcaaagggacactagctctagcgatgtttctgcttctcatgtagggcgtgtaagacgtcgcaaacatccatctgaggctaccacagatgggaatagagctaatggacaaccgttgcttgtcaatgatcagaacaagtataaatcaatgcttatccgtacatattctacagtatggatgattggaggctttgcctttattatttatgtgggtcatctatatatctgggctatggtggttgtgattcaaatatacatggcaagagaacttttcaacctactcagaaaatccagtgaagagaaacaacttcctgggttcaggctactgaattggcacttctttttcacggcaatgctgtacacttatgggcgctttcttagtcggcagcttgtgaatacagtaacttcagatcacttgctttataaggtcgttagtggcctaataaagtatcagatgtttatctgttattttctttatattgcaggttttgtatggtttattttgactctcaagaaaaagacatataagtaccagttcaaacagtatgcctggacgcacatgatacttctaacggtttttgcacagtctgctttcactgtggcaaacatatttgaagggatattctggtttcttttgcctgcttcacttattgtgatcaacgatatatttgcttatttatttgggttctttcttgggagaacaccattaatcaagttgtccccaaagaaaacatgggaaggttttattggtgcatccgtgacaactatcatctctgcatttctgttagcaaatgtaatgggccgtttccaatggttgacatgcccaagaaaggatctgtcaactgggtggctttattgtgatcctggtccaatgtttaagccagagcattactcattgggagagtcggtgccacattggtccatagtgcaaaaccatgttttgcacgaccatatgcacgatatgctgacaatag

SEQ ID NO: 75098 - DNA, 1724 bp, Zea Mays
caactctctcgcaggcttctctcccctctgcgcccttcccgcagcaccctgctcgcagcgctctctccacaggactgctccgcgcgcgccgcccccatcgccggcaaggcggcggtgctgctgcatattctcccggtcccccctccggagccaccctccccttctccgggaccttgagtaactttggagtaccagtgatgcaaagggacactagctctagcgatgtttctgcttctcatgtagggcgtgtaagacgtcgcaaacatccatctgaggctaccacagatgggaatagagctaatggacaaccgttgcttgtcaatgatcagaacaagtataaatcaatgcttatccgtacatattctacagtatggatgattggaggctttgcctttattatttatgtgggtcatctatatatctgggctatggtggttgtgattcaaatatacatggcaagagaacttttcaacctactcagaaaatccagtgaagagaaacaacttcctgggttcaggctactgaattggcacttctttttcacggcaatgctgtacacttatgggcgctttcttagtcggcagcttgtgaatacagtaacttcagatcacttgctttataaggttttgtatggtttattttgactctcaagaaaaagacatataagtaccagttcaaacagtatgcctggacgcacatgatacttctaacggtttttgcacagtctgctttcactgtggcaaacatatttgaagggatattctggtttcttttgcctgcttcacttattgtgatcaacgatatatttgcttatttatttgggttctttcttgggagaacaccattaatcaagttgtccccaaagaaaacatgggaaggttttattggtgcatccgtgacaactatcatctctgcatttctgttagcaaatgtaatgggccgtttccaatggttgacatgcccaagaaaggatctgtcaactgggtggctttattgtgatcctggtccaatgtttaagccagagcattactcattgggagagtcggtgccacattggttcccatggaaagatctagccattatgcctgtgcagtggcatgctttagccctaggtttatttgcgtcaataatagcaccattcggaggattttttgcgagtggcttcaagagggctttcaaaataaaggattttggtgacagcatacctgggcatggtggaattactgatagaatggattgccaaatggttatggcagtgtttgcatacatataccaccagtcattcattgcacctcagaacttctctgttgagataatcttggatcagattctaagaaacctgacctatgaggagcaaaaatacctatatgaacaacttggggaaatgttccatgagaggcaattagggcaaaactgagagttagcgtgcttatgaaatgcatgataatttcttgtgtatttaagcattctgctcattatgtagctatagtccttgtccaaacctttgtatagaatggtagaatggagagaatgattgggttttaggtgctttattcactcttcactgacgctgcttaattcactccccttgtcatgatttctgcactctttgtaaaaggggacctgggaagttttattgtttcttatcacttcgtggtgctgtcctcagatcatatattcgaggattcacagaatataagatgaagcagcagtgctagttctta

SEQ ID NO: 75099 - DNA, 1637 bp, Zea Mays
caaggccgccagtagacctttttttaaactaagtaactttggagtaccagtgatgcaaagggacactagctctagcgatgtttctgcttctcatgtagggcgtgtaagacgtcgcaaacatccatctgaggctaccacagatgggaatagagctaatggacaaccgttgcttgtcaatgatcagaacaagtataaatcaatgcttatccgtacatattctacagtatggatgattggaggctttgcctttattatttatgtgggtcatctatatatctgggctatggtggttgtgattcaaatatacatggcaagagaacttttcaacctactcagaaaatccagtgaagagaaacaacttcctgggttcaggctactgaattggcacttctttttcacggcaatgctgtacacttatgggcgctttcttagtcggcagcttgtgaatacagtaacttcagatcacttgctttataaggtcgttagtggcctaataaagtatcagatgtttatctgttattttctttatattgcaggttttgtatggtttattttgactctcaagaaaaagacatataagtaccagttcaaacagtatgcctggacgcacatgatacttctaacggtttttgcacagtctgctttcactgtggcaaacatatttgaagggatattctggtttcttttgcctgcttcacttattgtgatcaacgatatatttgcttatttatttgggttctttcttgggagaacaccattaatcaagttgtccccaaagaaaacatgggaaggttttattggtgcatccgtgacaactatcatctctgcatttctgttagcaaatgtaatgggccgtttccaatggttgacatgcccaagaaaggatctgtcaactgggtggctttattgtgatcctggtccaatgtttaagccagagcattactcattgggagagtcggtgccacattggttcccatggaaagatctagccattatgcctgtgcagtggcatgctttagccctaggtttatttgcgtcaataatagcaccattcggaggattttttgcgagtggcttcaagagggctttcaaaataaaggattttggtgacagcatacctgggcatggtggaattactgatagaatggattgccaaatggttatggcagtgtttgcatacatataccaccagtcattcattgcacctcagaacttctctgttgagataatcttggatcagattctaagaaacctgacctatgaggagcaaaaatacctatatgaacaacttggggaaatgttccatgagaggcaattagggcaaaactgagagttagcgtgcttatgaaatgcatgataatttcttgtgtatttaagcattctgctcattatgtagctatagtccttgtccaaacctttgtatagaatggtagaatggagagaatgattgggttttaggtgctttattcactcttcactgacgctgcttaattcactccccttgtcatgatttctgcactctttgtaaaaggggacctgggaagttttattgtttcttatcacttcgtggtgctgtcctcagatcatatattcgaggattcacagaatataagatgaagcagcagtgctagttctta

SEQ ID NO: 75100 - DNA, 3207 bp, Zea Mays
ccctctccgctccgtcccagaaaacccggtatagcatgaaggaacgtttttttggcgtgttgatctctctcctcctccagtcctcccccgtcctgcaggagtaaagcctgttccaggggacgagaagggaagggttcttggggggagagggaagaagatggcgcgcaatgcggtggacaaggcgacgtctatcgatgcgcagctgcggctgctggccccgcagaagctctctgacgacgacaagcttgtcgagtacgacgccctgctcctcgaccggttcctcgacatcctacaggacctgcacggcgaggacatcagggagacggtgcaagaatgttacgagttagctgctgagtatgaaaataagcttgaccccaaaatgctggatgagattgggaatgtgctgaccagcttggatcctggagactccattgtcataaccaagtcattctcacacatgctgatcctggcaaacttggctgaggaggtacaaattgcataccgcaggagaataaaactgaagaagggtgactttgttgatgagaactcagcaacaactgaatcagacattgaggagacactaaagaggcttatgcatcagcttaagaaatcccctctggaggtatttgatgctctcaagaatcaaactgttgacctcgtcctgactgcacatccaactcagtcagtccggagatcattgcttcaaaagcatggcaggataagaaactgtttaactcaactttatgcaaaggacatcactccagatgagaaacaggaacttgatgaagcacttcaaagagagattcaagctgcctttagaactgatgaaatcaggcgggcgcctcctactccgcaggatgaaatgcgtgctggaatgagttattttcatgagactatatggaagggtgtacccaagttcttacgtagggttgacactgctcttaagaacattggcataaatgagcggttgccatataatgcccctatcattcagttttcttcttggatgggtggtgaccgtgatgggaatccaagagtcacgccagaggttacaagggatgtatgcttgttggctagaatgatggctgctaatttgtataatgcccagatagaagacctgatgtttgagttatctatgtggcgatgcagtgacgagttacgtgtaaaggtcgatcagttataccattcctccaagaaagatacgacaaaacactatatagagttctggaagcaagtccctcccagtgaaccttaccgtgtgattctgagtgatgtcagagataaactctataacacacgtgaacgagcacgtcacttattagctagtgggttttctgaaattccagaggaagcaaccttcaccgatgttgaacagttcttggagcctcttgagctctgttacagatctctgtgtgcctgtggtgatcgctctgttgcggatggaagccttcttgacttcttaaggcaagtgtcaacatttggactatcccttgttagacttgatatcaggcaagaatctgaccggcatactgatgttatggatgctataactgaatacctcggtattggatcataccgtaaatggccagaggagaaacgccaagaatggctactatcggaacttaatggaaagaggccgttatttggtccggaccttcccaagtcagatgagattgctgatgtactagatactttccacgtattagctgaacttccatcagacagctttggtgcatatgtaatatctatggcgactgctccctcagatgtccttgctgtggagctcttgcagcgtgaatgccatgtgaaaaaaccactgagagtcgttcctttgttcgaaaaactggcagatcttgagtcagcaccagcagcgttagctcggctgttctccgttgaatggtacagaaacaggatcagcggcaagcaggaagtgatgatcgggtattcagattctggcaaggatgccggtcgtttctctgctgcttggcaactgtacaaggctcaagaggagctcattaatgtcgctaagctgtatggggttaagctaaccatgttccacggacgaggcggaactgtgggaagaggtgggggccctacccatcttgctatactgtcacaacctccagaaaccatccatggatcacttagggtaaccgttcaaggcgaagtcattgagcagtctttcggagaggagcatttgtgctttaggacactgcaacgtttcacggctgcgacccttgaacatggtatgcaccctccaatttcgccgaaaccagaatggcgtgctttgatggatgagatggctatcgtcgccacaaaggaataccggtcaatcgtatttgaggaaccgcgctttgttgaatacttccgccttgcaacgccagagatggagtatggcaggatgaacatcggaagcaggccatcgaaaagaaagccgagtgcgggcatcgagtcgctgcgcgcaatcccttggatcttcgcttggacgcagactcggttccacctgccggtgtggctgggtttcggcgcggcgttcaagcatgtcttggacaaggacatacggaatctccagacccttcaggagatgtacaaccagtggccctttttcagggtgacgatagacctggtcgagatggtgttcgccaagggtgatcctggcatcgcggcgctgtacgacaagcttctggtctcagaggatctgtgggcattaggggcgcgtctcagagccaactacgaagaaacaaagcagcttctcctgcaggtcgctgggcacaaggaccttctggagggcgacccgtacctgaagcagaggctgcgcatccgtgactcgtacaccacggcgctgaacgtttgccaggcctacacgctgaagcgcatcagggaccctggcttccaggtgaagccgcggccccacctgtcgaaggacatcatggacatgggcaagccggcgtcggagctcgtgaagctgaacaccaccagcgagtacgccccggggctggaggacaccctcatcctgaccatgaagggcatcgctgccgggatgcagaacaccggctgaagccagtgtgcctgtcttctttctgtaggggatcatatcatatggcgtgatgaaccagtgaacacctggatatgtggggattagttacaccctgttgcactcgaatttatgccccgcttggccgcgcccttgtcgcatggtttccatat

SEQ ID NO: 75101 - DNA, 3086 bp, Zea Mays
cctctccgctccgtcccagaaaacccggtatagcatgaaggaacgtttttttggcgtgttgatctctctcctcctccagtcctcccccgtcctgcaggagtaaagcctgttccaggcgaggggacgagaagggaagggttcttggggggagagggaagaagatggcgcgcaatgcggtggacaaggcgacgtctatcgatgcgcagctgcggctgctggccccgcagaagctctctgacgacgacaagcttgtcgagtacgacgccctgctcctcgaccggttcctcgacatcctacaggacctgcacggcgaggacatcagggagacggtgcaagaatgttacgagttagctgctgagtatgaaaataagcttgaccccaaaatgctggatgagattgggaatgtgctgaccagcttggatcctggagactccattgtcataaccaagtcattctcacacatgctgatcctggcaaacttggctgaggaggtacaaattgcataccgcaggagaataaaactgaagaagggtgactttgttgatgagaactcagcaacaactgaatcagacattgaggagacactaaagaggcttatgcatcagcttaagaaatcccctctggaggtatttgatgctctcaagaatcaaactgttgacctcgtcctgactgcacatccaactcagtcagtccggagatcattgcttcaaaagcatggcaggataagaaactgtttaactcaactttatgcaaaggacatcactccagatgagaaacaggaacttgatgaagcacttcaaagagagattcaagctgcctttagaactgatgaaatcaggcgggcgcctcctactccgcaggatgaaatgcgtgctggaatgagttattttcatgagactatatggaagggtgtacccaagttcttacgtagggttgacactgctcttaagaacattggcataaatgagcggttgccatataatgcccctatcattcagttttcttcttggatgggtggtgaccgtgatgggaatccaagagtcacgccagaggttacaagggatgtatgcttgttggctagaatgatggctgctaatttgtataatgcccagatagaagacctgatgtttgagttatctatgtggcgatgcagtgacgagttacgtgtaaaggtcgatcagttataccattcctccaagaaagatacgacaaaacactatatagagttctggaagcaagtccctcccagtgaaccttaccgtgtgattctgagtgatgtcagagataaactctataacacacgtgaacgagcacgtcacttattagctagtgggttttctgaaattccagaggaagcaaccttcaccgatgttgaacagttcttggagcctcttgagctctgttacagatctctgtgtgcctgtggtgatcgctctgttgcggatggaagccttcttgacttcttaagaggagaaacgccaagaatggctactatcggaacttaatggaaagaggccgttatttggtccggaccttcccaagtcagatgagattgctgatgtactagatactttccacgtattagctgaacttccatcagacagctttggtgcatatgtaatatctatggcgactgctccctcagatgtccttgctgtggagctcttgcagcgtgaatgccatgtgaaaaaaccactgagagtcgttcctttgttcgaaaaactggcagatcttgagtcagcaccagcagcgttagctcggctgttctccgttgaatggtacagaaacaggatcagcggcaagcaggaagtgatgatcgggtattcagattctggcaaggatgccggtcgtttctctgctgcttggcaactgtacaaggctcaagaggagctcattaatgtcgctaagctgtatggggttaagctaaccatgttccacggacgaggcggaactgtgggaagaggtgggggccctacccatcttgctatactgtcacaacctccagaaaccatccatggatcacttagggtaaccgttcaaggcgaagtcattgagcagtctttcggagaggagcatttgtgctttaggacactgcaacgtttcacggctgcgacccttgaacatggtatgcaccctccaatttcgccgaaaccagaatggcgtgctttgatggatgagatggctatcgtcgccacaaaggaataccggtcaatcgtatttgaggaaccgcgctttgttgaatacttccgccttgcaacgccagagatggagtatggcaggatgaacatcggaagcaggccatcgaaaagaaagccgagtgcgggcatcgagtcgctgcgcgcaatcccttggatcttcgcttggacgcagactcggttccacctgccggtgtggctgggtttcggcgcggcgttcaagcatgtcttggacaaggacatacggaatctccagacccttcaggagatgtacaaccagtggccctttttcagggtgacgatagacctggtcgagatggtgttcgccaagggtgatcctggcatcgcggcgctgtacgacaagcttctggtctcagaggatctgtgggcattaggggcgcgtctcagagccaactacgaagaaacaaagcagcttctcctgcaggtcgctgggcacaaggaccttctggagggcgacccgtacctgaagcagaggctgcgcatccgtgactcgtacaccacggcgctgaacgtttgccaggcctacacgctgaagcgcatcagggaccctggcttccaggtgaagccgcggccccacctgtcgaaggacatcatggacatgggcaagccggcgtcggagctcgtgaagctgaacaccaccagcgagtacgccccggggctggaggacaccctcatcctgaccatgaagggcatcgctgccgggatgcagaacaccggctgaagccagtgtgcctgtcttctttctgtaggggatcatatcatatggcgtgatgaaccagtgaacacctggatatgtggggattagttacaccctgttgcactcgaatttatgccccgcttggccgcgcccttgtcgcatggtttccatat

SEQ ID NO: 75102 - DNA, 2951 bp, Zea Mays
gtgctttcctctccactcccttcgatccagggacgagaagggaagggttcttggggggagagggaagaagatggcgcgcaatgcggtggacaaggcgacgtctatcgatgcgcagctgcggctgctggccccgcagaagctctctgacgacgacaagcttgtcgagtacgacgccctgctcctcgaccggttcctcgacatcctacaggacctgcacggcgaggacatcagggagacggtgcaagaatgttacgagttagctgctgagtatgaaaataagcttgaccccaaaatgctggatgagattgggaatgtgctgaccagcttggatcctggagactccattgtcataaccaagtcattctcacacatgctgatcctggcaaacttggctgaggaggtacaaattgcataccgcaggagaataaaactgaagaagggtgactttgttgatgagaactcagcaacaactgaatcagacattgaggagacactaaagaggcttatgcatcagcttaagaaatcccctctggaggtatttgatgctctcaagaatcaaactgttgacctcgtcctgactgcacatccaactcagtcagtccggagatcattgcttcaaaagcatggcaggataagaaactgtttaactcaactttatgcaaaggacatcactccagatgagaaacaggaacttgatgaagcacttcaaagagagattcaagctgcctttagaactgatgaaatcaggcgggcgcctcctactccgcaggatgaaatgcgtgctggaatgagttattttcatgagactatatggaagggtgtacccaagttcttacgtagggttgacactgctcttaagaacattggcataaatgagcggttgccatataatgcccctatcattcagttttcttcttggatgggtggtgaccgtgatgggaatccaagagtcacgccagaggttacaagggatgtatgcttgttggctagaatgatggctgctaatttgtataatgcccagatagaagacctgatgtttgagttatctatgtggcgatgcagtgacgagttacgtgtaaaggtcgatcagttataccattcctccaagaaagatacgacaaaacactatatagagttctggaagcaagtccctcccagtgaaccttaccgtgtgattctgagtgatgtcagagataaactctataacacacgtgaacgagcacgtcacttattagctagtgggttttctgaaattccagaggaagcaaccttcaccgatgttgaacagttcttggagcctcttgagctctgttacagatctctgtgtgcctgtggtgatcgctctgttgcggatggaagccttcttgacttcttaaggcaagtgtcaacatttggactatcccttgttagacttgatatcaggcaagaatctgaccggcatactgatgttatggatgctataactgaatacctcggtattggatcataccgtaaatggccagaggagaaacgccaagaatggctactatcggaacttaatggaaagaggccgttatttggtccggaccttcccaagtcagatgagattgctgatatcttgagtcagcaccagcagcgttagctcggctgttctccgttgaatggtacagaaacaggatcagcggcaagcaggaagtgatgatcgggtattcagattctggcaaggatgccggtcgtttctctgctgcttggcaactgtacaaggctcaagaggagctcattaatgtcgctaagctgtatggggttaagctaaccatgttccacggacgaggcggaactgtgggaagaggtgggggccctacccatcttgctatactgtcacaacctccagaaaccatccatggatcacttagggtaaccgttcaaggcgaagtcattgagcagtctttcggagaggagcatttgtgctttaggacactgcaacgtttcacggctgcgacccttgaacatggtatgcaccctccaatttcgccgaaaccagaatggcgtgctttgatggatgagatggctatcgtcgccacaaaggaataccggtcaatcgtatttgaggaaccgcgctttgttgaatacttccgccttgcaacgccagagatggagtatggcaggatgaacatcggaagcaggccatcgaaaagaaagccgagtgcgggcatcgagtcgctgcgcgcaatcccttggatcttcgcttggacgcagactcggttccacctgccggtgtggctgggtttcggcgcggcgttcaagcatgtcttggacaaggacatacggaatctccagacccttcaggagatgtacaaccagtggccctttttcagggtgacgatagacctggtcgagatggtgttcgccaagggtgatcctggcatcgcggcgctgtacgacaagcttctggtctcagaggatctgtgggcattaggggcgcgtctcagagccaactacgaagaaacaaagcagcttctcctgcaggtcgctgggcacaaggaccttctggagggcgacccgtacctgaagcagaggctgcgcatccgtgactcgtacaccacggcgctgaacgtttgccaggcctacacgctgaagcgcatcagggaccctggcttccaggtgaagccgcggccccacctgtcgaaggacatcatggacatgggcaagccggcgtcggagctcgtgaagctgaacaccaccagcgagtacgccccggggctggaggacaccctcatcctgaccatgaagggcatcgctgccgggatgcagaacaccggctgaagccagtgtgcctgtcttctttctgtaggggatcatatcatatggcgtgatgaaccagtgaacacctggatatgtggggattagttacaccctgttgcactcgaatttatgccccgcttggccgcgcccttgtcgcatggtttccatat

SEQ ID NO: 75103 - DNA, 2840 bp, Zea Mays
cacaaagccccaccgctcaccgatgttgtagctgcactgcactgttgcagctaacagttttagcacgccaatctactttctcttttacgtctcgatcagtcattttcagggtccatcagacaatttttttttaccgggaaacaccgtcaccatgttttgaagtgcacgccaactccgaaagagctgaggtggccagtgcgcggatgcgccgcccggtgactgtgagccggtgacctgaaccgagcgcgcacccctcgcggagttcagtcgcgcacaccaacagggcaatgggcacggaagggaacaaaagcacccggttcgcctccaccccgcgcatcccttcggcttaaaatctcccctataggccccttcgcctccctccgattcccatcccttcggcgaccagtggcttcttcctcatcgcgcactttaaaatccccgcgccgcctccccacttcctccccaccccgcgcatcgactcctccttcacccgcatagcgtagtaccatggccgccgcggcgcaccaggtctccgccgtgatctttgatctcgacggcactctccttgacacagagagggcgacaagggacgtcctcaccgaattcctggcggcatacgggaaggtccccgatgcgggggaggaggagaagaggctggggcagatgtatttggaatccaccaccgggatcatcagagactacggcctgccgctcacggtcgacgagtactccaaggcgatgtatcccctgtacctgaaaaggtggcaaaaggcaaaaccgcttccgggagtgaagaggcttgttaagcatcttcacaagaacggagtgccactcgcacttgcttctaactccattaggagaaatgttgatcacaagcttccgaaactagaagattggggaaagtgtttttctgttattcttggtggagatcaagtcccaaatggaaaaccttcccctgacatatttttggaggctgcaaagaggcttggtgcaaatccatcgtcttgcttggttatagaagattctgtcgttggagtcaagggtgccaaggcttctggggcaaaggcagttgcagtaccatcacttcaaaatcagaggaaccactattacattgctgatgtcatcctatattcgcttttggactttcaacctgagatgtggggtcttcctccatttgaagatcgcattcaaggtgttctgccaattgatcccttactttcaaatgcccggataggtggtaaaattttgaacaacattcattgggtaatttcagatgactgtgcctacgagtatattcctgaccaaatatcaggaatttttttgggttgggccaagtccaaagtgcatggattctccaaggtgatcgtagctactgggtgggacttctcacagcagaccgtcgagagagtgatgcatgtacattttcttgattgctctggcacggttgaaacagagcctgtgaagctgctcataattggttacatccggaagctccaaagtgcagtaataactttttcttaaatctaactatgaactagtgaatctgactctactgacttttttcatgtactcatgcttcgttcataagaaaaggttatgtagagaattgccgaatagtacgatcgaatatagagtagaatgaaggaatacattagcttattttcaattcgtggaaatagatgatggcgacaactgacactatttctagatgactataagaaatctggaaaatgagaaagataaccaaaggacttgtcctgagcactagaacattggctcattcctggggattctgtctgcccctcgccaatccagacgaacaagcccttaggcttctcattcctcaatattggcgtccttattatatttgcataatttctattccaatatgccatgcagtgttggacttattaattcgtcagtaggtagtacatcgttttttctgcttgaaaacatgagaccttcgtatcattgtttgttaaaaaagatggaacaaaaactataaaatcaaatatgagcaaaaatatagttttatgtgcaatctcacaaatcgccatatgattatagtgactggatgcaaccattatgacaggatgatatattgcaagcattaagcgtaactgacgaagacaggagaattgcaagggatgcattggatctcccaactttctctgaatatgctaatgaccttcatcttgcctgagtccggctttgtcattgcaagctctcacctcactacctcacgtttgtatttgttattgttaacaagcaaacatgatgatgccagctgcgttttcttctatgaagacttcatatggaatgcacttcttgctcggagaagattagagaagagaagggcggaaggcatgaagcttgtctttcatctagaggtccatcgatgttatcgtatgctgtaaaattttcacgtttaatttttatatactctcttcatccacaaatctagctcaagctaagtttgtagtaaagaatgttagcacttacatataaaattaaagttattataacaatatattttataactaatataatggtacttattatgtattatgagtgtttgtattttttatataaatttggtcaaagtttaaatcatttgacttcataaaaaacagtaattgcattatttttttatggacagagtataatttactacaccagcacatgccttaagccttaaggggcagagtaatagaaaagatatgagcttatgattatgtaatgggatggagagtaagggcctgtttatttgagattataattttgaacaaacacttgacagattataatgctaaacaaacactccctaagaatgattcttc

SEQ ID NO: 75104 - DNA, 2709 bp, Zea Mays
cacaaagccccaccgctcaccgatgttgtagctgcactgcactgttgcagctaacagttttagcacgccaatctactttctcttttacgtctcgatcagtcattttcagggtccatcagacaatttttttttaccgggaaacaccgtcaccatgttttgaagtgcacgccaactccgaaagagctgaggtggccagtgcgcggatgcgccgcccggtgactgtgagccggtgacctgaaccgagcgcgcacccctcgcggagttcagtcgcgcacaccaacagggcaatgggcacggaagggaacaaaagcacccggttcgcctccaccccgcgcatcccttcggcttaaaatctcccctataggccccttcgcctccctccgattcccatcccttcggcgaccagtggcttcttcctcatcgcgcactttaaaatccccgcgccgcctccccacttcctccccaccccgcgcatcgactcctccttcacccgcatagcgtagtaccatggccgccgcggcgcaccaggtctccgccgtgatctttgatctcgacggcactctccttgacacagagagggcgacaagggacgtcctcaccgaattcctggcggcatacgggaaggtccccgatgcgggggaggaggagaagaggctggggcagatgtatttggaatccaccaccgggatcatcagagactacggcctgccgctcacggtcgacgagtactccaaggcgatgtatcccctgtacctgaaaagattggggaaagtgtttttctgttattcttggtggagatcaagtcccaaatggaaaaccttcccctgacatatttttggaggctgcaaagaggcttggtgcaaatccatcgtcttgcttggttatagaagattctgtcgttggagtcaagggtgccaaggcttctggggcaaaggcagttgcagtaccatcacttcaaaatcagaggaaccactattacattgctgatgtcatcctatattcgcttttggactttcaacctgagatgtggggtcttcctccatttgaagatcgcattcaaggtgttctgccaattgatcccttactttcaaatgcccggataggtggtaaaattttgaacaacattcattgggtaatttcagatgactgtgcctacgagtatattcctgaccaaatatcaggaatttttttgggttgggccaagtccaaagtgcatggattctccaaggtgatcgtagctactgggtgggacttctcacagcagaccgtcgagagagtgatgcatgtacattttcttgattgctctggcacggttgaaacagagcctgtgaagctgctcataattggttacatccggaagctccaaagtgcagtaataactttttcttaaatctaactatgaactagtgaatctgactctactgacttttttcatgtactcatgcttcgttcataagaaaaggttatgtagagaattgccgaatagtacgatcgaatatagagtagaatgaaggaatacattagcttattttcaattcgtggaaatagatgatggcgacaactgacactatttctagatgactataagaaatctggaaaatgagaaagataaccaaaggacttgtcctgagcactagaacattggctcattcctggggattctgtctgcccctcgccaatccagacgaacaagcccttaggcttctcattcctcaatattggcgtccttattatatttgcataatttctattccaatatgccatgcagtgttggacttattaattcgtcagtaggtagtacatcgttttttctgcttgaaaacatgagaccttcgtatcattgtttgttaaaaaagatggaacaaaaactataaaatcaaatatgagcaaaaatatagttttatgtgcaatctcacaaatcgccatatgattatagtgactggatgcaaccattatgacaggatgatatattgcaagcattaagcgtaactgacgaagacaggagaattgcaagggatgcattggatctcccaactttctctgaatatgctaatgaccttcatcttgcctgagtccggctttgtcattgcaagctctcacctcactacctcacgtttgtatttgttattgttaacaagcaaacatgatgatgccagctgcgttttcttctatgaagacttcatatggaatgcacttcttgctcggagaagattagagaagagaagggcggaaggcatgaagcttgtctttcatctagaggtccatcgatgttatcgtatgctgtaaaattttcacgtttaatttttatatactctcttcatccacaaatctagctcaagctaagtttgtagtaaagaatgttagcacttacatataaaattaaagttattataacaatatattttataactaatataatggtacttattatgtattatgagtgtttgtattttttatataaatttggtcaaagtttaaatcatttgacttcataaaaaacagtaattgcattatttttttatggacagagtataatttactacaccagcacatgccttaagccttaaggggcagagtaatagaaaagatatgagcttatgattatgtaatgggatggagagtaagggcctgtttatttgagattataattttgaacaaacacttgacagattataatgctaaacaaacactccctaagaatgattcttc

SEQ ID NO: 75105 - DNA, 1789 bp, Zea Mays
aaagcccaaccccgaacaggtagatttccctcaaagaaacaaaaaaaataaaacaaagataaatcattggggttgggggattgcaattgcaagttgccgctgtgcggttgcggtcgctcccctcccgactctggccagcagcagcgacggtgccggcagtcgattactccacgcggcggaggcggcggtagcccatcctttcccgttttctgatccagtcctactgataccgcgcacagcacgcctgctctattaaaggtacggcgtgaagatgagggttctcttggtctcgtgaaggcgacgctcttgtctgctaactacatattatagaatgttttgcttgaggggctactggtcgccttcactagctccagtgagggaagggcctgttcgacatcatataaagttcaattctgtagtggtttgtggtgctaggggaccgagaccgagatatccccgtgtgtggaaaactcgtaagaaaattgggactatttccaagtcgcagaagcttgtcgaatgtgtcattaaatggatgttcaacaaaggtcaagggaagacaatgggaagctattacaccttgttgaatgctttgatcgaggatggacggattgaggaagcagaagagttatttggaatggtgttctcacgatatatggagggtttgcctcgtacatttttcatgagaatgatttctttctattacagcgtggaagcgtatgataagatgtttgagatttttgctgatatggaggaactaggcgtaagacctgatggttctattatcaggatgctaggtgatgtatttcagaagttagagatgatggacaaatatgaaaagttaaaaaagaaatacccaccaccgaaatgggattatcgacacatcaaaggcaagcgcataagaatcagagtttatcctgatagcaaccctgaagtggcggcaaaaggagaccctgacactgatgagctcgaagagttagaaagcacacaccttaataacgaattggatgaagcagcaagctcaggcctcgacaggagtgtattggacgatgcagcttctggagaccttgaatatatgtagaacccatgtcgtcatacttccaagacatctctgttttggtttgacatcccagaacccatgtcgtcatacttccaagacatgggcatcgctatcttctgaagtattttactacctagaatgagtagaaactacatgccaggctttgccatcagcagtcttttcaagacatcatggtggtttcaccgcgatatgtgttcttcagagtttggttacctgattcacttgcataaggctcatgcctttttgaatgcttccagccaggttaaaaacatagcgatggcattaggacctgtagtatctgagtgctttcgtgaacatatatggttgattgttgaaggcaatgtcctggacatcagacagggcagtagccattactatggtcctgtttggcacagctactgcttgttgaaaaagcagcttatctgagaagctgatgaaaagcagcttctgcttgttggctgcttttagtgtattctgagaagcagctgaactaataagctgctgtagaagctggctgtttggcaggacttctgcttaaatttgcgaagaagctgaaaataagctgaaaataagctgtgccaaacagggcctatatcatccggtatggtcctttgttcggcatggaaaggcgccatattttcaggcatgaaagactctattgtgtatttaacccagttaatatccgtctcttcagttgtctttaaagctgat

SEQ ID NO: 75106 - DNA, 1667 bp, Zea Mays
aaagcccaaccccgaacaggtagatttccctcaaagaaacaaaaaaaataaaacaaagataaatcattggggttgggggattgcaattgcaagttgccgctgtgcggttgcggtcgctcccctcccgactctggccagcagcagcgacggtgccggcagtcgattactccacgcggcggaggcggcggtagcccatcctttcccgttttctgatccagtcctactgataccgcgcacagcacgcctgctctattaaagattaaaggtctgtctaatgtaaaggaggaagtttatggggcacttgactcatttgttgcatgggaactggagtttcccttgatagtagtaaagaaggcactgaagaaacttgaggacgaaaaggaatggaaacgaataattcaggtcattaaatggatgttcaacaaaggtcaagggaagacaatgggaagctattacaccttgttgaatgctttgatcgaggatggacggattgaggaagcagaagagttatttggaatggtgttctcacgatatatggagggtttgcctcgtacatttttcatgagaatgatttctttctattacagcgtggaagcgtatgataagatgtttgagatttttgctgatatggaggaactaggcgtaagacctgatggttctattatcaggatgctaggtgatgtatttcagaagttagagatgatggacaaatatgaaaagttaaaaaagaaatacccaccaccgaaatgggattatcgacacatcaaaggcaagcgcataagaatcagagtttatcctgatagcaaccctgaagtggcggcaaaaggagaccctgacactgatgagctcgaagagttagaaagcacacaccttaataacgaattggatgaagcagcaagctcaggcctcgacaggagtgtattggacgatgcagcttctggagaccttgaatatataacccatgtcgtcatacttccaagacatctctgttttggtttgacatcccagaacccatgtcgtcatacttccaagacatgggcatcgctatcttctgaagtattttactacctagaatgagtagaaactacatgccaggctttgccatcagcagtcttttcaagacatcatggtggtttcaccgcgatatgtgttcttcagagtttggttacctgattcacttgcataaggctcatgcctttttgaatgcttccagccaggttaaaaacatagcgatggcattaggacctgtagtatctgagtgctttcgtgaacatatatggttgattgttgaaggcaatgtcctggacatcagacagggcagtagccattactatggtcctgtttggcacagctactgcttgttgaaaaagcagcttatctgagaagctgatgaaaagcagcttctgcttgttggctgcttttagtgtattctgagaagcagctgaactaataagctgctgtagaagctggctgtttggcaggacttctgcttaaatttgcgaagaagctgaaaataagctgaaaataagctgtgccaaacagggcctatatcatccggtatggtcctttgttcggcatggaaaggcgccatattttcaggcatgaaagactctattgtgtatttaacccagttaatatccgtctcttcagttgtctttaaagctgat

SEQ ID NO: 75107 - DNA, 1857 bp, Zea Mays
aaagcccaaccccgaacaggtagatttccctcaaagaaacaaaaaaaataaaacaaagataaatcattggggttgggggattgcaattgcaagttgccgctgtgcggttgcggtcgctcccctcccgactctggccagcagcagcgacggtgccggcagtcgattactccacgcggcggaggcggcggtagcccatcctttcccgttttctgatccagtcctactgataccgcgcacagcacgcctgctctattaaagaatgttttgcttgaggggctactggtcgccttcactagctccagtgagggaagggcctgttcgacatcatataaagttcaattctgtagtggtttgtggtgctaggggaccgagaccgagatatccccgtgtgtggaaaactcgtaagaaaattgggactatttccaagtcgcagaagcttgtcgaatgtattaaaggtctgtctaatgtaaaggaggaagtttatggggcacttgactcatttgttgcatgggaactggagtttcccttgatagtagtaaagaaggcactgaagaaacttgaggacgaaaaggaatggaaacgaataattcaggtcattaaatggatgttcaacaaaggtcaagggaagacaatgggaagctattacaccttgttgaatgctttgatcgaggatggacggattgaggaagcagaagagttatttggaatggtgttctcacgatatatggagggtttgcctcgtacatttttcatgagaatgatttctttctattacagcgtggaagcgtatgataagatgtttgagatttttgctgatatggaggaactaggcgtaagacctgatggttctattatcaggatgctaggtgatgtatttcagaagttagagatgatggacaaatatgaaaagttaaaaaagaaatacccaccaccgaaatgggattatcgacacatcaaaggcaagcgcataagaatcagagtttatcctgatagcaaccctgaagtggcggcaaaaggagaccctgacactgatgagctcgaagagttagaaagcacacaccttaataacgaattggatgaagcagcaagctcaggcctcgacaggagtgtattggacgatgcagcttctggagaccttgaatatataacccatgtcgtcatacttccaagacatctctgttttggtttgacatcccagaacccatgtcgtcatacttccaagacatgggcatcgctatcttctgaagtattttactacctagaatgagtagaaactacatgccaggctttgccatcagcagtcttttcaagacatcatggtggtttcaccgcgatatgtgttcttcagagtttggttacctgattcacttgcataaggctcatgcctttttgaatgcttccagccaggttaaaaacatagcgatggcattaggacctgtagtatctgagtgctttcgtgaacatatatggttgattgttgaaggcaatgtcctggacatcagacagggcagtagccattactatggtcctgtttggcacagctactgcttgttgaaaaagcagcttatctgagaagctgatgaaaagcagcttctgcttgttggctgcttttagtgtattctgagaagcagctgaactaataagctgctgtagaagctggctgtttggcaggacttctgcttaaatttgcgaagaagctgaaaataagctgaaaataagctgtgccaaacagggcctatatcatccggtatggtcctttgttcggcatggaaaggcgccatattttcaggcatgaaagactctattgtgtatttaacccagttaatatccgtctcttcagttgtctttaaagctgat

SEQ ID NO: 75108 - DNA, 1804 bp, Zea Mays
aaagcccaaccccgaacaggtagatttccctcaaagaaacaaaaaaaataaaacaaagataaatcattggggttgggggattgcaattgcaagttgccgctgtgcggttgcggtcgctcccctcccgactctggccagcagcagcgacggtgccggcagtcgattactccacgcggcggaggcggcggtagcccatcctttcccgttttctgatccagtcctactgataccgcgcacagcacgcctgctctattaaagaatgttttgcttgaggggctactggtcgccttcactagctccagtgagggaagggcctgttcgacatcatataaagttcaattctgtagtggtttgtggtgctaggggaccgagaccgagatatccccgtgtgtggaaaactcgtaagaaaattgggactatttccaagtcgcagaagcttgtcgaatgtattaaaggtctgtctaatgtaaaggaggaagtttatggggcacttgactcatttgttgcatgggaactggagtttcccttgatagtagtaaagaaggcactgaagaaacttgaggacgaaaaggaatggaaacgaataattcaggtcattaaatggatgttcaacaaaggtcaagggaagacaatgggaagctattacaccttgttgaatgctttgatcgaggatggacggattgaggaagcagaagagttatttggaatggtgttctcacgatatatggagggtttgcctcgtacatttttcatgagaatgatttctttctattacagcgtggaagcgtatgataagatgtttgaggatgctaggtgatgtatttcagaagttagagatgatggacaaatatgaaaagttaaaaaagaaatacccaccaccgaaatgggattatcgacacatcaaaggcaagcgcataagaatcagagtttatcctgatagcaaccctgaagtggcggcaaaaggagaccctgacactgatgagctcgaagagttagaaagcacacaccttaataacgaattggatgaagcagcaagctcaggcctcgacaggagtgtattggacgatgcagcttctggagaccttgaatatataacccatgtcgtcatacttccaagacatctctgttttggtttgacatcccagaacccatgtcgtcatacttccaagacatgggcatcgctatcttctgaagtattttactacctagaatgagtagaaactacatgccaggctttgccatcagcagtcttttcaagacatcatggtggtttcaccgcgatatgtgttcttcagagtttggttacctgattcacttgcataaggctcatgcctttttgaatgcttccagccaggttaaaaacatagcgatggcattaggacctgtagtatctgagtgctttcgtgaacatatatggttgattgttgaaggcaatgtcctggacatcagacagggcagtagccattactatggtcctgtttggcacagctactgcttgttgaaaaagcagcttatctgagaagctgatgaaaagcagcttctgcttgttggctgcttttagtgtattctgagaagcagctgaactaataagctgctgtagaagctggctgtttggcaggacttctgcttaaatttgcgaagaagctgaaaataagctgaaaataagctgtgccaaacagggcctatatcatccggtatggtcctttgttcggcatggaaaggcgccatattttcaggcatgaaagactctattgtgtatttaacccagttaatatccgtctcttcagttgtctttaaagctgat

SEQ ID NO: 75109 - DNA, 1713 bp, Zea Mays
aaagcccaaccccgaacaggtagatttccctcaaagaaacaaaaaaaataaaacaaagataaatcattggggttgggggattgcaattgcaagttgccgctgtgcggttgcggtcgctcccctcccgactctggccagcagcagcgacggtgccggcagtcgattactccacgcggcggaggcggcggtagcccatcctttcccgttttctgatccagtcctactgataccgcgcacagcacgcctgctctattaaagaatgttttgcttgaggggctactggtcgccttcactagctccagtgagggaagggcctgttcgacatcatataaagttcaattctgtagtggtttgtggtgctaggggaccgagaccgagatatccccgtgtgtggaaaactcgtaagaaaattgggactatttccaagtcgcagaagcttgtcgaatgtgtcattaaatggatgttcaacaaaggtcaagggaagacaatgggaagctattacaccttgttgaatgctttgatcgaggatggacggattgaggaagcagaagagttatttggaatggtgttctcacgatatatggagggtttgcctcgtacatttttcatgagaatgatttctttctattacagcgtggaagcgtatgataagatgtttgagatttttgctgatatggaggaactaggcgtaagacctgatggttctattatcaggatgctaggtgatgtatttcagaagttagagatgatggacaaatatgaaaagttaaaaaagaaatacccaccaccgaaatgggattatcgacacatcaaaggcaagcgcataagaatcagagtttatcctgatagcaaccctgaagtggcggcaaaaggagaccctgacactgatgagctcgaagagttagaaagcacacaccttaataacgaattggatgaagcagcaagctcaggcctcgacaggagtgtattggacgatgcagcttctggagaccttgaatatataacccatgtcgtcatacttccaagacatctctgttttggtttgacatcccagaacccatgtcgtcatacttccaagacatgggcatcgctatcttctgaagtattttactacctagaatgagtagaaactacatgccaggctttgccatcagcagtcttttcaagacatcatggtggtttcaccgcgatatgtgttcttcagagtttggttacctgattcacttgcataaggctcatgcctttttgaatgcttccagccaggttaaaaacatagcgatggcattaggacctgtagtatctgagtgctttcgtgaacatatatggttgattgttgaaggcaatgtcctggacatcagacagggcagtagccattactatggtcctgtttggcacagctactgcttgttgaaaaagcagcttatctgagaagctgatgaaaagcagcttctgcttgttggctgcttttagtgtattctgagaagcagctgaactaataagctgctgtagaagctggctgtttggcaggacttctgcttaaatttgcgaagaagctgaaaataagctgaaaataagctgtgccaaacagggcctatatcatccggtatggtcctttgttcggcatggaaaggcgccatattttcaggcatgaaagactctattgtgtatttaacccagttaatatccgtctcttcagttgtctttaaagctgat

SEQ ID NO: 75110 - DNA, 1861 bp, Zea Mays
aaagcccaaccccgaacaggtagatttccctcaaagaaacaaaaaaaataaaacaaagataaatcattggggttgggggattgcaattgcaagttgccgctgtgcggttgcggtcgctcccctcccgactctggccagcagcagcgacggtgccggcagtcgattactccacgcggcggaggcggcggtagcccatcctttcccgttttctgatccagtcctactgataccgcgcacagcacgcctgctctattaaagaatgttttgcttgaggggctactggtcgccttcactagctccagtgagggaagggcctgttcgacatcatataaagttcaattctgtagtggtttgtggtgctaggggaccgagaccgagatatccccgtgtgtggaaaactcgtaagaaaattgggactatttccaagtcgcagaagcttgtcgaatgtattaaaggtctgtctaatgtaaaggaggaagtttatggggcacttgactcatttgttgcatgggaactggagtttcccttgatagtagtaaagaaggcactgaagaaacttgaggacgaaaaggaatggaaacgaataattcaggtcattaaatggatgttcaacaaaggtcaagggaagacaatgggaagctattacaccttgttgaatgctttgatcgaggatggacggattgaggaagcagaagagttatttggaatggtgttctcacgatatatggagggtttgcctcgtacatttttcatgagaatgatttctttctattacagcgtggaagcgtatgataagatgtttgagatttttgctgatatggaggaactaggcgtaagacctgatggttctattatcaggatgctaggtgatgtatttcagaagttagagatgatggacaaatatgaaaagttaaaaaagaaatacccaccaccgaaatgggattatcgacacatcaaaggcaagcgcataagaatcagagtttatcctgatagcaaccctgaagtggcggcaaaaggagaccctgacactgatgagctcgaagagttagaaagcacacaccttaataacgaattggatgaagcagcaagctcaggcctcgacaggagtgtattggacgatgcagcttctggagaccttgaatatatgtagaacccatgtcgtcatacttccaagacatctctgttttggtttgacatcccagaacccatgtcgtcatacttccaagacatgggcatcgctatcttctgaagtattttactacctagaatgagtagaaactacatgccaggctttgccatcagcagtcttttcaagacatcatggtggtttcaccgcgatatgtgttcttcagagtttggttacctgattcacttgcataaggctcatgcctttttgaatgcttccagccaggttaaaaacatagcgatggcattaggacctgtagtatctgagtgctttcgtgaacatatatggttgattgttgaaggcaatgtcctggacatcagacagggcagtagccattactatggtcctgtttggcacagctactgcttgttgaaaaagcagcttatctgagaagctgatgaaaagcagcttctgcttgttggctgcttttagtgtattctgagaagcagctgaactaataagctgctgtagaagctggctgtttggcaggacttctgcttaaatttgcgaagaagctgaaaataagctgaaaataagctgtgccaaacagggcctatatcatccggtatggtcctttgttcggcatggaaaggcgccatattttcaggcatgaaagactctattgtgtatttaacccagttaatatccgtctcttcagttgtctttaaagctgat

SEQ ID NO: 75111 - DNA, 1723 bp, Zea Mays
cttgcttttgctcgaatgaattttgaatttgaatcgcgcaccggtcggtcgcgtcggcttctgggactgggagccagtgcggacgacgcgcctcccgactgccctcgcacgctaggagtggggaggggaggctgagcacgagcacgacacgagcgccgccaacgccaacgccaagacgagctcgcgaaggaccatgccgagatccaggggcaacgagccgccgctgcgggcgtcgcagcgcgcgccgctgcacctcaagacgacggcctgctccgaggcgaatggcgcgcaccaccgccccgtcgccgaccggagcagccccaaggtcggcgaccggcactcgccgcgcagccctctgcccgagaagaagcgtgcggccgggacgcgtgtggcggagctggaggcgaagctggggaaagtgcaggacgagctcaagaagctgcgggagcagctcgcgtccgctgaggccgccaagaaggacgcgcaggtcgcgctcgaggaggccaagaagcgcgtcggtaccaagggaagcccggcctcctcatccaccaccaccacttcgcctccctctcccccttcgccaggtgtcgaaagcgcgaagaagcccgaggagctgaagctgccgcagccggcggccgaggaggagagcagcgtaaacgcgccggcgaccgatgtgtttgaggtcgtccgggccgagtccggggacaaggagaaccatagcgcgacggccacgggcgctgaggactgcgaggttgtgagctgcggcgaggaggcggcgctggccgagaaggaggaggaagaggagacgaagaaaatgatcgaggaggacaacagcgcggcggcggaaaccgacggcgccgagaaggagagctgggaggtcctggagctgaaggcgaagctggcggagaaggacgcggagatcgccgccctcgcggcagaaaacgccgagctcaagaagcggtccggagaggccgcggaggcggcgaagatggtcgaagaggacgcggcggcgaaggcggcccaagccgagcgcgatctgaaggatggcgcggcgcgggaggcccggacgggcgagcagctgagggcgtcggaggccgcgcgggaggcgctggacgccgagctgcggcgcctgcgcgtgcagaccgagcagtggcgcaaggcggcggaggcggcggccgcggtgctcggcggggacaaccacctcaccgggctggcgggcagcggcaacggcaacggcaacgggtggggggaccccgccacgatgcccgacgacggcgacgacgagggcttcggtggcaagcggaagggcgccggcatccgggtgctcagcgacctgtggaggaagaaggggagcaagtgaaggcctgcctcccgcggaatgggggtgatcgtgttttggatttcgcaacggtgagcccgcgccagcttcaactccattgcctgccttgcactagctttagctccatcattttaccgcgttttggtttggattctacttatgtttgtatgatgatgatgatgctcgtgagattgaactatgtctgtaacgactgatcccgctgctgcctgctacctcagcgtaaggagcagcaacaatgctggtttgggtgatcttctttgttattttccatagcggaattgaggaatgctcgattgcagcagcatccggaaatgcctcttgtccctcgaacgaattccaactgcaatcaccggaatgctattt

SEQ ID NO: 75112 - DNA, 662 bp, Zea Mays
ctggttgtcatgaagctacgacctcatagtatttcttgatgcaccataatgattaagatgaattcatatggtgcactgaaaatgccaaatctattttgttttccagcttagttaatgattatagttcatatgtggcttcattttgttagttcaccagccaacatatagccagaggtgtcattggatatatattccccttgagggagtcgaacaagggaaggtggaggctactttcaagccaacatcagtagatgtaaagtttcatgatgtcaaaggcaagaattatcggtgtgccataccaaagctgaacaaggaaactgttcctgataaatgtaaggttgtggtgaagccaacaaaggttattgttacccttttcaaggcttctaaaggcaactggttagacttgcacttcaaggaagacaagttcaagccaagcatggacaaggaaaaggatccgatgtcaggaattatggacttaatgaagaacatgtatgaggacggcgacgaggatatgaaacgcacaatagccaaagcttggtctgatgccagtgaagctggacgtgcgaggaatattgaattctcttcttgaaaccaaagaaataaaaaccataagtctaagacgttttatggtattgtacttgcctcctttgcggaggcggagg

SEQ ID NO: 75113 - DNA, 364 bp, Zea Mays
ccagagcggcgacggcccacgcccccggcgtgccgctagcgagccccgcggctccgccctcggcgggggcaggcgccggcgaaaggcttcccaggaaagcgtcctcctcctccagcttcctgctggccaccgcggacgcgaccagcgcgaggagcagcgcggcgaggaggacagcgatggtcttgctcgaggcggcggccatggatacagacgaacgagaaagagctgtctagattgggcgccgggaaagccaggaaccgagggtgctcggcgtcggcggtcggtttcctcctcgtcggcttctcgggctagctgcggcgctggagggagatttgggagtatgtggacgtgtggtgacggaagt

SEQ ID NO: 75114 - DNA, 1335 bp, Zea Mays
cagccgtcgtcaagcaaactgtctcgcctcgtctcgccctggactgcgtccttcctgccgtgcccagtgggtatataagcccagaccgcccgcccgaagccgccagcagacgactacgagcggcggcgccgcctcggcaccctgacctcccccaccggaatggacggccatgctgcacgttttctcgccgccgtcgtgaccgagccgcttgcagtcggcgatgagctctattcgatgcgtcctatcgaggtggaggaccccctgccctcctgtatggacggccaggcgctacctcttggcggcgtcgtgcggaatacaattaccgtgtccgacgtgctgcagcccacgggcgaggtggtggaggaggacgccctgcttgtcgcgcctgacatcgttaagggcgaggtggaggaggaggatgccctacccgtcgcgaccgacatcgtcaacggcgtctctttggatggcccagaggctggcagtggtggcgtcgtgctcacctaagagctccgcgaccgcatctttaagctggcttctacaacttcctacggacgagtttctgttgaaatatgtggaaaaaaaacaagaagggctttggtaagtattcgttgcattaggttataaattttagcatagacactgataatgcaatgctgactagttcagatattctagttacttagctgtgtagagtgtgactatgagactgtagttcagtagttgtaacagagtgcctggattcctggaattctttttggtgttcagtattcaggatgtgttttactgcgtattttaatttgttccacatcacaattttttccctctaaaatccttggattaaaatatccggttcttcagcattgatcaatgtgcagcccttgttctcctgtagtgtttttccctgcatttaaaacaccagtggttaaatttgctctagcaatcgtacatgcggaatggagatgaaaatgatgaaatatgacaggtacttatgatgaggcctttgctttggtactcctggtgcagctttctttaagttgtgccgagaagcttgtttagatctctgtgaatgccaaatttattgatttctgattcactccgttccactaagaaaactatggaccgtggaatcttttgattgagcaatcacatagtgcttgctaactatttctagccctttgatacttttgcatgtgtgttactgagacatcctatcttggttttgcgaccattaaaatatgcaaatcttaccccataagtgacaaacgttgcctggttatctgtcatggtaactatatttttgacatcgccgagaaatgatatgtaccttactcatct

SEQ ID NO: 75115 - DNA, 1725 bp, Zea Mays
cctacattctactttgtccaggtacacaggtctatccaaattcttagggacaaacaggagttagctgaagctcagaaggaattggccaaatttcaacttacacaagatacatctaaaaagaaggaagatgtaccaacatctattcctgagcaaaagaagcttgaagaaaaccctgacacatcaaaccagcaattggctcttgttttgcctcatcaggtgaacctgccatcacttgcccctagagcttctgaatcagtccaacagtacaagaatcaacctgtgcaaccatcagacccaacccctcccgtgccacagcaggaccgctatgttcttagccaagccatcgtctactacccacagcgccaagctccaggtatccaggacacacaagggcaaaaattgcaaccagaagtgcaatacttaccagcaagatccccagcacaagatgttccggtccatgctccatcccaaccacctcaggctggaaaccaaacacagccacagccttaccctccttaccagcagcagtggcaccagcaatcctcccagccagctcctgcaccggtggcccagacacagcagactttctcacagccatttcctccacccgcacagcagccccagttatccaatgtgcagcagtttccaccgcaaccagtacagcagccccaatccaatgctcaacagtatcctccaccagtgcaaccacagcaatctagcccacagcttcctcaggcaatgcaaccacaacatcctcctatgcaaactcagatgagacctcaaaccccaccaaactacccgcattatccaccccaccagccattgaaccccacccctgaaactcttcctggcaatgtggctatgcaaggatcatacaacactgctgttccatcaggtgccaaccgtcctgaactgccatattcgtatggaggggctggcatcccactgtctcagtctcagccactgccacagcacaacatgcaaaggcaccagctaccaccttcaagtcagggctcctttgggccacctccaagcaaagggtcctatgctggctctccacagtatgcaccacagggcaatccgcaaggctacagcacaggttacgcttacccaccaaacggccctccagcagtccagccgcaacagatgccccctggcggagttggcatgagtcatccggcttcgcatatgatgcgtggccatccctacggagaaatgatggagaaggcgatcaccatgggataccctagggaccaagtgctgaacgtcacccaaaggatggccgagagtggccagtcaatggatttcaacaccttgctcgacaggctgaacgaagcagggtcgggagctccacccccacgcgcgtggtgattggatccagtttgggcgccgtgcttggtgtcggttatgtgacttacgactgttatcatgcagctaaataaataagatttgggttgatgccgtgtactgcttatctgtacaatgtgcatatgtgatttttttctccatgtaactgccactggtactacgaatgcatcgcaccaattggactgttcagatattatgtatatatattccgatattcggaagcaattactggcaggcatcctaccatttttgtagcgtgtcatgtgtccgttgcgttgatgatgtgaacaactgttgtccgtcgacttcagcttgacgctaaattttgtaaagactcttttggatccctagatctta

SEQ ID NO: 75116 - DNA, 2514 bp, Zea Mays
ctccttccacggttttgccagtcgccacgcagatctcgcacagcacagttgtgccagccagccacgcccacgccccggcagacgggggggcagtgacgctgatgcgtcagtgccggcgagggccagcacgtccacgtccaccaggcattcgggaggaatctgggcggtggtggagttgaaggggacgatggcatggaagatttcgatgctgaaaggaagtccgggatgctgcacatgttctgcaaaacgcttacggcctctgacacaagcacgcatggagggttctctgttcctcgccgtgctgctgaggactgtttcccgcctctggattataatcagctcaggccttctcaagagctggttgccaaggatttgcatggagccaagtggaagtttcgtcatatatataggggtcagcctcgtaggcatctcttgactactggatggagttcatttgtcaataaaaagaaactggtttcaggggatgctgtgttatttctccgaggtgatgacggtgaactaaggctgggtgtgcggagggctattcagcttaaaaatgaggccctttttgaagatttcaatagtgacagcacaaagcggcattctttgacggctgtagctgattccttgaagaacagaagtgtttttcacatttcttacaatccaagagctactgcttcagaatatattattccatacgctaagttcctgaagagcctcaatcatccggtctgtattggagcaaggatcaactttcagtgccataatgaagatgttagtgaaaggcgatctggagtggttgttcgcattagtgaaatagatcccatgaaatggcctggctcgaagtggagaagcctgctggtaagatgggaggacggtgctgaatgtaatggccaagatagagtatctccatgggagatcgagatagctggtggttctgtctctgtttctcattctctttctgcatctagttctaaaagaaccaagttgtgtcctcagggaaatttggacgttccagcaatgtggaatggttgtactgactccatggaaactggaaagttacccagggtcttgcaaggtcaagaattgatgagttttaggacttgtcatgttccgtgtgctcctcaaactgctgaggctgcaaaacttcaatcttctgatgctagtaggttccttagtaatgcacatggctgcgcattgggtggtccaacaagcagactcgcagtgcatagctctggttttacctaccaatgtgtaggcttcaatgaatctattggattctcagaggtcttgcaaggtcaagaaatttctcgggcggttcctaagttccaaggaatgatgtcggaagcttgttcactgaaagacagatatgggctgcatagttatatgcgtgccccagttgctgttaatggattatcagctacaactcaagaatgttctctcgcactatctactccgccaggagcacaagtgccctctctctaccctggtaatgttgttaaccgaactgtggttccacaacttggactggcaaggaagtttggtggtggaggtacaaatggccagcagtctggcccatttgataggccgagggaactttggaccaggccacagcatgaaacacctgaccaaatgaacttggatcagtttgagactagaagaccttcagtgcctgtagatgctgctaagcttgggtctggtggaggggaggttcgcaaaactagctgcagactttttggtttctccttgactgaaaagatcttgccagcagatgatgatgacgtcaaggaagtgagctatgagactgagtgccagaacccacggatgctggacctgttcgggtacaactgctcaacaccgagtgccgctcttccagctctgtgtgctgccgccccctttggaatgtgatgctgcttcgaatctttcgataactttgctccatgtactcttagaagttttactttcccagtaccccagtgtagtcataagctgcttttgacatcattccctttggtctgcctcaagttaagcagtcatttgcacaagtaaacgaaggttcgttggtgaaccactcctcgacatgcctcaccctgtcacccaaactattgtggttagtctcaggatacccagagacaccacattgtaacttatgtcgatgatccttcagaactgttgtgcgatgaagctaacaatttgctctaaaagtactttgcttgctctaaaagtaccggctatgtatatttaaatcagcacctgtatgagtttttttagccctcacaagccctggttgcagtcgactaggccgtgtgattgtattagtatgctatctttttaaactgtcgcttatgagtctttattctagtgcattgtgtgaatactctgttcatcgcatgcaagtcttgtcttctgtttctgttggcttggtaggagatactctgattttataacatgtcagatttttattggtcaattcaactttgaccatcaatatacaaggaatttggtgaatacttg

SEQ ID NO: 75117 - DNA, 3048 bp, Zea Mays
aggaaacagctcgtccagtccgtagtccatagtactccatttgcaaattgcattgccacacctcggctcatccccacctcacctcggcctcacttcacaagttcacatcacgaaacaggagcgtcataaagacatgggcgtcgcagggtagcctcagacggtcagaccagtgacgcagcggcagcggcagcgggcatggggtcctgagtgaccgactgcgaaggagatggctggagcgcgacggccccggagccattaatggggtgctcatcctcctccccctcctcgcctcctccccgccgggtcgcggacgcggtcggctccgccttttaaccggcctgtccgggagcggggcgccggaaccctagtgctgctggtggcacgcggcgcgccccatgggcatcgatctcaacatggtggacggcgagggccacgagcgccgcccgccgccggtgacgtgccgggagctgtggcacgcgtgcgcggggcccgtggtcgcgctaccgcgccggggcagcctggtcgtgtacctgccgcagggccacctggccgcggcgggcggcggggacgtcgctgcggacctgccgccgcacgtggtgtgccgcgtcgcggatgtcgagctatgcgcggatgcggcgacggacgaggtgtgcgcgcggctggcgctggttgcggagggcgaggcattcgggaggaatctgggcggtggtggagttgaaggggacgatggcatggaagatttcgatgctgaaaggaagtccgggatgctgcacatgttctgcaaaacgcttacggcctctgacacaagcacgcatggagggttctctgttcctcgccgtgctgctgaggactgtttcccgcctctggattataatcagctcaggccttctcaagagctggttgccaaggatttgcatggagccaagtggaagtttcgtcatatatataggggtcagcctcgtaggcatctcttgactactggatggagttcatttgtcaataaaaagaaactggtttcaggggatgctgtgttatttctccgaggtgatgacggtgaactaaggctgggtgtgcggagggctattcagcttaaaaatgaggccctttttgaagatttcaatagtgacagcacaaagcggcattctttgacggctgtagctgattccttgaagaacagaagtgtttttcacatttcttacaatccaagagctactgcttcagaatatattattccatacgctaagttcctgaagagcctcaatcatccggtctgtattggagcaaggatcaactttcagtgccataatgaagatgttagtgaaaggcgatctggagtggttgttcgcattagtgaaatagatcccatgaaatggcctggctcgaagtggagaagcctgctgatgggaggacggtgctgaatgtaatggccaagatagagtatctccatgggagatcgagatagctggtggttctgtctctgtttctcattctctttctgcatctagttctaaaagaaccaagttgtgtcctcagggaaatttggacgttccagcaatgtggaatggttgtactgactccatggaaactggaaagttacccagggtcttgcaaggtcaagaattgatgagttttaggacttgtcatgttccgtgtgctcctcaaactgctgaggctgcaaaacttcaatcttctgatgctagtaggttccttagtaatgcacatggctgcgcattgggtggtccaacaagcagactcgcagtgcatagctctggttttacctaccaatgtgtaggcttcaatgaatctattggattctcagaggtcttgcaaggtcaagaaatttctcgggcggttcctaagttccaaggaatgatgtcggaagcttgttcactgaaagacagatatgggctgcatagttatatgcgtgccccagttgctgttaatggattatcagctacaactcaagaatgttctctcgcactatctactccgccaggagcacaagtgccctctctctaccctggtaatgttgttaaccgaactgtggttccacaacttggactggcaaggaagtttggtggtggaggtacaaatggccagcagtctggcccatttgataggccgagggaactttggaccaggccacagcatgaaacacctgaccaaatgaacttggatcagtttgagactagaagaccttcagtgcctgtagatgctgctaagcttgggtctggtggaggggaggttcgcaaaactagctgcagactttttggtttctccttgactgaaaagatcttgccagcagatgatgatgacgtcaaggaagtgagctatgagactgagtgccagaacccacggatgctggacctgttcgggtacaactgctcaacaccgagtgccgctcttccagctctgtgtgctgccgccccctttggaatgtgatgctgcttcgaatctttcgataactttgctccatgtactcttagaagttttactttcccagtaccccagtgtagtcataagctgcttttgacatcattccctttggtctgcctcaagttaagcagtcatttgcacaagtaaacgaaggttcgttggtgaaccactcctcgacatgcctcaccctgtcacccaaactattgtggttagtctcaggatacccagagacaccacattgtaacttatgtcgatgatccttcagaactgttgtgcgatgaagctaacaatttgctctaaaagtactttgcttgctctaaaagtaccggctatgtatatttaaatcagcacctgtatgagtttttttagccctcacaagccctggttgcagtcgactaggccgtgtgattgtattagtatgctatctttttaaactgtcgcttatgagtctttattctagtgcattgtgtgaatactctgttcatcgcatgcaagtcttgtcttctgtttctgttggcttggtaggagatactctgattttataacatgtcagatttttattggtcaattcaactttgaccatcaatatacaaggaatttggtgaatacttg

SEQ ID NO: 75118 - DNA, 3114 bp, Zea Mays
cgtagtccatagtactccatttgcaaattgcattgccacacctcggctcatccccacctcacctcggcctcacttcacaagttcacatcacgaaacaggagcgtcataaagacatgggcgtcgcagggtagcctcagacggtcagaccagtgacgcagcggcagcggcagcgggcatggggtcctgagtgaccgactgcgaaggagatggctggagcgcgacggccccggagccattaatggggtgctcatcctcctccccctcctcgcctcctccccgccgggtcgcggacgcggtcggctccgccttttaaccggcctgtccgggagcggggcgccggaaccctagtgctgctggtggcacgcggcgcgccccatgggcatcgatctcaacatggtggacggcgagggccacgagcgccgcccgccgccggtgacgtgccgggagctgtggcacgcgtgcgcggggcccgtggtcgcgctaccgcgccggggcagcctggtcgtgtacctgccgcagggccacctggccgcggcgggcggcggggacgtcgctgcggacctgccgccgcacgtggtgtgccgcgtcgcggatgtcgagctatgcgcggatgcggcgacggacgaggtgtgcgcgcggctggcgctggttgcggagggcgaggcattcgggaggaatctgggcggtggtggagttgaaggggacgatggcatggaagatttcgatgctgaaaggaagtccgggatgctgcacatgttctgcaaaacgcttacggcctctgacacaagcacgcatggagggttctctgttcctcgccgtgctgctgaggactgtttcccgcctctggattataatcagctcaggccttctcaagagctggttgccaaggatttgcatggagccaagtggaagtttcgtcatatatataggggtcagcctcgtaggcatctcttgactactggatggagttcatttgtcaataaaaagaaactggtttcaggggatgctgtgttatttctccgaggtgatgacggtgaactaaggctgggtgtgcggagggctattcagcttaaaaatgaggccctttttgaagatttcaatagtgacagcacaaagcggcattctttgacggctgtagctgattccttgaagaacagaagtgtttttcacatttcttacaatccaagagctactgcttcagaatatattattccatacgctaagttcctgaagagcctcaatcatccggtctgtattggagcaaggatcaactttcagtgccataatgaagatgcgatctggagtggttgttcgcattagtgaaatagatcccatgaaatggcctggctcgaagtggagaagcctgctggtaagatgggaggacggtgctgaatgtaatggccaagatagagtatctccatgggagatcgagatagctggtggttctgtctctgtttctcattctctttctgcatctagttctaaaagaaccaagttgtgtcctcagggaaatttggacgttccagcaatgtgtaagctctcatagcacaagactaatgcctgtatatgtatgctgctatccttttacctctatggtaattgactgtcgcattagatgttacagggaatggttgtactgactccatggaaactggaaagttacccagggtcttgcaaggtcaagaattgatgagttttaggacttgtcatgttccgtgtgctcctcaaactgctgaggctgcaaaacttcaatcttctgatgctagtaggttccttagtaatgcacatggctgcgcattgggtggtccaacaagcagactcgcagtgcatagctctggttttacctaccaatgtgtaggcttcaatgaatctattggattctcagaggtcttgcaaggtcaagaaatttctcgggcggttcctaagttccaaggaatgatgtcggaagcttgttcactgaaagacagatatgggctgcatagttatatgcgtgccccagttgctgttaatggattatcagctacaactcaagaatgttctctcgcactatctactccgccaggagcacaagtgccctctctctaccctggtaatgttgttaaccgaactgtggttccacaacttggactggcaaggaagtttggtggtggaggtacaaatggccagcagtctggcccatttgataggccgagggaactttggaccaggccacagcatgaaacacctgaccaaatgaacttggatcagtttgagactagaagaccttcagtgcctgtagatgctgctaagcttgggtctggtggaggggaggttcgcaaaactagctgcagactttttggtttctccttgactgaaaagatcttgccagcagatgatgatgacgtcaaggaagtgagctatgagactgagtgccagaacccacggatgctggacctgttcgggtacaactgctcaacaccgagtgccgctcttccagctctgtgtgctgccgccccctttggaatgtgatgctgcttcgaatctttcgataactttgctccatgtactcttagaagttttactttcccagtaccccagtgtagtcataagctgcttttgacatcattccctttggtctgcctcaagttaagcagtcatttgcacaagtaaacgaaggttcgttggtgaaccactcctcgacatgcctcaccctgtcacccaaactattgtggttagtctcaggatacccagagacaccacattgtaacttatgtcgatgatccttcagaactgttgtgcgatgaagctaacaatttgctctaaaagtactttgcttgctctaaaagtaccggctatgtatatttaaatcagcacctgtatgagtttttttagccctcacaagccctggttgcagtcgactaggccgtgtgattgtattagtatgctatctttttaaactgtcgcttatgagtctttattctagtgcattgtgtgaatactctgttcatcgcatgcaagtcttgtcttctgtttctgttggcttggtaggagatactctgattttataacatgtcagatttttattggtcaattcaactttgaccatcaatatacaaggaatttggtgaatacttg

SEQ ID NO: 75119 - DNA, 3042 bp, Zea Mays
cgtagtccatagtactccatttgcaaattgcattgccacacctcggctcatccccacctcacctcggcctcacttcacaagttcacatcacgaaacaggagcgtcataaagacatgggcgtcgcagggtagcctcagacggtcagaccagtgacgcagcggcagcggcagcgggcatggggtcctgagtgaccgactgcgaaggagatggctggagcgcgacggccccggagccattaatggggtgctcatcctcctccccctcctcgcctcctccccgccgggtcgcggacgcggtcggctccgccttttaaccggcctgtccgggagcggggcgccggaaccctagtgctgctggtggcacgcggcgcgccccatgggcatcgatctcaacatggtggacggcgagggccacgagcgccgcccgccgccggtgacgtgccgggagctgtggcacgcgtgcgcggggcccgtggtcgcgctaccgcgccggggcagcctggtcgtgtacctgccgcagggccacctggccgcggcgggcggcggggacgtcgctgcggacctgccgccgcacgtggtgtgccgcgtcgcggatgtcgagctatgcgcggatgcggcgacggacgaggtgtgcgcgcggctggcgctggttgcggagggcgaggcattcgggaggaatctgggcggtggtggagttgaaggggacgatggcatggaagatttcgatgctgaaaggaagtccgggatgctgcacatgttctgcaaaacgcttacggcctctgacacaagcacgcatggagggttctctgttcctcgccgtgctgctgaggactgtttcccgcctctggattataatcagctcaggccttctcaagagctggttgccaaggatttgcatggagccaagtggaagtttcgtcatatatataggggtcagcctcgtaggcatctcttgactactggatggagttcatttgtcaataaaaagaaactggtttcaggggatgctgtgttatttctccgaggtgatgacggtgaactaaggctgggtgtgcggagggctattcagcttaaaaatgaggccctttttgaagatttcaatagtgacagcacaaagcggcattctttgacggctgtagctgattccttgaagaacagaagtgtttttcacatttcttacaatccaagagctactgcttcagaatatattattccatacgctaagttcctgaagagcctcaatcatccggtctgtattggagcaaggatcaactttcagtgccataatgaagatgttagtgaaaggcgatctggagtggttgttcgcattagtgaaatagatcccatgaaatggcctggctcgaagtggagaagcctgctggtaagatgggaggacggtgctgaatgtaatggccaagatagagtatctccatgggagatcgagatagctggtggttctgtctctgtttctcattctctttctgcatctagttctaaaagaaccaagttgtgtcctcagggaaatttggacgttccagcaatgtatgttacagggaatggttgtactgactccatggaaactggaaagttacccagggtcttgcaaggtcaagaattgatgagttttaggacttgtcatgttccgtgtgctcctcaaactgctgaggctgcaaaacttcaatcttctgatgctagtaggttccttagtaatgcacatggctgcgcattgggtggtccaacaagcagactcgcagtgcatagctctggttttacctaccaatgtgtaggcttcaatgaatctattggattctcagaggtcttgcaaggtcaagaaatttctcgggcggttcctaagttccaaggaatgatgtcggaagcttgttcactgaaagacagatatgggctgcatagttatatgcgtgccccagttgctgttaatggattatcagctacaactcaagaatgttctctcgcactatctactccgccaggagcacaagtgccctctctctaccctggtaatgttgttaaccgaactgtggttccacaacttggactggcaaggaagtttggtggtggaggtacaaatggccagcagtctggcccatttgataggccgagggaactttggaccaggccacagcatgaaacacctgaccaaatgaacttggatcagtttgagactagaagaccttcagtgcctgtagatgctgctaagcttgggtctggtggaggggaggttcgcaaaactagctgcagactttttggtttctccttgactgaaaagatcttgccagcagatgatgatgacgtcaaggaagtgagctatgagactgagtgccagaacccacggatgctggacctgttcgggtacaactgctcaacaccgagtgccgctcttccagctctgtgtgctgccgccccctttggaatgtgatgctgcttcgaatctttcgataactttgctccatgtactcttagaagttttactttcccagtaccccagtgtagtcataagctgcttttgacatcattccctttggtctgcctcaagttaagcagtcatttgcacaagtaaacgaaggttcgttggtgaaccactcctcgacatgcctcaccctgtcacccaaactattgtggttagtctcaggatacccagagacaccacattgtaacttatgtcgatgatccttcagaactgttgtgcgatgaagctaacaatttgctctaaaagtactttgcttgctctaaaagtaccggctatgtatatttaaatcagcacctgtatgagtttttttagccctcacaagccctggttgcagtcgactaggccgtgtgattgtattagtatgctatctttttaaactgtcgcttatgagtctttattctagtgcattgtgtgaatactctgttcatcgcatgcaagtcttgtcttctgtttctgttggcttggtaggagatactctgattttataacatgtcagatttttattggtcaattcaactttgaccatcaatatacaaggaatttggtgaatacttg

SEQ ID NO: 75120 - DNA, 2316 bp, Zea Mays
gacttaagactgctaccactaccagtgtgctgcattcgggaggaatctgggcggtggtggagttgaaggggacgatggcatggaagatttcgatgctgaaaggaagtccgggatgctgcacatgttctgcaaaacgcttacggcctctgacacaagcacgcatggagggttctctgttcctcgccgtgctgctgaggactgtttcccgcctctggtcagcctcgtaggcatctcttgactactggatggagttcatttgtcaataaaaagaaactggtttcaggggatgctgtgttatttctccgaggtgatgacggtgaactaaggctgggtgtgcggagggctattcagcttaaaaatgaggccctttttgaagatttcaatagtgacagcacaaagcggcattctttgacggctgtagctgattccttgaagaacagaagtgtttttcacatttcttacaatccaagagctactgcttcagaatatattattccatacgctaagttcctgaagagcctcaatcatccggtctgtattggagcaaggatcaactttcagtgccataatgaagatgttagtgaaaggcgatctggagtggttgttcgcattagtgaaatagatcccatgaaatggcctggctcgaagtggagaagcctgctggtaagatgggaggacggtgctgaatgtaatggccaagatagagtatctccatgggagatcgagatagctggtggttctgtctctgtttctcattctctttctgcatctagttctaaaagaaccaagttgtgtcctcagggaaatttggacgttccagcaatgtggaatggttgtactgactccatggaaactggaaagttacccagggtcttgcaaggtcaagaattgatgagttttaggacttgtcatgttccgtgtgctcctcaaactgctgaggctgcaaaacttcaatcttctgatgctagtaggttccttagtaatgcacatggctgcgcattgggtggtccaacaagcagactcgcagtgcatagctctggttttacctaccaatgtgtaggcttcaatgaatctattggattctcagaggtcttgcaaggtcaagaaatttctcgggcggttcctaagttccaaggaatgatgtcggaagcttgttcactgaaagacagatatgggctgcatagttatatgcgtgccccagttgctgttaatggattatcagctacaactcaagaatgttctctcgcactatctactccgccaggagcacaagtgccctctctctaccctggtaatgttgttaaccgaactgtggttccacaacttggactggcaaggaagtttggtggtggaggtacaaatggccagcagtctggcccatttgataggccgagggaactttggaccaggccacagcatgaaacacctgaccaaatgaacttggatcagtttgagactagaagaccttcagtgcctgtagatgctgctaagcttgggtctggtggaggggaggttcgcaaaactagctgcagactttttggtttctccttgactgaaaagatcttgccagcagatgatgatgacgtcaaggaagtgagctatgagactgagtgccagaacccacggatgctggacctgttcgggtacaactgctcaacaccgagtgccgctcttccagctctgtgtgctgccgccccctttggaatgtgatgctgcttcgaatctttcgataactttgctccatgtactcttagaagttttactttcccagtaccccagtgtagtcataagctgcttttgacatcattccctttggtctgcctcaagttaagcagtcatttgcacaagtaaacgaaggttcgttggtgaaccactcctcgacatgcctcaccctgtcacccaaactattgtggttagtctcaggatacccagagacaccacattgtaacttatgtcgatgatccttcagaactgttgtgcgatgaagctaacaatttgctctaaaagtactttgcttgctctaaaagtaccggctatgtatatttaaatcagcacctgtatgagtttttttagccctcacaagccctggttgcagtcgactaggccgtgtgattgtattagtatgctatctttttaaactgtcgcttatgagtctttattctagtgcattgtgtgaatactctgttcatcgcatgcaagtcttgtcttctgtttctgttggcttggtaggagatactctgattttataacatgtcagatttttattggtcaattcaactttgaccatcaatatacaaggaatttggtgaatacttg

SEQ ID NO: 75121 - DNA, 2394 bp, Zea Mays
cttaagactgctaccactaccagtgtgctgcattcgggaggaatctgggcggtggtggagttgaaggggacgatggcatggaagatttcgatgctgaaaggaagtccgggatgctgcacatgttctgcaaaacgcttacggcctctgacacaagcacgcatggagggttctctgttcctcgccgtgctgctgaggactgtttcccgcctctggattataatcagctcaggccttctcaagagctggttgccaaggatttgcatggagccaagtggaagtttcgtcatatatataggggtcagcctcgtaggcatctcttgactactggatggagttcatttgtcaataaaaagaaactggtttcaggggatgctgtgttatttctccgaggtgatgacggtgaactaaggctgggtgtgcggagggctattcagcttaaaaatgaggccctttttgaagatttcaatagtgacagcacaaagcggcattctttgacggctgtagctgattccttgaagaacagaagtgtttttcacatttcttacaatccaagagctactgcttcagaatatattattccatacgctaagttcctgaagagcctcaatcatccggtctgtattggagcaaggatcaactttcagtgccataatgaagatgttagtgaaaggcgatctggagtggttgttcgcattagtgaaatagatcccatgaaatggcctggctcgaagtggagaagcctgctgatgggaggacggtgctgaatgtaatggccaagatagagtatctccatgggagatcgagatagctggtggttctgtctctgtttctcattctctttctgcatctagttctaaaagaaccaagttgtgtcctcagggaaatttggacgttccagcaatgtggaatggttgtactgactccatggaaactggaaagttacccagggtcttgcaaggtcaagaattgatgagttttaggacttgtcatgttccgtgtgctcctcaaactgctgaggctgcaaaacttcaatcttctgatgctagtaggttccttagtaatgcacatggctgcgcattgggtggtccaacaagcagactcgcagtgcatagctctggttttacctaccaatgtgtaggcttcaatgaatctattggattctcagaggtcttgcaaggtcaagaaatttctcgggcggttcctaagttccaaggaatgatgtcggaagcttgttcactgaaagacagatatgggctgcatagttatatgcgtgccccagttgctgttaatggattatcagctacaactcaagaatgttctctcgcactatctactccgccaggagcacaagtgccctctctctaccctggtaatgttgttaaccgaactgtggttccacaacttggactggcaaggaagtttggtggtggaggtacaaatggccagcagtctggcccatttgataggccgagggaactttggaccaggccacagcatgaaacacctgaccaaatgaacttggatcagtttgagactagaagaccttcagtgcctgtagatgctgctaagcttgggtctggtggaggggaggttcgcaaaactagctgcagactttttggtttctccttgactgaaaagatcttgccagcagatgatgatgacgtcaaggaagtgagctatgagactgagtgccagaacccacggatgctggacctgttcgggtacaactgctcaacaccgagtgccgctcttccagctctgtgtgctgccgccccctttggaatgtgatgctgcttcgaatctttcgataactttgctccatgtactcttagaagttttactttcccagtaccccagtgtagtcataagctgcttttgacatcattccctttggtctgcctcaagttaagcagtcatttgcacaagtaaacgaaggttcgttggtgaaccactcctcgacatgcctcaccctgtcacccaaactattgtggttagtctcaggatacccagagacaccacattgtaacttatgtcgatgatccttcagaactgttgtgcgatgaagctaacaatttgctctaaaagtactttgcttgctctaaaagtaccggctatgtatatttaaatcagcacctgtatgagtttttttagccctcacaagccctggttgcagtcgactaggccgtgtgattgtattagtatgctatctttttaaactgtcgcttatgagtctttattctagtgcattgtgtgaatactctgttcatcgcatgcaagtcttgtcttctgtttctgttggcttggtaggagatactctgattttataacatgtcagatttttattggtcaattcaactttgaccatcaatatacaaggaatttggtgaatacttg

SEQ ID NO: 75122 - DNA, 1156 bp, Zea Mays
caatgactcctgtacgcatcatcccggatccgagaggcaccaactcactctttctacgcccttccctccgcctccttcctctccaagaaaaagtaagcgtggagagcaaaaatctccgccgccgcgcacctacgcccacggaacacgccgtcatatgagtggagagagaaccccgcgcctcctcctccgtgagctccgtacaaggaggctagagcggcggcagcatcggaggggtcggtgaggagggcgatggtgctcccgctggtgaagctcggctcgctcgcgttccggacgctgagcaagcccatcgcggcccgcctcaagtacaacgccggcatccaccccaagttccgcggtctcatcatcggcatcgcgcaggcaaaccatcgtttcacgacaaatatgcagaggcgactttacggacgtgcgactgacattcacattcggcccctgaatgaggagaaagctattcaagctgccgcagatcttctcggtgaactatttgttttctcggtcgctggtgctgcgattatctatgaggtgcaaagaagtgctaggtcagaagccagaaaagaggaggcccgtcgtctggaaattgagaaaagggaggagcaactagcgctggaagtacagataatgaaacacaagattagcgagatggagcggcagtactcgaagtggacccttcccgggcttcgcggcttcggcactgcccaggcggcggcacagcctgctggtactcagcacccaacagctgcgtgattgctctacttctgcaactgtcgacagctcgcgatctggatggccgactgcagactgcctctgtttagcttgcattttactccgttacataattgattcgacttcagtagctggcgaaaggctgagggttacgttgtggtacaactgaatcgaagttgttatcgccttataggttgatcggatcggcgacatgacattcagaccatgtttgtcgtagcttaacttatttcacagcttcttcatagatttaagcaggagatagatttaaatagaagtaccaaacagtagcttctgcaacagtctccccttttagtcgtagcttaacttatttcacagatttgtcgtagcttaacttattttacagcttcttcgttgctttttagaataaattaag

SEQ ID NO: 75123 - DNA, 2354 bp, Zea Mays
atgactcatgagacgacggcagtctccgtctcccgctgttattggacggcgctttcggcattgacgagcaccgatgccctaatccgcatgctgggcccggccgtcgcttttcccaaggccgccgatcccgacgacgacccaacaaagtggcagccagaaaactcggcagagcatctcgcttgcgaaacaaaggacggcgcgccagaggaggggaaaggaaaacaaccaccacgaccccgtccattccgttccacttccacccgagctcagcgatcgcggcggcggatgcggatgcggatggggaaggggccgtcgtcgcgggcggggtcgcggcaccggcagttccgcgcccgagccatgacccgcgtcgacgacctccaggaggtcttctcgggcctgcagtccgcgcgcaaggactcacgctccgcggacgccgccgtcctcgaggcgcagctccagcagatgctgcgggagtggcgctccgagctcagcgatccctcccccgcctcctccctgcagggcaacgccagggaactgtcggatccgccttccgatactcttcgtctgctgcagttggtggtggccgaggaggaggatgacgccacgagcaagatggtcgagcagcagcagcagcagcccccacctccgctcccagctaaccggagccaggggcacgcgcatgttgtgtgccagggcatgaagccggagccgcgcgaggaagcagttgacgtcgctgtggaccagccgcagctgctgagtcagggggttctgcctaatggtgctgctaccgcgtctgcgatgttccatgatcagctgtactatgtgaaccaggagctcacggtcgaggattttctttatgatgatgattacaagatagatctttctgggtctaatctggatgtcattaataacctagaagggattgttcagctggaatatccagatcacaatttgccgcaagggttagcccctaatgcataccttgacatgaatagttgtgggcagagtgccggggctgttttcctgcacatgccagatttgctcacaacaatgacttcagcaccttctgcattcctgaagccaaaatgcgctctctgggactgccccaggcctgctattggatcagaaagatggcataattattgcagcatgtatcatgctgatttggctgtgcaggaagagggccctccaggcacaatgcctgtgatccgtccaagaggcattgatctgaaagatggccccctgtttgctgctcttagtgcaaaagtccaaggaaaaaacgttggggtccctatctgtgaaggagctgccactgcaaagtctccatggaatgcacctggtgaatctatcagagaatggttgttttttgacaaaccaaggagggcatttgatagtggaaatcggaagcagcggtccttgccagactacaacggccgtggttggcatgaatctaggaagcaggtgatgaaggactttgggggtctgaagaggtcctattacatggatccacaaccatccaacggctatgaatggcacctatatgaatatgagatcaatgactgtgatgcttttgccttatatcggcttgaattcaagtcttcagatgcaaagaaaattgcaaaatccaaattaggttgtaatccactgaatgaaattcagcagcaaatggatagactcagtgcagacagtcctgtcgacaccaaacggacggcccggagccggacagagcctaacccgatagatgtcaatactaacatctattcagttccaaacaccacagttcaaactgatgttccaaatgcttatcagccagggtcacaagtggaccagatgacatatttgaacggtagtgtcgtttatgggcctcatctgccgtacggttactcgactgaaagaagtgacttctattggaactcaaatgatgggacatgagaagatataaacacatgttcgatttatggcatatttggccttcaagttctaacaattcccgttatgattattgggtcaaatctattagcatgacccccatcttcttgtaattgtagttggcccaatctacaggaaacatctctgaaacaagggatgccaataggcaatactgcagttctattttctgtggcaactttgtcgttgtaatatagccatatcatgataatagcaccctcctcgatgtgcagctgtatgtaacatatatctctggcttggtggacgataaccgttaaccagtcacgttggtgcctccatttatcggttacgttgtatgtgtaccattattcctgttctgaatctgggtgcaatctttatcctcaaactccgattgcacttgggtcagatggagtaaaaaccagccc

SEQ ID NO: 75124 - DNA, 2177 bp, Zea Mays
atgactcatgagacgacggcagtctccgtctcccgctgttattggacggcgctttcggcattgacgagcaccgatgccctaatccgcatgctgggcccggccgtcgcttttcccaaggccgccgatcccgacgacgacccaacaaagtggcagccagaaaactcggcagagcatctcgcttgcgaaacaaaggacggcgcgccagaggaggggaaaggaaaacaaccaccacgaccccgtccattccgttccacttccacccgagctcagcgatcgcggcggcggatgcggatgcggatggggaaggggccgtcgtcgcgggcggggtcgcggcaccggcagttccgcgcccgagccatgacccgcgtcgacgacctccaggaggtcttctcgggcctgcagtccgcgcgcaaggactcacgctccgcggacgccgccgtcctcgaggcgcagctccagcagatgctgcgggagtggcgctccgagctcagcgatccctcccccgcctcctccctgcagggcaacgccagggaactgtcggatccgccttccgatactcttcgtctgctgcagttggtggtggccgaggaggaggatgacgccacgagcaagatggtcgagcagcagcagcagcagcccccacctccgctcccagctaaccggagccaggggcacgcgcatgttgtgtgccagggcatgaagccggagccgcgcgaggaagcagttgacgtcgctgtggaccagccgcagctgctgagtcagggggttctgcctaatggtgctgctaccgcgtctgcgatgttccatgatcagctgtactatgtgaaccaggagctcacggtcgaggattttctttatgatgatgattacaagatagatctttctgggtctaatctggatgtcattaataacctagaagggattgttcagctggaatatccagatcacaatttgccgcaagggttagcccctaatgcataccttgacatgaatagttgtgggcagagtgccggggctgttttcctgcacatgccagatttgctcacaacaatgacttcagcaccttctgcattcctgaagccaaaatgcgctctctgggactgccccaggcctgctattggatcagaaagatggcataattattgcagcatgtatcatgctgatttggctgtgcaggaagagggccctccaggcacaatgcctgtgatccgtccaagaggcattgatctgaaagatggccccctgtttgctgctcttagtgcaaaagtccaaggaaaaaacgttggggtccctatctgtgaaggagctgccactgcaaagtctccatggaatgcacctgaacttttcgatctttacatatttgaaggtgaatctatcagagaatggttgttttttgacaaaccaaggagggcatttgatagtggaaatcggaagcagcggtccttgccagactacaacggccgtggttggcatgaatctaggaagcaggtgatgaaggactttgggggtctgaagaggtcctattacatggatccacaaccatccaacggctatgaatggcacctatatgaatatgagatcaatgactgtgatgcttttgccttatatcggcttgaattcaagtcttcagatgcaaagaaaattgcaaaatccaaattaggttgtaatccactgaatgaaattcagcagcaaatggatagactcagtgcagacagtcctgtcgacaccaaacggacggcccggagccggacagagcctaacccgatagatgtcaatactaacatctattcagttccaaacaccacagttcaaactgatgttccaaatgcttatcagccagggtcacaagtggaccagatgacatatttgaacggtagtgtcgtttatgggcctcatctgccgtacggttactcgactgaaagaagtgacttctattggaactcaaatgatgggacatgagaagatataaacacatgttcgatttatggcatatttggccttcaagttctaacaattcccgttatgattattgggtcaaatctattagcatgacccccatcttcttgtaattgtagttggcccaatctacaggaaacatctctgaaacaagggatgccaataggcaatactgcagttctattttctgtggcaactttgtcgtttcaaaaaaaaaaaaa

SEQ ID NO: 75125 - DNA, 503 bp, Zea Mays
ggaagaaatcaccatttgtcatcgatttattgccagcagtttggcaagacaactgaactctcaaggcgtgaaagagaggagcttgagaaacaaaaagctcatgaacgttatatgaagcttcaggagcaaggaaaaacagaacaagcacgaaaagatttggaacgtcttgctttaataagacaacaaagggctgatgcggcgaagaaacgcgaagaggagaaagctggagcagaggaagtccgaagcacggaagtaactgcaacagtcatggaccaagagtccacgaagtgacgaaggcacgatctgcgtcgattggatatttgtttctaatgcaccagctaccttttcatagacccggcctctattctgtattcccataaaaatatgcattgacagttgacaccagtctcgtggtcgtggtttcctgtaaacttgagcttgacaaaactgaaaagtagtaaagatcagcttgcaagaaactggctcttcttatttgctgtcca

SEQ ID NO: 75126 - DNA, 1614 bp, Zea Mays
cagaaacagtatagaaatagtagaagcgcgtaaggattaaatccagcgaagtgttcaccttcttcaacttgaactccttgtggtccggactgacgaatcggggacggagattcacatcaacgcagatgtggaccccacgaccgagtcgtcgcgtcgtctcctccgcttccgacactctcctgctctgcctcctcctgcttgccggcgccgccgacgccgcgccgctgctcgtaggcgtttttcccaaagatgaggcgtacttcgcgacgcaggtgatcgcctgcagagacggctcgggctctttcccgaggagccggctcaacgacgggtactgcgactgcggcgatggaaccgatgagccaggcacttcagcttgtccagaaggcaagttttactgcagaaatatcggagatacccctcgattgttgttctcttcgtttgtgaatgacaaaatttgcgattgttgtgatggaagtgatgagtacgaaagtggtatccattgccagaacacctgtagaaatataaaggatactgctgaggctgatggtggtggtggcgacctcgcagtaacacatttagattctactgatgattttatgagtaaacatgcaattgctatggaagaccatatccagaacaacagcaacagagaccttgtccagaagataagaggattgagaacagccctagttattgagctgggccttgttgtatgtatttttgctttttgcattgctcggcgtcgcactagaacacgcaggagacagcatattttgaaacgttagctgaacagtagtaatatacaaagacgatagatcggtgctcatttgcaaacattaaagcttccggagatggtggagaatcagagatgggatgaaggagcctgcacgtcatcctctttaaatcacgaggtctaatgtcgatctgcattcgagattcatgcaaaatctcttatatcggaagggttttaagaatatattctagaatagtggtaaaaacatgcactgaagatcgtgcaaaatcaaatgtgtcaagttgtgaccagatggagtgtacatgtttaacataaataacttaattgttgtaactgatttgtggccccgtcgtgcttcctctgtaactatgagttgctcctaccaggaggaattgacgatgctccatgcctgaaccttgcaacttgttgtatctataatgtttgtctctagcagtgtactctatacctattctatgtgttcgttctttatgatcttctctaaaagattcactctatatctttggtagtagtatcgttctatatatctaaatacttaatattagagacatgttttacttttatttattgtacgtatgtatttgtcatacgctcaaatattttgtatatatatatttttgataaattcgttgtttaaattattaaaatggatagggaagagagagagaatatctatgtatggagaatgaaagaatgccctctaaggacgctgattcctgaaagaatctattcttaaaattctacagatttatcaaatctatgtatggtatttgatgagagaatacctgtgtatgtgtgtgctaggttcagacgtagattctgaaaatttgacacactatgag

SEQ ID NO: 75127 - DNA, 1488 bp, Zea Mays
aaacagtatagaaatagtagaagcgcgtaaggattaaatccagcgaagtgttcaccttcttcaacttgaactccttgtggtccggactgacgaatcggggacggagattcacatcaacgcagatgtggaccccacgaccgagtcgtcgcgtcgtctcctccgcttccgacactctcctgctctgcctcctcctgcttgccggcgccgccgacgccgcgccgctgctcgtaggcgtttttcccaaagcttgtccagaaggcaagttttactgcagaaatatcggagatacccctcgattgttgttctcttcgtttgtgaatgacaaaatttgcgattgttgtgatggaagtgatgagtacgaaagtggtatccattgccagaacacctgtagaaatataaaggatactgctgaggctgatggtggtggtggcgacctcgcagtaacacatttagattctactgatgattttatgagtaaacatgcaattgctatggaagaccatatccagaacaacagcaacagagaccttgtccagaagataagaggattgagaacagccctagttattgagctgggccttgttgtatgtatttttgctttttgcattgctcggcgtcgcactagaacacgcaggagacagcatattttgaaacgttagctgaacagtagtaatatacaaagacgatagatcggtgctcatttgcaaacattaaagcttccggagatggtggagaatcagagatgggatgaaggagcctgcacgtcatcctctttaaatcacgaggtctaatgtcgatctgcattcgagattcatgcaaaatctcttatatcggaagggttttaagaatatattctagaatagtggtaaaaacatgcactgaagatcgtgcaaaatcaaatgtgtcaagttgtgaccagatggagtgtacatgtttaacataaataacttaattgttgtaactgatttgtggccccgtcgtgcttcctctgtaactatgagttgctcctaccaggaggaattgacgatgctccatgcctgaaccttgcaacttgttgtatctataatgtttgtctctagcagtgtactctatacctattctatgtgttcgttctttatgatcttctctaaaagattcactctatatctttggtagtagtatcgttctatatatctaaatacttaatattagagacatgttttacttttatttattgtacgtatgtatttgtcatacgctcaaatattttgtatatatatatttttgataaattcgttgtttaaattattaaaatggatagggaagagagagagaatatctatgtatggagaatgaaagaatgccctctaaggacgctgattcctgaaagaatctattcttaaaattctacagatttatcaaatctatgtatggtatttgatgagagaatacctgtgtatgtgtgtgctaggttcagacgtagattctgaaaatttgacacactatgag

SEQ ID NO: 75128 - DNA, 2129 bp, Zea Mays
agaagcgcgtaaggattaaatccagcgaagtgttcaccttcttcaacttgaactccttgtggtccggactgacgaatcggggacggagattcacatcaacgcagatgtggaccccacgaccgagtcgtcgcgtcgtctcctccgcttccgacactctcctgctctgcctcctcctgcttgccggcgccgccgacgccgcgccgctgctcgtaggcgtttttcccaaagatgaggcgtacttcgcgacgcaggtgatcgcctgcagagacggctcgggctctttcccgaggagccggctcaacgacgggtactgcgactgcggcgatggaaccgatgagccaggcacttcagcttgtccagaaggcaagttttactgcagaaatatcggagatacccctcgattgttgttctcttcgtttgtgaatgacaaaatttgcgattgttgtgatggaagtgatgagtacgaaagtggtatccattgccagaacacctgtagaaatataaaggatactgctgaggctgatggtggtggtggcgacctcgcagtaacacatttagattctactgatgattttatgagtaaacatgcaattgctatggaagaccatatccagaacaacagcaacagagaccttgtccagaagataagaggattgagaacagccctagttattgagctgggccttgttgtatgtatttttgctttttgcattgctcggcgtcgcactagaacacgcaggagacagcatattttgaaacgttagctgaacagtagtaatatacaaagacgatagatcggtgctcatttgcaaacattaaagcttccggagatggtggagaatcagagatgggatgaaggagcctgcacgtcatcctctttaaatcacgaggaaggatccaaattacaaaaggatggtaatggcctgcttcattcaagcagtctacctgcttgaactggacaggcaggacatgaaaggcgaagaggatggccttgctccaaaatggtggagacccttcaagtacaaggtcacgcagacattggtggatgagagagatggttccatctatggcgccatgctggagtgggatcgttcttctgccttgtctgactttatcctcatgagaccaagcggggcaccgagggctgtgttagctctcagaggaaccctcctgcagaagccaactatgaagagagatctgcaggatgaccttcgcttcttggtatgggagagcctcaaaggttcagtgagatttgttggtgctttagcagcgctaaaatcagaagttgagaagtttggcagcgccaatgtttgtgttgccgggcactccttgggagctggctttgcactccaagtctgcaaggagcttgccaaacatggagtttttgtggagtgtcatcttttcaatccaccttctgtttcactggccatgggtgtaaggaccatgagtgagaaggtcagctacctgtggaagaaagtcaaaggaagtctgccattgaaggaagacacaacaccaccacttgagactgctaaggctgatgcaagtgacaagaagagattgcgcgccgagaagaaatgggtgccacatttatatgtcaacaacagtgattacatctgctgccactacaacgctccatcttgctcgtccacaacaacagatggtgcttccaacgaacagcagcaacaacaacgcaaggctagtgaaattgccggtgatgtggtcgcaaagctctttgtgacatcaaaagggccacagaaattccttgaggcgcatgggctacagcagtggtggtcagatggcatggagctgcagctggctctctatgacagcaagctcataaacaggcagctgaaatccatctacgcaacaacaacagaaatgcaatctcctgccaagtcctagacacggcttaagccgctgttgcatcggtcattagaaatactctttctaaccagtgtgtgtgttcctttatcaactgagaatgttttattactccagtgatgccccaaaacagtcgaataatttgattaaagggatagtgtgtgaacagtttcgacaaaacaacattgtatttcaactcaaatctctacttatatgtaaagtgggaatttcttccacgtcttcctccc

SEQ ID NO: 75129 - DNA, 3422 bp, Zea Mays
cttttcttatccccagccgccacaaagacagccggccgcctgggaacttttttttcttttcttcttcctggccgaccgcacctcccacttctctctatttttttttccttgcaccatggcttggcaaacggatctaggctggcttcctctctttctgttcttctcctgctctgttctttgcttctttcttccccaccgaacagctcaaaccgggtgagctagccgctgcctgagcgcgcagccggctcacatatccgaggatgaccggattaatgttcaggggcatgcgggttttaccgccggtgtgcgcgtcccctcagtagggcgcgccgccgtcggtcaaacgccgacagctgtccctgttgacagcagagaaaaggggtcgacctcttggtcgacttctgtgactgtgcacgcccagatcttatctcccttacctctttgactcgatctcgttctctgtgatgtatgagatggatctaatgtaatattcgggatcgagttatgagttgatagaacgtagattttctgtgaggatttttttgtaccttttctaatctgctctgtcatctaggccgtggatgtaaaagatcccgagccactgtgatctctgttgacccagatttaaaactgatcagggttaggttattaaaccctaaccctaaaacatcgatctgtttttactatctcgaatcttctgggtttggccgagaccaaatctctgttagtggccaaaaccctagatttagggttaggtaaaccctaacccgagagataaaaaatattctttctattttaatctatctgttctcgggtgataaacgaaaaaaatagttcaatcatgttgatccgagacttttctgtgatctcataaaactgatgcggattaggagatctagggttcttaggacggctttgataccattgttagaatctatactgcctaggatcgattcctaagtccctagaataccaatccgtctgtaactgaaagtaaaatcttgatgacgtgtagatctgatctactatctactgagaggaacggggaaacacacctttattgttgttgctatcttcataccgtcgccctgcagagaagcagcaggcatcgggatccgagccgctgtaggttgtcgcgtttctaaacactccgacgtctaggcgatggggcctctgaggactagggttttggggcgaggtactagcgttagtttttcctgcgaccccttagtcctatatatagcgtcgtgtgtctgggggctccaaccgaggttagtgtgggccctcccgatcaagggcccgattaaaggaacgatagttgggttaagcccaatccagtctctattgaccggctgtagaggacacacccaacactcggctctttcttgtcttattgcccctggcaccaggcgagtactacgccccgcggcttccgatgacgccgccgccgaacctttcgccggcgccggccatcacgggcggcacgttcgcgtacgacgacctagcggcggcgacgggcaggttctcggacgcgaacctactcgggcagggcgggttcgggcacgtgtaccgcggcacggtgggcgggcgggaggtggccatcaagaagctgcaggccggcggcgggcagggcgaccgcgagttccgcgccgaggtggagatcatcagccgcgtgcaccacaagaacctcgtctccctcgtcggctactgcctctacggcgagcagcggctgctcgtgtacgaggacagggagtggcaggccgacgctggactggccgaggcggtggaggatcgcggttggctccgcgaagggcctcgcgtacctgcacgaagactgttatccaaagatcatccatcgtgacatcaaagcggcgaacatccttctggattaccattacgagccaaaggttgcagatttcgggttggccaaataccaagcagctgaagtcacccctgtttctacgcgtgtgataggaaccttcggatatctggctccagagtacgctgccacaggcaaaattagcgaccggtccgacgtcttctccttcggtgtgatgctgctggagctcatcaccgggaggaaaccaatcatggcatcttcagagtttcagtctgtggcattggtttcttgggccattgctgacaagagctgtggaggaggaaaactacgacgacctcatcgatccgaggctggagaccgactacgacgcgcacgacatggcgcggctggtcgcgtgcgccgcggccgccgtgcgccagaccgcgcggtgtcgcccgcggatgagccagatcgtccggtacctggagggcgagctgtcggtggaggacctgaacgccggcgtggtgccggggcagagcgcggtgcagcggtcgggcggcggcaccacggaccggatcagccggctcgggcgcgtgagggagcaccgtgaccgggacgaccatcacggagtgcacgagcagcgatcccaccagcgaggacgcgggcgacacgggcgaggtggcgggcgcgcaggggcagcagtgctccggcaggcgcgcggccgtctacaccgagaggatgagccggcgcaccaccgccagacgcaccctgaattcgttgttcgttcgcgtacatcagcatactgaactttgcttcaacttttctaaattatataagttactctattctttttaacaacttagatctcaaagtttttggttgtgcgacatagggatgaaaaacgaacggatatatacagaaaacctctctggttttgtttccgtatccgaattttatcatcggaaactacatttatcatgctcttcatgcaaaatacaactgcaatttggagctccactaatgtaaaacgatctccactgatgctaaataaaactttccataacatacacaacagcaatcaacactttgaatgcaaaatagaactatcagatcaggcagcagcagcagcagcaccagaaaacacgtccgccgccgcacgacaccagcttaccgtaagatcagcagatgaccgtgttgcagctgttggtgttgacgccggtctcggttcctccgacgaaggggtcgatcttgacccagagcagggagaagacggaggcgaggaggacggaccagagcaccacgatggtgggcgtgcggttctggcggcccatgaggcccttgaggaacgggtagaggtgcatgatcacccacatggcgaagaacaccttgccgaagagcgggccccaggactcgtagccgctgttcagcgcggccgagaaccccgccaccacgcccaccaggttcagcaccaggatgctggtgggcgggatcagcaccgtcgtccacttgaacacgtacagctccccgaactccgtgtcgtccgtggccttcgccgtcaccgtgaagttggtgtccagcccggcgatcatcttgaggatgccct

SEQ ID NO: 75130 - DNA, 3427 bp, Zea Mays
cttttcttatccccagccgccacaaagacagccggccgcctgggaacttttttttcttttcttcttcctggccgaccgcacctcccacttctctctatttttttttccttgcaccatggcttggcaaacggatctaggctggcttcctctctttctgttcttctcctgctctgttctttgcttctttcttccccaccgaacagctcaaaccgggtgagctagccgctgcctgagcgcgcagccggctcacatatccgaggatgaccggattaatgttcaggggcatgcgggttttaccgccggtgtgcgcgtcccctcagtagggcgcgccgccgtcggtcaaacgccgacagctgtccctgttgacagcagagaaaaggggtcgacctcttggtcgacttctgtgactgtgcacgcccagatcttatctcccttacctctttgactcgatctcgttctctgtgatgtatgagatggatctaatgtaatattcgggatcgagttatgagttgatagaacgtagattttctgtgaggatttttttgtaccttttctaatctgctctgtcatctaggccgtggatgtaaaagatcccgagccactgtgatctctgttgacccagatttaaaactgatcagggttaggttattaaaccctaaccctaaaacatcgatctgtttttactatctcgaatcttctgggtttggccgagaccaaatctctgttagtggccaaaaccctagatttagggttaggtaaaccctaacccgagagataaaaaatattctttctattttaatctatctgttctcgggtgataaacgaaaaaaatagttcaatcatgttgatccgagacttttctgtgatctcataaaactgatgcggattaggagatctagggttcttaggacggctttgataccattgttagaatctatactgcctaggatcgattcctaagtccctagaataccaatccgtctgtaactgaaagtaaaatcttgatgacgtgtagatctgatctactatctactgagaggaacggggaaacacacctttattgttgttgctatcttcataccgtcgccctgcagagaagcagcaggcatcgggatccgagccgctgtaggttgtcgcgtttctaaacactccgacgtctaggcgatggggcctctgaggactagggttttggggcgaggtactagcgttagtttttcctgcgaccccttagtcctatatatagcgtcgtgtgtctgggggctccaaccgaggttagtgtgggccctcccgatcaagggcccgattaaaggaacgatagttgggttaagcccaatccagtctctattgaccggctgtagaggacacacccaacactcggctctttcttgtcttattgcccctggcaccaggcgagtactacgccccgcggcttccgatgacgccgccgccgaacctttcgccggcgccggccatcacgggcggcacgttcgcgtacgacgacctagcggcggcgacgggcaggttctcggacgcgaacctactcgggcagggcgggttcgggcacgtgtaccgcggcacggtgggcgggcgggaggtggccatcaagaagctgcaggccggcggcgggcagggcgaccgcgagttccgcgccgaggtggagatcatcagccgcgtgcaccacaagaacctcgtctccctcgtcggctactgcctctacggcgagcagcggctgctcgtgtacgaggacagggagtggcaggccgacgctggactggccgaggcggtggaggatcgcggttggctccgcgaagggcctcgcgtacctgcacgaagactgttatccaaagatcatccatcgtgacatcaaagcggcgaacatccttctggattaccattacgagccaaaggttgcagatttcgggttggccaaataccaagcagctgaagtcacccctgtttctacgcgtgtgataggaaccttcggatatctggctccagagtacgctgccacaggcaaaattagcgaccggtccgacgtcttctccttcggtgtgatgctgctggagctcatcaccgggaggaaaccaatcatggcatcttcagagtttcagtctgtggcattggtttcttgggctaggccattgctgacaagagctgtggaggaggaaaactacgacgacctcatcgatccgaggctggagaccgactacgacgcgcacgacatggcgcggctggtcgcgtgcgccgcggccgccgtgcgccagaccgcgcggtgtcgcccgcggatgagccagatcgtccggtacctggagggcgagctgtcggtggaggacctgaacgccggcgtggtgccggggcagagcgcggtgcagcggtcgggcggcggcaccacggaccggatcagccggctcgggcgcgtgagggagcaccgtgaccgggacgaccatcacggagtgcacgagcagcgatcccaccagcgaggacgcgggcgacacgggcgaggtggcgggcgcgcaggggcagcagtgctccggcaggcgcgcggccgtctacaccgagaggatgagccggcgcaccaccgccagacgcaccctgaattcgttgttcgttcgcgtacatcagcatactgaactttgcttcaacttttctaaattatataagttactctattctttttaacaacttagatctcaaagtttttggttgtgcgacatagggatgaaaaacgaacggatatatacagaaaacctctctggttttgtttccgtatccgaattttatcatcggaaactacatttatcatgctcttcatgcaaaatacaactgcaatttggagctccactaatgtaaaacgatctccactgatgctaaataaaactttccataacatacacaacagcaatcaacactttgaatgcaaaatagaactatcagatcaggcagcagcagcagcagcaccagaaaacacgtccgccgccgcacgacaccagcttaccgtaagatcagcagatgaccgtgttgcagctgttggtgttgacgccggtctcggttcctccgacgaaggggtcgatcttgacccagagcagggagaagacggaggcgaggaggacggaccagagcaccacgatggtgggcgtgcggttctggcggcccatgaggcccttgaggaacgggtagaggtgcatgatcacccacatggcgaagaacaccttgccgaagagcgggccccaggactcgtagccgctgttcagcgcggccgagaaccccgccaccacgcccaccaggttcagcaccaggatgctggtgggcgggatcagcaccgtcgtccacttgaacacgtacagctccccgaactccgtgtcgtccgtggccttcgccgtcaccgtgaagttggtgtccagcccggcgatcatcttgaggatgccct

SEQ ID NO: 75131 - DNA, 1915 bp, Zea Mays
agcccagtcacctggtcgttcactgctcggccgccgcctgcaatcactgctagtccgcaggcaaccgagagcccgagaccgcccaggtgcccaccactccaccagccaaccctagagcctctccagtctccactgctcggccgccgcctgccgcagcccgccgtccactggtcccgcctcccggcgtccgctccacgcctccactgctcccggcgtccgctccattgctaccatcgtccggcgttctgctcctgcgccctccctttgattcgttgccagttgtagtgtccgggcagatttgagctgtggcagcaagcaaggattgacgaagcgtgcgttcccatcgcaccaccatgggctacacagagatcgacatccacccctctgggagcggcaagatgtgatagatattagtatgaaagataaaaactagaatgctatgcctgtcagaggagctttcttcagtttcagaacacacctctccatctttcggtgcttggtggatcaccgtctaaacgatccaccaccagaaccgcccaaccccaagatagctccatctcagtcgttgtacccgttcaatggcgagctggtggcagcgatgtaggagatgatccatgccgaggtgcacaagtacatgttagtggacggcacctgccaaagatacaccgtttctactgtttttcagttggagaaaacatttaagacaacattttcatcgtttgttctccatatggggcttgtttcacgccacttgaaggaagaagggaatggtggtgttaagttcggacaatacatctacacatcttggagcatcggcatcaatgttctcaatcttctcaaatttcaaattatactggtcattactttgaccattagaataaaatccctataaaacgtggccatgcaatcactggttgtaaactgatgggcagaatgttgtaggatggattggctcaagaactaatatagcttacttatgacaatgtagtaattcatgaagttattgttccttatgttcatggagtttgttctgctaggtttttatgcttttaatttctatttccttaacgaaacctcaggcaccttaaagacagcttggatgattggtttcatgaacagctagagaacttggatgatgattatcttgtgtttgattgccctaatatattctcaaatcatcttttcatgctttagttgtttcttaatagttgcacagtttcatctcactcatattcttgccacttacatgtatgtgacaaaacagacaatccgtcttttttattgcttatggcgttgtgcattatacatgtccaccaattatatacaaataccatttgtgggttacctctggtgtgtttaggtgcgagctgcaatcaaagttaaggcattagtcatcatttgcttcacctcttctggacaggctgcaagggtgttctggacaaagaaagcttgtaccttaaaacaagaggatacaagaagctggagtggttgtctaaaggcttttgaactgcttgaagcattagtgtagctttggtgattttgtgactgatcagctctggagcagctagagtgatgtagttgtgggcttttgaacaatagctggagtgatatgaaacattagtgatgtggttgtgggcttttgaactgcttcaagctggagtgatgtcgctgtgttgcttttgtgactgatcatctctggagcttttgtgaatgatctaactagctatatgtaaatgatctagttgtgaatggtattataattgtgatgattttgtgaatatataattgtggtgcttttgtgtttatgtgatggatctatgactggtatactgattaactgtgtatgtctttatggtttgtgtataaaaatctgcgatttgtggtgcttaattaaatatatattattattactaac

SEQ ID NO: 75132 - DNA, 1919 bp, Zea Mays
agcccagtcacctggtcgttcactgctcggccgccgcctgcaatcactgctagtccgcaggcaaccgagagcccgagaccgcccaggtgcccaccactccaccagccaaccctagagcctctccagtctccactgctcggccgccgcctgccgcagcccgccgtccactggtcccgcctcccggcgtccgctccacgcctccactgctcccggcgtccgctccattgctaccatcgtccggcgttctgctcctgcgccctccctttgattcgttgccagttgtagtgtccgggcagatttgagctgtggcagcaagcaaggattgacgaagcgtgcgttcccatcgcaccaccatgggctacacagagatcgacatccacccctctgggagcggcaagatgtgatagatattagtatgaaagataaaaactagaatgctatgcctgtcagaggagctttcttcagtttcagaacacacctctccatctttcggtgcttggtggatcaccgtctaaacgatccaccaccagaaccgcccaaccccaagataggcagctccatctcagtcgttgtacccgttcaatggcgagctggtggcagcgatgtaggagatgatccatgccgaggtgcacaagtacatgttagtggacggcacctgccaaagatacaccgtttctactgtttttcagttggagaaaacatttaagacaacattttcatcgtttgttctccatatggggcttgtttcacgccacttgaaggaagaagggaatggtggtgttaagttcggacaatacatctacacatcttggagcatcggcatcaatgttctcaatcttctcaaatttcaaattatactggtcattactttgaccattagaataaaatccctataaaacgtggccatgcaatcactggttgtaaactgatgggcagaatgttgtaggatggattggctcaagaactaatatagcttacttatgacaatgtagtaattcatgaagttattgttccttatgttcatggagtttgttctgctaggtttttatgcttttaatttctatttccttaacgaaacctcaggcaccttaaagacagcttggatgattggtttcatgaacagctagagaacttggatgatgattatcttgtgtttgattgccctaatatattctcaaatcatcttttcatgctttagttgtttcttaatagttgcacagtttcatctcactcatattcttgccacttacatgtatgtgacaaaacagacaatccgtcttttttattgcttatggcgttgtgcattatacatgtccaccaattatatacaaataccatttgtgggttacctctggtgtgtttaggtgcgagctgcaatcaaagttaaggcattagtcatcatttgcttcacctcttctggacaggctgcaagggtgttctggacaaagaaagcttgtaccttaaaacaagaggatacaagaagctggagtggttgtctaaaggcttttgaactgcttgaagcattagtgtagctttggtgattttgtgactgatcagctctggagcagctagagtgatgtagttgtgggcttttgaacaatagctggagtgatatgaaacattagtgatgtggttgtgggcttttgaactgcttcaagctggagtgatgtcgctgtgttgcttttgtgactgatcatctctggagcttttgtgaatgatctaactagctatatgtaaatgatctagttgtgaatggtattataattgtgatgattttgtgaatatataattgtggtgcttttgtgtttatgtgatggatctatgactggtatactgattaactgtgtatgtctttatggtttgtgtataaaaatctgcgatttgtggtgcttaattaaatatatattattattactaac

SEQ ID NO: 75133 - DNA, 1933 bp, Zea Mays
gtcgttcactgctcggccgccgcctgcaatcactgctagtccgcaggcaaccgagagcccgagaccgcccaggtgcccaccactccaccagccaaccctagagcctctccagtctccactgctcggccgccgcctgccgcagcccgccgtccactggtcccgcctcccggcgtccgctccacgcctccactgctcccggcgtccgctccattgctaccatcgtccggcgttctgctcctgcgccctccctttgattcgttgccagttgtagtgtccgggcagatttgagctgtggcagcaagcaaggattgacgaagcgtgcgttcccatcgcaccaccatgggctacacagagatcgacatccacccctctgggagcggcaagatgtgatagatattagtatgaaagataaaaactagaatgctatgcctgtcagaggagctttcttcagtttcagaacacacctctccatctttcggtgcttggtggatcaccgtctaaacgatccaccaccagaaccgcccaaccccaagatagtctcctccatccaacctttcctacgtaggcagctccatctcagtcgttgtacccgttcaatggcgagctggtggcagcgatgtaggagatgatccatgccgaggtgcacaagtacatgttagtggacggcacctgccaaagatacaccgtttctactgtttttcagttggagaaaacatttaagacaacattttcatcgtttgttctccatatggggcttgtttcacgccacttgaaggaagaagggaatggtggtgttaagttcggacaatacatctacacatcttggagcatcggcatcaatgttctcaatcttctcaaatttcaaattatactggtcattactttgaccattagaataaaatccctataaaacgtggccatgcaatcactggttgtaaactgatgggcagaatgttgtaggatggattggctcaagaactaatatagcttacttatgacaatgtagtaattcatgaagttattgttccttatgttcatggagtttgttctgctaggtttttatgcttttaatttctatttccttaacgaaacctcaggcaccttaaagacagcttggatgattggtttcatgaacagctagagaacttggatgatgattatcttgtgtttgattgccctaatatattctcaaatcatcttttcatgctttagttgtttcttaatagttgcacagtttcatctcactcatattcttgccacttacatgtatgtgacaaaacagacaatccgtcttttttattgcttatggcgttgtgcattatacatgtccaccaattatatacaaataccatttgtgggttacctctggtgtgtttaggtgcgagctgcaatcaaagttaaggcattagtcatcatttgcttcacctcttctggacaggctgcaagggtgttctggacaaagaaagcttgtaccttaaaacaagaggatacaagaagctggagtggttgtctaaaggcttttgaactgcttgaagcattagtgtagctttggtgattttgtgactgatcagctctggagcagctagagtgatgtagttgtgggcttttgaacaatagctggagtgatatgaaacattagtgatgtggttgtgggcttttgaactgcttcaagctggagtgatgtcgctgtgttgcttttgtgactgatcatctctggagcttttgtgaatgatctaactagctatatgtaaatgatctagttgtgaatggtattataattgtgatgattttgtgaatatataattgtggtgcttttgtgtttatgtgatggatctatgactggtatactgattaactgtgtatgtctttatggtttgtgtataaaaatctgcgatttgtggtgcttaattaaatatatattattattactaac

SEQ ID NO: 75134 - DNA, 2131 bp, Zea Mays
cctgcaatcactgctagtccgcaggcaaccgagagcccgagaccgcccaggtgcccaccactccaccagccaaccctagagcctctccagtctccactgctcggccgccgcctgccgcagcccgccgtccactggtcccgcctcccggcgtccgctccacgcctccactgctcccggcgtccgctccattgctaccatcgtccggcgttctgctcctgcgccctccctttgattcgttgccagttgtagtgtccgggcagatttgagctgtggcagcaagcaaggattgacgaagcgtgcgttcccatcgcaccaccatgggctacacagagatcgacatccacccctctgggagcggcaagaacacacctctccatctttcggtgcttggtggatcaccgtctaaacgatccaccaccagaaccgcccaaccccaagatagtctcctccatccaacctttcctacgtaggcagctccatctcagtcgttgtacccgttcaatggcgagctggtggcagcgatgtaggagatgatccatgccgaggtgcacaagtacatgttagtggacggcacctgccaaagatacaccgtttctactggtacacattttattttttatggtgagaattaattttgtagcttgcgcaaaaccaaaggttgagtgatttgtcaaggcagaaatcagtataatgataggtgtgcttgagcttttaatagctggtttatttgaacttttatctttttatgatcatgatatattgagacataaatatattacatgtacctttgcagtttttcagttggagaaaacatttaagacaacattttcatcgtttgttctccatatggggcttgtttcacgccacttgaaggaagaagggaatggtggtgttaagttcggacaatacatctacacatcttggagcatcggcatcaatgttctcaatcttctcaaatttcaaattatactggtcattactttgaccattagaataaaatccctataaaacgtggccatgcaatcactggttgtaaactgatgggcagaatgttgtaggatggattggctcaagaactaatatagcttacttatgacaatgtagtaattcatgaagttattgttccttatgttcatggagtttgttctgctaggtttttatgcttttaatttctatttccttaacgaaacctcaggcaccttaaagacagcttggatgattggtttcatgaacagctagagaacttggatgatgattatcttgtgtttgattgccctaatatattctcaaatcatcttttcatgctttagttgtttcttaatagttgcacagtttcatctcactcatattcttgccacttacatgtatgtgacaaaacagacaatccgtcttttttattgcttatggcgttgtgcattatacatgtccaccaattatatacaaataccatttgtgggttacctctggtgtgtttaggtattcctcagattcctgacattttttctgtctttaaatgtcatatcactattaaaaaaattgatttttgttgtctaaaataccacaactacttttctaggtgcgagctgcaatcaaagttaaggcattagtcatcatttgcttcacctcttctggacaggctgcaagggtgttctggacaaagaaagcttgtaccttaaaacaagaggatacaagaagctggagtggttgtctaaaggcttttgaactgcttgaagcattagtgtagctttggtgattttgtgactgatcagctctggagcagctagagtgatgtagttgtgggcttttgaacaatagctggagtgatatgaaacattagtgatgtggttgtgggcttttgaactgcttcaagctggagtgatgtcgctgtgttgcttttgtgactgatcatctctggagcttttgtgaatgatctaactagctatatgtaaatgatctagttgtgaatggtattataattgtgatgattttgtgaatatataattgtggtgcttttgtgtttatgtgatggatctatgactggtatactgattaactgtgtatgtctttatggtttgtgtataaaaatctgcgatttgtggtgcttaattaaatatatattattattactaac

SEQ ID NO: 75135 - DNA, 2326 bp, Zea Mays
caatcactgctagtccgcaggcaaccgagagcccgagaccgcccaggtgcccaccactccaccagccaaccctagagcctctccagtctccactgctcggccgccgcctgccgcagcccgccgtccactggtcccgcctcccggcgtccgctccacgcctccactgctcccggcgtccgctccattgctaccatcgtccggcgttctgctcctgcgccctccctttgattcgttgccagttgtagtgtccgggcagatttgagctgtggcagcaagcaaggattgacgaagcgtgcgttcccatcgcaccaccatgggctacacagagatcgacatccacccctctgggagcggcaagatgtgatagatattagtatgaaagataaaaactagaatgctatgcctgtcagaggagctttcttcagtttcaggtactgctctgctttattagtcatccagccgatggataatttctatacgtgtatcgcccctgcactttcaaacacatgttcattgtttccaatcacataatttttttcttctcttagatttactatgtggttgtggtctcagtttggtttgtaggttaatttgtatactcatgtgattttagtttttccgtgtattttatgttcatttagtatgtcttaatttagttactttcaattcttgatgctaataatatggatagattgcgacactactttctggcttgagcagaaatgagtttgttgtatatagcagaatatagttgtcgtagctggcaacaatgaccgctctttggatgatctgaaaactattctgtagtcaggtagttaaatatagctgaatatccattattatgttttattaatcttatttgttttttctgtcaaaagaacacacctctccatctttcggtgcttggtggatcaccgtctaaacgatccaccaccagaaccgcccaaccccaagataggcagctccatctcagtcgttgtacccgttcaatggcgagctggtggcagcgatgtaggagatgatccatgccgaggtgcacaagtacatgttagtggacggcacctgccaaagatacaccgtttctactgtttttcagttggagaaaacatttaagacaacattttcatcgtttgttctccatatggggcttgtttcacgccacttgaaggaagaagggaatggtggtgttaagttcggacaatacatctacacatcttggagcatcggcatcaatgttctcaatcttctcaaatttcaaattatactggtcattactttgaccattagaataaaatccctataaaacgtggccatgcaatcactggttgtaaactgatgggcagaatgttgtaggatggattggctcaagaactaatatagcttacttatgacaatgtagtaattcatgaagttattgttccttatgttcatggagtttgttctgctaggtttttatgcttttaatttctatttccttaacgaaacctcaggcaccttaaagacagcttggatgattggtttcatgaacagctagagaacttggatgatgattatcttgtgtttgattgccctaatatattctcaaatcatcttttcatgctttagttgtttcttaatagttgcacagtttcatctcactcatattcttgccacttacatgtatgtgacaaaacagacaatccgtcttttttattgcttatggcgttgtgcattatacatgtccaccaattatatacaaataccatttgtgggttacctctggtgtgtttaggtgcgagctgcaatcaaagttaaggcattagtcatcatttgcttcacctcttctggacaggctgcaagggtgttctggacaaagaaagcttgtaccttaaaacaagaggatacaagaagctggagtggttgtctaaaggcttttgaactgcttgaagcattagtgtagctttggtgattttgtgactgatcagctctggagcagctagagtgatgtagttgtgggcttttgaacaatagctggagtgatatgaaacattagtgatgtggttgtgggcttttgaactgcttcaagctggagtgatgtcgctgtgttgcttttgtgactgatcatctctggagcttttgtgaatgatctaactagctatatgtaaatgatctagttgtgaatggtattataattgtgatgattttgtgaatatataattgtggtgcttttgtgtttatgtgatggatctatgactggtatactgattaactgtgtatgtctttatggtttgtgtataaaaatctgcgatttgtggtgcttaattaaatatatattattattactaac

SEQ ID NO: 75136 - DNA, 1892 bp, Zea Mays
cactgctagtccgcaggcaaccgagagcccgagaccgcccaggtgcccaccactccaccagccaaccctagagcctctccagtctccactgctcggccgccgcctgccgcagcccgccgtccactggtcccgcctcccggcgtccgctccacgcctccactgctcccggcgtccgctccattgctaccatcgtccggcgttctgctcctgcgccctccctttgattcgttgccagttgtagtgtccgggcagatttgagctgtggcagcaagcaaggattgacgaagcgtgcgttcccatcgcaccaccatgggctacacagagatcgacatccacccctctgggagcggcaagatgtgatagatattagtatgaaagataaaaactagaatgctatgcctgtcagaggagctttcttcagtttcagaacacacctctccatctttcggtgcttggtggatcaccgtctaaacgatccaccaccagaaccgcccaaccccaagatagctccatctcagtcgttgtacccgttcaatggcgagctggtggcagcgatgtaggagatgatccatgccgaggtgcacaagtacatgttagtggacggcacctgccaaagatacaccgtttctactggtacacattttattttttatgtttttcagttggagaaaacatttaagacaacattttcatcgtttgttctccatatggggcttgtttcacgccacttgaaggaagaagggaatggtggtgttaagttcggacaatacatctacacatcttggagcatcggcatcaatgttctcaatcttctcaaatttcaaattatactggtcattactttgaccattagaataaaatccctataaaacgtggccatgcaatcactggttgtaaactgatgggcagaatgttgtaggatggattggctcaagaactaatatagcttacttatgacaatgtagtaattcatgaagttattgttccttatgttcatggagtttgttctgctaggtttttatgcttttaatttctatttccttaacgaaacctcaggcaccttaaagacagcttggatgattggtttcatgaacagctagagaacttggatgatgattatcttgtgtttgattgccctaatatattctcaaatcatcttttcatgctttagttgtttcttaatagttgcacagtttcatctcactcatattcttgccacttacatgtatgtgacaaaacagacaatccgtcttttttattgcttatggcgttgtgcattatacatgtccaccaattatatacaaataccatttgtgggttacctctggtgtgtttaggtgcgagctgcaatcaaagttaaggcattagtcatcatttgcttcacctcttctggacaggctgcaagggtgttctggacaaagaaagcttgtaccttaaaacaagaggatacaagaagctggagtggttgtctaaaggcttttgaactgcttgaagcattagtgtagctttggtgattttgtgactgatcagctctggagcagctagagtgatgtagttgtgggcttttgaacaatagctggagtgatatgaaacattagtgatgtggttgtgggcttttgaactgcttcaagctggagtgatgtcgctgtgttgcttttgtgactgatcatctctggagcttttgtgaatgatctaactagctatatgtaaatgatctagttgtgaatggtattataattgtgatgattttgtgaatatataattgtggtgcttttgtgtttatgtgatggatctatgactggtatactgattaactgtgtatgtctttatggtttgtgtataaaaatctgcgatttgtggtgcttaattaaatatatattattattactaac

SEQ ID NO: 75137 - DNA, 2397 bp, Zea Mays
cgagagcccgagaccgcccaggtgcccaccactccaccagccaaccctagagcctctccagtctccactgctcggccgccgcctgccgcagcccgccgtccactggtcccgcctcccggcgtccgctccacgcctccactgctcccggcgtccgctccattgctaccatcgtccggcgttctgctcctgcgccctccctttgattcgttgccagttgtagtgtccgggcagatttgagctgtggcagcaagcaaggattgacgaagcgtgcgttcccatcgcaccaccatgggctacacagagatcgacatccacccctctgggagcggcaagatgtgatagatattagtatgaaagataaaaactagaatgctatgcctgtcagaggagctttcttcagtttcaggtactgctctgctttattagtcatccagccgatggataatttctatacgtgtatcgcccctgcactttcaaacacatgttcattgtttccaatcacataatttttttcttctcttagatttactatgtggttgtggtctcagtttggtttgtaggttaatttgtatactcatgtgattttagtttttccgtgtattttatgttcatttagtatgtcttaatttagttactttcaattcttgatgctaataatatggatagattgcgacactactttctggcttgagcagaaatgagtttgttgtatatagcagaatatagttgtcgtagctggcaacaatgaccgctctttggatgatctgaaaactattctgtagtcaggtagttaaatatagctgaatatccattattatgttttattaatcttatttgttttttctgtcaaaagaacacacctctccatctttcggtgcttggtggatcaccgtctaaacgatccaccaccagaaccgcccaaccccaagatagctccatctcagtcgttgtacccgttcaatggcgagctggtggcagcgatgtaggagatgatccatgccgaggtgcacaagtacatgttagtggacggcacctgccaaagatacaccgtttctactgtttttcagttggagaaaacatttaagacaacattttcatcgtttgttctccatatggggcttgtttcacgccacttgaaggaagaagggaatggtggtgttaagttcggacaatacatctacacatcttggagcatcggcatcaatgttctcaatcttctcaaatttcaaattatactggtcattactttgaccattagaataaaatccctataaaacgtggccatgcaatcactggttgtaaactgatgggcagaatgttgtaggatggattggctcaagaactaatatagcttacttatgacaatgtagtaattcatgaagttattgttccttatgttcatggagtttgttctgctaggtttttatgcttttaatttctatttccttaacgaaacctcaggcaccttaaagacagcttggatgattggtttcatgaacagctagagaacttggatgatgattatcttgtgtttgattgccctaatatattctcaaatcatcttttcatgctttagttgtttcttaatagttgcacagtttcatctcactcatattcttgccacttacatgtatgtgacaaaacagacaatccgtcttttttattgcttatggcgttgtgcattatacatgtccaccaattatatacaaataccatttgtgggttacctctggtgtgtttaggtattcctcagattcctgacattttttctgtctttaaatgtcatatcactattaaaaaaattgatttttgttgtctaaaataccacaactacttttctaggtgcgagctgcaatcaaagttaaggcattagtcatcatttgcttcacctcttctggacaggctgcaagggtgttctggacaaagaaagcttgtaccttaaaacaagaggatacaagaagctggagtggttgtctaaaggcttttgaactgcttgaagcattagtgtagctttggtgattttgtgactgatcagctctggagcagctagagtgatgtagttgtgggcttttgaacaatagctggagtgatatgaaacattagtgatgtggttgtgggcttttgaactgcttcaagctggagtgatgtcgctgtgttgcttttgtgactgatcatctctggagcttttgtgaatgatctaactagctatatgtaaatgatctagttgtgaatggtattataattgtgatgattttgtgaatatataattgtggtgcttttgtgtttatgtgatggatctatgactggtatactgattaactgtgtatgtctttatggtttgtgtataaaaatctgcgatttgtggtgcttaattaaatatatattattattactaac

SEQ ID NO: 75138 - DNA, 2418 bp, Zea Mays
cgagagcccgagaccgcccaggtgcccaccactccaccagccaaccctagagcctctccagtctccactgctcggccgccgcctgccgcagcccgccgtccactggtcccgcctcccggcgtccgctccacgcctccactgctcccggcgtccgctccattgctaccatcgtccggcgttctgctcctgcgccctccctttgattcgttgccagttgtagtgtccgggcagatttgagctgtggcagcaagcaaggattgacgaagcgtgcgttcccatcgcaccaccatgggctacacagagatcgacatccacccctctgggagcggcaagatgtgatagatattagtatgaaagataaaaactagaatgctatgcctgtcagaggagctttcttcagtttcaggtactgctctgctttattagtcatccagccgatggataatttctatacgtgtatcgcccctgcactttcaaacacatgttcattgtttccaatcacataatttttttcttctcttagatttactatgtggttgtggtctcagtttggtttgtaggttaatttgtatactcatgtgattttagtttttccgtgtattttatgttcatttagtatgtcttaatttagttactttcaattcttgatgctaataatatggatagattgcgacactactttctggcttgagcagaaatgagtttgttgtatatagcagaatatagttgtcgtagctggcaacaatgaccgctctttggatgatctgaaaactattctgtagtcaggtagttaaatatagctgaatatccattattatgttttattaatcttatttgttttttctgtcaaaagaacacacctctccatctttcggtgcttggtggatcaccgtctaaacgatccaccaccagaaccgcccaaccccaagatagctccatctcagtcgttgtacccgttcaatggcgagctggtggcagcgatgtaggagatgatccatgccgaggtgcacaagtacatgttagtggacggcacctgccaaagatacaccgtttctactggtacacattttattttttatgtttttcagttggagaaaacatttaagacaacattttcatcgtttgttctccatatggggcttgtttcacgccacttgaaggaagaagggaatggtggtgttaagttcggacaatacatctacacatcttggagcatcggcatcaatgttctcaatcttctcaaatttcaaattatactggtcattactttgaccattagaataaaatccctataaaacgtggccatgcaatcactggttgtaaactgatgggcagaatgttgtaggatggattggctcaagaactaatatagcttacttatgacaatgtagtaattcatgaagttattgttccttatgttcatggagtttgttctgctaggtttttatgcttttaatttctatttccttaacgaaacctcaggcaccttaaagacagcttggatgattggtttcatgaacagctagagaacttggatgatgattatcttgtgtttgattgccctaatatattctcaaatcatcttttcatgctttagttgtttcttaatagttgcacagtttcatctcactcatattcttgccacttacatgtatgtgacaaaacagacaatccgtcttttttattgcttatggcgttgtgcattatacatgtccaccaattatatacaaataccatttgtgggttacctctggtgtgtttaggtattcctcagattcctgacattttttctgtctttaaatgtcatatcactattaaaaaaattgatttttgttgtctaaaataccacaactacttttctaggtgcgagctgcaatcaaagttaaggcattagtcatcatttgcttcacctcttctggacaggctgcaagggtgttctggacaaagaaagcttgtaccttaaaacaagaggatacaagaagctggagtggttgtctaaaggcttttgaactgcttgaagcattagtgtagctttggtgattttgtgactgatcagctctggagcagctagagtgatgtagttgtgggcttttgaacaatagctggagtgatatgaaacattagtgatgtggttgtgggcttttgaactgcttcaagctggagtgatgtcgctgtgttgcttttgtgactgatcatctctggagcttttgtgaatgatctaactagctatatgtaaatgatctagttgtgaatggtattataattgtgatgattttgtgaatatataattgtggtgcttttgtgtttatgtgatggatctatgactggtatactgattaactgtgtatgtctttatggtttgtgtataaaaatctgcgatttgtggtgcttaattaaatatatattattattactaac

SEQ ID NO: 75139 - DNA, 2246 bp, Zea Mays
cgagagcccgagaccgcccaggtgcccaccactccaccagccaaccctagagcctctccagtctccactgctcggccgccgcctgccgcagcccgccgtccactggtcccgcctcccggcgtccgctccacgcctccactgctcccggcgtccgctccattgctaccatcgtccggcgttctgctcctgcgccctccctttgattcgttgccagttgtagtgtccgggcagatttgagctgtggcagcaagcaaggattgacgaagcgtgcgttcccatcgcaccaccatgggctacacagagatcgacatccacccctctgggagcggcaagatgtgatagatattagtatgaaagataaaaactagaatgctatgcctgtcagaggagctttcttcagtttcagaacacacctctccatctttcggtgcttggtggatcaccgtctaaacgatccaccaccagaaccgcccaaccccaagatagctccatctcagtcgttgtacccgttcaatggcgagctggtggcagcgatgtaggagatgatccatgccgaggtgcacaagtacatgttagtggacggcacctgccaaagatacaccgtttctactgtttttcagttggagaaaacatttaagacaacattttcatcgtttgttctccatatggggcttgtttcacgccacttgaaggaagaagggaatggtggtgttaagttcggacaatacatctacacatcttggagcatcggcatcaatgttctcaatcttctcaaatttcaaattatactggtcattactttgaccattagaataaaatccctataaaacgtggccatgcaatcactggttgtaaactgatgggcagaatgttgtaggatggattggctcaagaactaatatagcttacttatgacaatgtagtaattcatgaagttattgttccttatgttcatggagtttgttctgctaggtttttatgcttttaatttctatttccttaacgaaacctcaggcaccttaaagacagcttggatgattggtttcatgaacagctagagaacttggatgatgattatcttgtgtttgattgccctaatatattctcaaatcatcttttcatgctttagttgtttcttaatagttgcacagtttcatctcactcatattcttgccacttacatgtatgtgacaaaacagacaatccgtcttttttattgcttatggcgttgtgcattatacatgtccaccaattatatacaaataccatttgtgggttacctctggtgtgtttaggtgcgagctgcaatcaaagttaaggcattagtcatcatttgcttcacctcttctggacaggctgcaaggtaattctgacataatgaggaagtccctcttcgtggtcggagaaattgggggcaatgactacaacctacctcttcactagagtgccatttgaaaaggtccgctcattcacaccaagtgtcattcttcactagagtgtcattcttcactttatgattccatggtttgaatgaccaatcatttatgatgtccgtgctcgactgattccttgtactatggtattcaatataaggtattcaatattttcattcatgctgctgaggatgaggtttatatcttatcttgtttatgtttatatttatatgagccatcaacttaatgatgattaaccttgattgcaccagctgaagttggtgcataagttttgcctcgcactaatttgatgtacttttttctagggtgttctggacaaagaaagcttgtaccttaaaacaagaggatacaagaagctggagtggttgtctaaaggcttttgaactgcttgaagcattagtgtagctttggtgattttgtgactgatcagctctggagcagctagagtgatgtagttgtgggcttttgaacaatagctggagtgatatgaaacattagtgatgtggttgtgggcttttgaactgcttcaagctggagtgatgtcgctgtgttgcttttgtgactgatcatctctggagcttttgtgaatgatctaactagctatatgtaaatgatctagttgtgaatggtattataattgtgatgattttgtgaatatataattgtggtgcttttgtgtttatgtgatggatctatgactggtatactgattaactgtgtatgtctttatggtttgtgtataaaaatctgcgatttgtggtgcttaattaaatatatattattattactaac

SEQ ID NO: 75140 - DNA, 2531 bp, Zea Mays
cgagagcccgagaccgcccaggtgcccaccactccaccagccaaccctagagcctctccagtctccactgctcggccgccgcctgccgcagcccgccgtccactggtcccgcctcccggcgtccgctccacgcctccactgctcccggcgtccgctccattgctaccatcgtccggcgttctgctcctgcgccctccctttgattcgttgccagttgtagtgtccgggcagatttgagctgtggcagcaagcaaggattgacgaagcgtgcgttcccatcgcaccaccatgggctacacagagatcgacatccacccctctgggagcggcaaggtaccgaccccctgcccttacaactcctagagctctacccctcacgctgaccttagggagacaggatggtttgctcgcctactagaggacatgctctgatggtgttccctctgctaccatttttagttcttgattgtaaagtgtatgttctacattttgaaatagaactggattgtgcatattttgttctacatgtaaagtgtatgttctacatgtaccttttagatcgcttgcaatatgatttattttaacacatatttgaaatagaactggattgtgcatattttgtaaagtgtatgttctacattttgtaattcgtattattcatttttcctttagtttttctctttctacaactcctgtctctttacaatcaaatttcagatgtgatagatattagtatgaaagataaaaactagaatgctatgcctgtcagaggagctttcttcagtttcagaacacacctctccatctttcggtgcttggtggatcaccgtctaaacgatccaccaccagaaccgcccaaccccaagataggcagctccatctcagtcgttgtacccgttcaatggcgagctggtggcagcgatgtaggagatgatccatgccgaggtgcacaagtacatgttagtggacggcacctgccaaagatacaccgtttctactggtacacattttattttttatggtgagaattaattttgtagcttgcgcaaaaccaaaggttgagtgatttgtcaaggcagaaatcagtataatgataggtgtgcttgagcttttaatagctggtttatttgaacttttatctttttatgatcatgatatattgagacataaatatattacatgtacctttgcagtttttcagttggagaaaacatttaagacaacattttcatcgtttgttctccatatggggcttgtttcacgccacttgaaggaagaagggaatggtggtgttaagttcggacaatacatctacacatcttggagcatcggcatcaatgttctcaatcttctcaaatttcaaattatactggtcattactttgaccattagaataaaatccctataaaacgtggccatgcaatcactggttgtaaactgatgggcagaatgttgtaggatggattggctcaagaactaatatagcttacttatgacaatgtagtaattcatgaagttattgttccttatgttcatggagtttgttctgctaggtttttatgcttttaatttctatttccttaacgaaacctcaggcaccttaaagacagcttggatgattggtttcatgaacagctagagaacttggatgatgattatcttgtgtttgattgccctaatatattctcaaatcatcttttcatgctttagttgtttcttaatagttgcacagtttcatctcactcatattcttgccacttacatgtatgtgacaaaacagacaatccgtcttttttattgcttatggcgttgtgcattatacatgtccaccaattatatacaaataccatttgtgggttacctctggtgtgtttaggtattcctcagattcctgacattttttctgtctttaaatgtcatatcactattaaaaaaattgatttttgttgtctaaaataccacaactacttttctaggtgcgagctgcaatcaaagttaaggcattagtcatcatttgcttcacctcttctggacaggctgcaagggtgttctggacaaagaaagcttgtaccttaaaacaagaggatacaagaagctggagtggttgtctaaaggcttttgaactgcttgaagcattagtgtagctttggtgattttgtgactgatcagctctggagcagctagagtgatgtagttgtgggcttttgaacaatagctggagtgatatgaaacattagtgatgtggttgtgggcttttgaactgcttcaagctggagtgatgtcgctgtgttgcttttgtgactgatcatctctggagcttttgtgaatgatctaactagctatatgtaaatgatctagttgtgaatggtattataattgtgatgattttgtgaatatataattgtggtgcttttgtgtttatgtgatggatctatgactggtatactgattaactgtgtatgtctttatggtttgtgtataaaaatctgcgatttgtggtgcttaattaaatatatattattattactaac

SEQ ID NO: 75141 - DNA, 2749 bp, Zea Mays
cgagagcccgagaccgcccaggtgcccaccactccaccagccaaccctagagcctctccagtctccactgctcggccgccgcctgccgcagcccgccgtccactggtcccgcctcccggcgtccgctccacgcctccactgctcccggcgtccgctccattgctaccatcgtccggcgttctgctcctgcgccctccctttgattcgttgccagttgtagtgtccgggcagatttgagctgtggcagcaagcaaggattgacgaagcgtgcgttcccatcgcaccaccatgggctacacagagatcgacatccacccctctgggagcggcaagatgtgatagatattagtatgaaagataaaaactagaatgctatgcctgtcagaggagctttcttcagtttcaggtactgctctgctttattagtcatccagccgatggataatttctatacgtgtatcgcccctgcactttcaaacacatgttcattgtttccaatcacataatttttttcttctcttagatttactatgtggttgtggtctcagtttggtttgtaggttaatttgtatactcatgtgattttagtttttccgtgtattttatgttcatttagtatgtcttaatttagttactttcaattcttgatgctaataatatggatagattgcgacactactttctggcttgagcagaaatgagtttgttgtatatagcagaatatagttgtcgtagctggcaacaatgaccgctctttggatgatctgaaaactattctgtagtcaggtagttaaatatagctgaatatccattattatgttttattaatcttatttgttttttctgtcaaaagaacacacctctccatctttcggtgcttggtggatcaccgtctaaacgatccaccaccagaaccgcccaaccccaagataggtatgtgcaggttcaactactcatttagatattggtacaacctgtaatagactttggtacaataggatttggttctgctattcactttgtttttagttccaaacaatcaaaaaattgcatgtcctttaggaaaaatatcacaggaatattagtaacataacactgataataaaaaatgctttgattctatatatttttcatgttataaggttgaaaacattccgtctcacggatcaaaatgggtacaaggggacgtactgcatttacaaatatatttaaccataataaaacatctttggaaaatgaatatcattttaagtccaaaaatgtttttgttgaatgttcattaagctatagtgaagagtaaacttagcatttcttttctatatctctccctcgtgctcatgtcgctgcagtctcctccatccaacctttcctacgtaggcagctccatctcagtcgttgtacccgttcaatggcgagctggtggcagcgatgtaggagatgatccatgccgaggtgcacaagtacatgttagtggacggcacctgccaaagatacaccgtttctactggtacacattttattttttatgtttttcagttggagaaaacatttaagacaacattttcatcgtttgttctccatatggggcttgtttcacgccacttgaaggaagaagggaatggtgcgagctgcaatcaaagttaaggcattagtcatcatttgcttcacctcttctggacaggctgcaaggtatatactacacaaatgaatattgtttgtacatatgctatgcaatttgctagtgataggataaaccaaactgcactgtactgatcacatgggacgacacatgctaaaatcaatataatagtaacttgctcggaccaataatgcctaaccactagaaatgttgtaattctgtcactagtaattctgacataatgaggaagtccctcttcgtggtcggagaaattgggggcaatgactacaacctacctcttcactagagtgccatttgaaaaggtccgctcattcacaccaagtgtcattcttcactagagtgtcattcttcactttatgattccatggtttgaatgaccaatcatttatgatgtccgtgctcgactgattccttgtactatggtattcaatataaggtattcaatattttcattcatgctgctgaggatgaggtttatatcttatcttgtttatgtttatatttatatgagccatcaacttaatgatgattaaccttgattgcaccagctgaagttggtgcataagttttgcctcgcactaatttgatgtacttttttctagggtgttctggacaaagaaagcttgtaccttaaaacaagaggatacaagaagctggagtggttgtctaaaggcttttgaactgcttgaagcattagtgtagctttggtgattttgtgactgatcagctctggagcagctagagtgatgtagttgtgggcttttgaacaatagctggagtgatatgaaacattagtgatgtggttgtgggcttttgaactgcttcaagctggagtgatgtcgctgtgttgcttttgtgactgatcatctctggagcttttgtgaatgatctaactagctatatgtaaatgatctagttgtgaatggtattataattgtgatgattttgtgaatatataattgtggtgcttttgtgtttatgtgatggatctatgactggtatactgattaactgtgtatgtctttatggtttgtgtataaaaatctgcgatttgtggtgcttaattaaatatatattattattactaac

SEQ ID NO: 75142 - DNA, 2271 bp, Zea Mays
cgagagcccgagaccgcccaggtgcccaccactccaccagccaaccctagagcctctccagtctccactgctcggccgccgcctgccgcagcccgccgtccactggtcccgcctcccggcgtccgctccacgcctccactgctcccggcgtccgctccattgctaccatcgtccggcgttctgctcctgcgccctccctttgattcgttgccagttgtagtgtccgggcagatttgagctgtggcagcaagcaaggattgacgaagcgtgcgttcccatcgcaccaccatgggctacacagagatcgacatccacccctctgggagcggcaagatgtgatagatattagtatgaaagataaaaactagaatgctatgcctgtcagaggagctttcttcagtttcagaacacacctctccatctttcggtgcttggtggatcaccgtctaaacgatccaccaccagaaccgcccaaccccaagataggcagctccatctcagtcgttgtacccgttcaatggcgagctggtggcagcgatgtaggagatgatccatgccgaggtgcacaagtacatgttagtggacggcacctgccaaagatacaccgtttctactggtacacattttattttttatgtttttcagttggagaaaacatttaagacaacattttcatcgtttgttctccatatggggcttgtttcacgccacttgaaggaagaagggaatggtggtgttaagttcggacaatacatctacacatcttggagcatcggcatcaatgttctcaatcttctcaaatttcaaattatactggtcattactttgaccattagaataaaatccctataaaacgtggccatgcaatcactggttgtaaactgatgggcagaatgttgtaggatggattggctcaagaactaatatagcttacttatgacaatgtagtaattcatgaagttattgttccttatgttcatggagtttgttctgctaggtttttatgcttttaatttctatttccttaacgaaacctcaggcaccttaaagacagcttggatgattggtttcatgaacagctagagaacttggatgatgattatcttgtgtttgattgccctaatatattctcaaatcatcttttcatgctttagttgtttcttaatagttgcacagtttcatctcactcatattcttgccacttacatgtatgtgacaaaacagacaatccgtcttttttattgcttatggcgttgtgcattatacatgtccaccaattatatacaaataccatttgtgggttacctctggtgtgtttaggtgcgagctgcaatcaaagttaaggcattagtcatcatttgcttcacctcttctggacaggctgcaaggtaattctgacataatgaggaagtccctcttcgtggtcggagaaattgggggcaatgactacaacctacctcttcactagagtgccatttgaaaaggtccgctcattcacaccaagtgtcattcttcactagagtgtcattcttcactttatgattccatggtttgaatgaccaatcatttatgatgtccgtgctcgactgattccttgtactatggtattcaatataaggtattcaatattttcattcatgctgctgaggatgaggtttatatcttatcttgtttatgtttatatttatatgagccatcaacttaatgatgattaaccttgattgcaccagctgaagttggtgcataagttttgcctcgcactaatttgatgtacttttttctagggtgttctggacaaagaaagcttgtaccttaaaacaagaggatacaagaagctggagtggttgtctaaaggcttttgaactgcttgaagcattagtgtagctttggtgattttgtgactgatcagctctggagcagctagagtgatgtagttgtgggcttttgaacaatagctggagtgatatgaaacattagtgatgtggttgtgggcttttgaactgcttcaagctggagtgatgtcgctgtgttgcttttgtgactgatcatctctggagcttttgtgaatgatctaactagctatatgtaaatgatctagttgtgaatggtattataattgtgatgattttgtgaatatataattgtggtgcttttgtgtttatgtgatggatctatgactggtatactgattaactgtgtatgtctttatggtttgtgtataaaaatctgcgatttgtggtgcttaattaaatatatattattattactaac

SEQ ID NO: 75143 - DNA, 1781 bp, Zea Mays
cgagagcccgagaccgcccaggtgcccaccactccaccagccaaccctagagcctctccagtctccactgctcggccgccgcctgccgcagcccgccgtccactggtcccgcctcccggcgtccgctccacgcctccactgctcccggcgtccgctccattgctaccatcgtccggcgttctgctcctgcgccctccctttgattcgttgccagttgtagtgtccgggcagatttgagctgtggcagcaagcaaggattgacgaagcgtgcgttcccatcgcaccaccatgggctacacagagatcgacatccacccctctgggagcggcaagaacacacctctccatctttcggtgcttggtggatcaccgtctaaacgatccaccaccagaaccgcccaaccccaagataggcagctccatctcagtcgttgtacccgttcaatggcgagctggtggcagcgatgtaggagatgatccatgccgaggtgcacaagtacatgttagtggacggcacctgccaaagatacaccgtttctactgtttttcagttggagaaaacatttaagacaacattttcatcgtttgttctccatatggggcttgtttcacgccacttgaaggaagaagggaatggtggtgttaagttcggacaatacatctacacatcttggagcatcggcatcaatgttctcaatcttctcaaatttcaaattatactggtcattactttgaccattagaataaaatccctataaaacgtggccatgcaatcactggttgtaaactgatgggcagaatgttgtaggatggattggctcaagaactaatatagcttacttatgacaatgtagtaattcatgaagttattgttccttatgttcatggagtttgttctgctaggtttttatgcttttaatttctatttccttaacgaaacctcaggcaccttaaagacagcttggatgattggtttcatgaacagctagagaacttggatgatgattatcttgtgtttgattgccctaatatattctcaaatcatcttttcatgctttagttgtttcttaatagttgcacagtttcatctcactcatattcttgccacttacatgtatgtgacaaaacagacaatccgtcttttttattgcttatggcgttgtgcattatacatgtccaccaattatatacaaataccatttgtgggttacctctggtgtgtttaggtgcgagctgcaatcaaagttaaggcattagtcatcatttgcttcacctcttctggacaggctgcaagggtgttctggacaaagaaagcttgtaccttaaaacaagaggatacaagaagctggagtggttgtctaaaggcttttgaactgcttgaagcattagtgtagctttggtgattttgtgactgatcagctctggagcagctagagtgatgtagttgtgggcttttgaacaatagctggagtgatatgaaacattagtgatgtggttgtgggcttttgaactgcttcaagctggagtgatgtcgctgtgttgcttttgtgactgatcatctctggagcttttgtgaatgatctaactagctatatgtaaatgatctagttgtgaatggtattataattgtgatgattttgtgaatatataattgtggtgcttttgtgtttatgtgatggatctatgactggtatactgattaactgtgtatgtctttatggtttgtgtataaaaatctgcgatttgtggtgcttaattaaatatatattattattactaac

SEQ ID NO: 75144 - DNA, 2622 bp, Zea Mays
cgagagcccgagaccgcccaggtgcccaccactccaccagccaaccctagagcctctccagtctccactgctcggccgccgcctgccgcagcccgccgtccactggtcccgcctcccggcgtccgctccacgcctccactgctcccggcgtccgctccattgctaccatcgtccggcgttctgctcctgcgccctccctttgattcgttgccagttgtagtgtccgggcagatttgagctgtggcagcaagcaaggattgacgaagcgtgcgttcccatcgcaccaccatgggctacacagagatcgacatccacccctctgggagcggcaagatgtgatagatattagtatgaaagataaaaactagaatgctatgcctgtcagaggagctttcttcagtttcaggtactgctctgctttattagtcatccagccgatggataatttctatacgtgtatcgcccctgcactttcaaacacatgttcattgtttccaatcacataatttttttcttctcttagatttactatgtggttgtggtctcagtttggtttgtaggttaatttgtatactcatgtgattttagtttttccgtgtattttatgttcatttagtatgtcttaatttagttactttcaattcttgatgctaataatatggatagattgcgacactactttctggcttgagcagaaatgagtttgttgtatatagcagaatatagttgtcgtagctggcaacaatgaccgctctttggatgatctgaaaactattctgtagtcaggtagttaaatatagctgaatatccattattatgttttattaatcttatttgttttttctgtcaaaagaacacacctctccatctttcggtgcttggtggatcaccgtctaaacgatccaccaccagaaccgcccaaccccaagatagtctcctccatccaacctttcctacgtaggcagctccatctcagtcgttgtacccgttcaatggcgagctggtggcagcgatgtaggagatgatccatgccgaggtgcacaagtacatgttagtggacggcacctgccaaagatacaccgtttctactggtacacattttattttttatggtgagaattaattttgtagcttgcgcaaaaccaaaggttgagtgatttgtcaaggcagaaatcagtataatgataggtgtgcttgagcttttaatagctggtttatttgaacttttatctttttatgatcatgatatattgagacataaatatattacatgtacctttgcagtttttcagttggagaaaacatttaagacaacattttcatcgtttgttctccatatggggcttgtttcacgccacttgaaggaagaagggaatggtggtgttaagttcggacaatacatctacacatcttggagcatcggcatcaatgttctcaatcttctcaaatttcaaattatactggtcattactttgaccattagaataaaatccctataaaacgtggccatgcaatcactggttgtaaactgatgggcagaatgttgtaggatggattggctcaagaactaatatagcttacttatgacaatgtagtaattcatgaagttattgttccttatgttcatggagtttgttctgctaggtttttatgcttttaatttctatttccttaacgaaacctcaggcaccttaaagacagcttggatgattggtttcatgaacagctagagaacttggatgatgattatcttgtgtttgattgccctaatatattctcaaatcatcttttcatgctttagttgtttcttaatagttgcacagtttcatctcactcatattcttgccacttacatgtatgtgacaaaacagacaatccgtcttttttattgcttatggcgttgtgcattatacatgtccaccaattatatacaaataccatttgtgggttacctctggtgtgtttaggtattcctcagattcctgacattttttctgtctttaaatgtcatatcactattaaaaaaattgatttttgttgtctaaaataccacaactacttttctaggtgcgagctgcaatcaaagttaaggcattagtcatcatttgcttcacctcttctggacaggctgcaagggtgttctggacaaagaaagcttgtaccttaaaacaagaggatacaagaagctggagtggttgtctaaaggcttttgaactgcttgaagcattagtgtagctttggtgattttgtgactgatcagctctggagcagctagagtgatgtagttgtgggcttttgaacaatagctggagtgatatgaaacattagtgatgtggttgtgggcttttgaactgcttcaagctggagtgatgtcgctgtgttgcttttgtgactgatcatctctggagcttttgtgaatgatctaactagctatatgtaaatgatctagttgtgaatggtattataattgtgatgattttgtgaatatataattgtggtgcttttgtgtttatgtgatggatctatgactggtatactgattaactgtgtatgtctttatggtttgtgtataaaaatctgcgatttgtggtgcttaattaaatatatattattattactaac

SEQ ID NO: 75145 - DNA, 3038 bp, Zea Mays
cgagagcccgagaccgcccaggtgcccaccactccaccagccaaccctagagcctctccagtctccactgctcggccgccgcctgccgcagcccgccgtccactggtcccgcctcccggcgtccgctccacgcctccactgctcccggcgtccgctccattgctaccatcgtccggcgttctgctcctgcgccctccctttgattcgttgccagttgtagtgtccgggcagatttgagctgtggcagcaagcaaggattgacgaagcgtgcgttcccatcgcaccaccatgggctacacagagatcgacatccacccctctgggagcggcaagatgtgatagatattagtatgaaagataaaaactagaatgctatgcctgtcagaggagctttcttcagtttcaggtactgctctgctttattagtcatccagccgatggataatttctatacgtgtatcgcccctgcactttcaaacacatgttcattgtttccaatcacataatttttttcttctcttagatttactatgtggttgtggtctcagtttggtttgtaggttaatttgtatactcatgtgattttagtttttccgtgtattttatgttcatttagtatgtcttaatttagttactttcaattcttgatgctaataatatggatagattgcgacactactttctggcttgagcagaaatgagtttgttgtatatagcagaatatagttgtcgtagctggcaacaatgaccgctctttggatgatctgaaaactattctgtagtcaggtagttaaatatagctgaatatccattattatgttttattaatcttatttgttttttctgtcaaaagaacacacctctccatctttcggtgcttggtggatcaccgtctaaacgatccaccaccagaaccgcccaaccccaagataggtatgtgcaggttcaactactcatttagatattggtacaacctgtaatagactttggtacaataggatttggttctgctattcactttgtttttagttccaaacaatcaaaaaattgcatgtcctttaggaaaaatatcacaggaatattagtaacataacactgataataaaaaatgctttgattctatatatttttcatgttataaggttgaaaacattccgtctcacggatcaaaatgggtacaaggggacgtactgcatttacaaatatatttaaccataataaaacatctttggaaaatgaatatcattttaagtccaaaaatgtttttgttgaatgttcattaagctatagtgaagagtaaacttagcatttcttttctatatctctccctcgtgctcatgtcgctgcagtctcctccatccaacctttcctacgtaggcagctccatctcagtcgttgtacccgttcaatggcgagctggtggcagcgatgtaggagatgatccatgccgaggtgcacaagtacatgttagtggacggcacctgccaaagatacaccgtttctactggtacacattttattttttatggtgagaattaattttgtagcttgcgcaaaaccaaaggttgagtgatttgtcaaggcagaaatcagtataatgataggtgtgcttgagcttttaatagctggtttatttgaacttttatctttttatgatcatgatatattgagacataaatatattacatgtacctttgcagtttttcagttggagaaaacatttaagacaacattttcatcgtttgttctccatatggggcttgtttcacgccacttgaaggaagaagggaatggtggtgttaagttcggacaatacatctacacatcttggagcatcggcatcaatgttctcaatcttctcaaatttcaaattatactggtcattactttgaccattagaataaaatccctataaaacgtggccatgcaatcactggttgtaaactgatgggcagaatgttgtaggatggattggctcaagaactaatatagcttacttatgacaatgtagtaattcatgaagttattgttccttatgttcatggagtttgttctgctaggtttttatgcttttaatttctatttccttaacgaaacctcaggcaccttaaagacagcttggatgattggtttcatgaacagctagagaacttggatgatgattatcttgtgtttgattgccctaatatattctcaaatcatcttttcatgctttagttgtttcttaatagttgcacagtttcatctcactcatattcttgccacttacatgtatgtgacaaaacagacaatccgtcttttttattgcttatggcgttgtgcattatacatgtccaccaattatatacaaataccatttgtgggttacctctggtgtgtttaggtattcctcagattcctgacattttttctgtctttaaatgtcatatcactattaaaaaaattgatttttgttgtctaaaataccacaactacttttctaggtgcgagctgcaatcaaagttaaggcattagtcatcatttgcttcacctcttctggacaggctgcaagggtgttctggacaaagaaagcttgtaccttaaaacaagaggatacaagaagctggagtggttgtctaaaggcttttgaactgcttgaagcattagtgtagctttggtgattttgtgactgatcagctctggagcagctagagtgatgtagttgtgggcttttgaacaatagctggagtgatatgaaacattagtgatgtggttgtgggcttttgaactgcttcaagctggagtgatgtcgctgtgttgcttttgtgactgatcatctctggagcttttgtgaatgatctaactagctatatgtaaatgatctagttgtgaatggtattataattgtgatgattttgtgaatatataattgtggtgcttttgtgtttatgtgatggatctatgactggtatactgattaactgtgtatgtctttatggtttgtgtataaaaatctgcgatttgtggtgcttaattaaatatatattattattactaac

SEQ ID NO: 75146 - DNA, 1971 bp, Zea Mays
cgagagcccgagaccgcccaggtgcccaccactccaccagccaaccctagagcctctccagtctccactgctcggccgccgcctgccgcagcccgccgtccactggtcccgcctcccggcgtccgctccacgcctccactgctcccggcgtccgctccattgctaccatcgtccggcgttctgctcctgcgccctccctttgattcgttgccagttgtagtgtccgggcagatttgagctgtggcagcaagcaaggattgacgaagcgtgcgttcccatcgcaccaccatgggctacacagagatcgacatccacccctctgggagcggcaagatgtgatagatattagtatgaaagataaaaactagaatgctatgcctgtcagaggagctttcttcagtttcagaacacacctctccatctttcggtgcttggtggatcaccgtctaaacgatccaccaccagaaccgcccaaccccaagataggcagctccatctcagtcgttgtacccgttcaatggcgagctggtggcagcgatgtaggagatgatccatgccgaggtgcacaagtacatgttagtggacggcacctgccaaagatacaccgtttctactggtacacattttattttttatgtttttcagttggagaaaacatttaagacaacattttcatcgtttgttctccatatggggcttgtttcacgccacttgaaggaagaagggaatggtggtgttaagttcggacaatacatctacacatcttggagcatcggcatcaatgttctcaatcttctcaaatttcaaattatactggtcattactttgaccattagaataaaatccctataaaacgtggccatgcaatcactggttgtaaactgatgggcagaatgttgtaggatggattggctcaagaactaatatagcttacttatgacaatgtagtaattcatgaagttattgttccttatgttcatggagtttgttctgctaggtttttatgcttttaatttctatttccttaacgaaacctcaggcaccttaaagacagcttggatgattggtttcatgaacagctagagaacttggatgatgattatcttgtgtttgattgccctaatatattctcaaatcatcttttcatgctttagttgtttcttaatagttgcacagtttcatctcactcatattcttgccacttacatgtatgtgacaaaacagacaatccgtcttttttattgcttatggcgttgtgcattatacatgtccaccaattatatacaaataccatttgtgggttacctctggtgtgtttaggtgcgagctgcaatcaaagttaaggcattagtcatcatttgcttcacctcttctggacaggctgcaaggtaattctgacataatgaggaagtccctcttcgtggtcggagaaattgggggcaatgactacaacctacctcttcactagagtgccatttgaaaagggtgttctggacaaagaaagcttgtaccttaaaacaagaggatacaagaagctggagtggttgtctaaaggcttttgaactgcttgaagcattagtgtagctttggtgattttgtgactgatcagctctggagcagctagagtgatgtagttgtgggcttttgaacaatagctggagtgatatgaaacattagtgatgtggttgtgggcttttgaactgcttcaagctggagtgatgtcgctgtgttgcttttgtgactgatcatctctggagcttttgtgaatgatctaactagctatatgtaaatgatctagttgtgaatggtattataattgtgatgattttgtgaatatataattgtggtgcttttgtgtttatgtgatggatctatgactggtatactgattaactgtgtatgtctttatggtttgtgtataaaaatctgcgatttgtggtgcttaattaaatatatattattattactaac

SEQ ID NO: 75147 - DNA, 2694 bp, Zea Mays
cgagagcccgagaccgcccaggtgcccaccactccaccagccaaccctagagcctctccagtctccactgctcggccgccgcctgccgcagcccgccgtccactggtcccgcctcccggcgtccgctccacgcctccactgctcccggcgtccgctccattgctaccatcgtccggcgttctgctcctgcgccctccctttgattcgttgccagttgtagtgtccgggcagatttgagctgtggcagcaagcaaggattgacgaagcgtgcgttcccatcgcaccaccatgggctacacagagatcgacatccacccctctgggagcggcaaggtaccgaccccctgcccttacaactcctagagctctacccctcacgctgaccttagggagacaggatggtttgctcgcctactagaggacatgctctgatggtgttccctctgctaccatttttagttcttgattgtaaagtgtatgttctacattttgaaatagaactggattgtgcatattttgttctacatgtaaagtgtatgttctacatgtaccttttagatcgcttgcaatatgatttattttaacacatatttgaaatagaactggattgtgcatattttgtaaagtgtatgttctacattttgtaattcgtattattcatttttcctttagtttttctctttctacaactcctgtctctttacaatcaaatttcagatgtgatagatattagtatgaaagataaaaactagaatgctatgcctgtcagaggagctttcttcagtttcaggtactgctctgctttattagtcatccagccgatggataatttctatacgtgtatcgcccctgcactttcaaacacatgttcattgtttccaatcacataatttttttcttctcttagatttactatgtggttgtggtctcagtttggtttgtaggttaatttgtatactcatgtgattttagtttttccgtgtattttatgttcatttagtatgtcttaatttagttactttcaattcttgatgctaataatatggatagattgcgacactactttctggcttgagcagaaatgagtttgttgtatatagcagaatatagttgtcgtagctggcaacaatgaccgctctttggatgatctgaaaactattctgtagtcaggtagttaaatatagctgaatatccattattatgttttattaatcttatttgttttttctgtcaaaagaacacacctctccatctttcggtgcttggtggatcaccgtctaaacgatccaccaccagaaccgcccaaccccaagataggcagctccatctcagtcgttgtacccgttcaatggcgagctggtggcagcgatgtaggagatgatccatgccgaggtgcacaagtacatgttagtggacggcacctgccaaagatacaccgtttctactggtacacattttattttttatgtttttcagttggagaaaacatttaagacaacattttcatcgtttgttctccatatggggcttgtttcacgccacttgaaggaagaagggaatggtggtgttaagttcggacaatacatctacacatcttggagcatcggcatcaatgttctcaatcttctcaaatttcaaattatactgacaatccgtcttttttattgcttatggcgttgtgcattatacatgtccaccaattatatacaaataccatttgtgggttacctctggtgtgtttaggtgcgagctgcaatcaaagttaaggcattagtcatcatttgcttcacctcttctggacaggctgcaaggtaattctgacataatgaggaagtccctcttcgtggtcggagaaattgggggcaatgactacaacctacctcttcactagagtgccatttgaaaaggtccgctcattcacaccaagtgtcattcttcactagagtgtcattcttcactttatgattccatggtttgaatgaccaatcatttatgatgtccgtgctcgactgattccttgtactatggtattcaatataaggtattcaatattttcattcatgctgctgaggatgaggtttatatcttatcttgtttatgtttatatttatatgagccatcaacttaatgatgattaaccttgattgcaccagctgaagttggtgcataagttttgcctcgcactaatttgatgtacttttttctagggtgttctggacaaagaaagcttgtaccttaaaacaagaggatacaagaagctggagtggttgtctaaaggcttttgaactgcttgaagcattagtgtagctttggtgattttgtgactgatcagctctggagcagctagagtgatgtagttgtgggcttttgaacaatagctggagtgatatgaaacattagtgatgtggttgtgggcttttgaactgcttcaagctggagtgatgtcgctgtgttgcttttgtgactgatcatctctggagcttttgtgaatgatctaactagctatatgtaaatgatctagttgtgaatggtattataattgtgatgattttgtgaatatataattgtggtgcttttgtgtttatgtgatggatctatgactggtatactgattaactgtgtatgtctttatggtttgtgtataaaaatctgcgatttgtggtgcttaattaaatatatattattattactaac

SEQ ID NO: 75148 - DNA, 2102 bp, Zea Mays
cgagagcccgagaccgcccaggtgcccaccactccaccagccaaccctagagcctctccagtctccactgctcggccgccgcctgccgcagcccgccgtccactggtcccgcctcccggcgtccgctccacgcctccactgctcccggcgtccgctccattgctaccatcgtccggcgttctgctcctgcgccctccctttgattcgttgccagttgtagtgtccgggcagatttgagctgtggcagcaagcaaggattgacgaagcgtgcgttcccatcgcaccaccatgggctacacagagatcgacatccacccctctgggagcggcaagatgtgatagatattagtatgaaagataaaaactagaatgctatgcctgtcagaggagctttcttcagtttcagaacacacctctccatctttcggtgcttggtggatcaccgtctaaacgatccaccaccagaaccgcccaaccccaagataggcagctccatctcagtcgttgtacccgttcaatggcgagctggtggcagcgatgtaggagatgatccatgccgaggtgcacaagtacatgttagtggacggcacctgccaaagatacaccgtttctactggtacacattttattttttatggtgagaattaattttgtagcttgcgcaaaaccaaaggttgagtgatttgtcaaggcagaaatcagtataatgataggtgtgcttgagcttttaatagctggtttatttgaacttttatctttttatgatcatgatatattgagacataaatatattacatgtacctttgcagtttttcagttggagaaaacatttaagacaacattttcatcgtttgttctccatatggggcttgtttcacgccacttgaaggaagaagggaatggtggtgttaagttcggacaatacatctacacatcttggagcatcggcatcaatacaatccgtcttttttattgcttatggcgttgtgcattatacatgtccaccaattatatacaaataccatttgtgggttacctctggtgtgtttaggtattcctcagattcctgacattttttctgtctttaaatgtcatatcactattaaaaaaattgatttttgttgtctaaaataccacaactacttttctaggtgcgagctgcaatcaaagttaaggcattagtcatcatttgcttcacctcttctggacaggctgcaaggtaattctgacataatgaggaagtccctcttcgtggtcggagaaattgggggcaatgactacaacctacctcttcactagagtgccatttgaaaaggtccgctcattcacaccaagtgtcattcttcactagagtgtcattcttcactttatgattccatggtttgaatgaccaatcatttatgatgtccgtgctcgactgattccttgtactatggtattcaatataaggtattcaatattttcattcatgctgctgaggatgaggtttatatcttatcttgtttatgtttatatttatatgagccatcaacttaatgatgattaaccttgattgcaccagctgaagttggtgcataagttttgcctcgcactaatttgatgtacttttttctagggtgttctggacaaagaaagcttgtaccttaaaacaagaggatacaagaagctggagtggttgtctaaaggcttttgaactgcttgaagcattagtgtagctttggtgattttgtgactgatcagctctggagcagctagagtgatgtagttgtgggcttttgaacaatagctggagtgatatgaaacattagtgatgtggttgtgggcttttgaactgcttcaagctggagtgatgtcgctgtgttgcttttgtgactgatcatctctggagcttttgtgaatgatctaactagctatatgtaaatgatctagttgtgaatggtattataattgtgatgattttgtgaatatataattgtggtgcttttgtgtttatgtgatggatctatgactggtatactgattaactgtgtatgtctttatggtttgtgtataaaaatctgcgatttgtggtgcttaattaaatatatattattattactaac

SEQ ID NO: 75149 - DNA, 2250 bp, Zea Mays
cgagagcccgagaccgcccaggtgcccaccactccaccagccaaccctagagcctctccagtctccactgctcggccgccgcctgccgcagcccgccgtccactggtcccgcctcccggcgtccgctccacgcctccactgctcccggcgtccgctccattgctaccatcgtccggcgttctgctcctgcgccctccctttgattcgttgccagttgtagtgtccgggcagatttgagctgtggcagcaagcaaggattgacgaagcgtgcgttcccatcgcaccaccatgggctacacagagatcgacatccacccctctgggagcggcaagatgtgatagatattagtatgaaagataaaaactagaatgctatgcctgtcagaggagctttcttcagtttcagaacacacctctccatctttcggtgcttggtggatcaccgtctaaacgatccaccaccagaaccgcccaaccccaagataggcagctccatctcagtcgttgtacccgttcaatggcgagctggtggcagcgatgtaggagatgatccatgccgaggtgcacaagtacatgttagtggacggcacctgccaaagatacaccgtttctactgtttttcagttggagaaaacatttaagacaacattttcatcgtttgttctccatatggggcttgtttcacgccacttgaaggaagaagggaatggtggtgttaagttcggacaatacatctacacatcttggagcatcggcatcaatgttctcaatcttctcaaatttcaaattatactggtcattactttgaccattagaataaaatccctataaaacgtggccatgcaatcactggttgtaaactgatgggcagaatgttgtaggatggattggctcaagaactaatatagcttacttatgacaatgtagtaattcatgaagttattgttccttatgttcatggagtttgttctgctaggtttttatgcttttaatttctatttccttaacgaaacctcaggcaccttaaagacagcttggatgattggtttcatgaacagctagagaacttggatgatgattatcttgtgtttgattgccctaatatattctcaaatcatcttttcatgctttagttgtttcttaatagttgcacagtttcatctcactcatattcttgccacttacatgtatgtgacaaaacagacaatccgtcttttttattgcttatggcgttgtgcattatacatgtccaccaattatatacaaataccatttgtgggttacctctggtgtgtttaggtgcgagctgcaatcaaagttaaggcattagtcatcatttgcttcacctcttctggacaggctgcaaggtaattctgacataatgaggaagtccctcttcgtggtcggagaaattgggggcaatgactacaacctacctcttcactagagtgccatttgaaaaggtccgctcattcacaccaagtgtcattcttcactagagtgtcattcttcactttatgattccatggtttgaatgaccaatcatttatgatgtccgtgctcgactgattccttgtactatggtattcaatataaggtattcaatattttcattcatgctgctgaggatgaggtttatatcttatcttgtttatgtttatatttatatgagccatcaacttaatgatgattaaccttgattgcaccagctgaagttggtgcataagttttgcctcgcactaatttgatgtacttttttctagggtgttctggacaaagaaagcttgtaccttaaaacaagaggatacaagaagctggagtggttgtctaaaggcttttgaactgcttgaagcattagtgtagctttggtgattttgtgactgatcagctctggagcagctagagtgatgtagttgtgggcttttgaacaatagctggagtgatatgaaacattagtgatgtggttgtgggcttttgaactgcttcaagctggagtgatgtcgctgtgttgcttttgtgactgatcatctctggagcttttgtgaatgatctaactagctatatgtaaatgatctagttgtgaatggtattataattgtgatgattttgtgaatatataattgtggtgcttttgtgtttatgtgatggatctatgactggtatactgattaactgtgtatgtctttatggtttgtgtataaaaatctgcgatttgtggtgcttaattaaatatatattattattactaac

SEQ ID NO: 75150 - DNA, 1939 bp, Zea Mays
cgagagcccgagaccgcccaggtgcccaccactccaccagccaaccctagagcctctccagtctccactgctcggccgccgcctgccgcagcccgccgtccactggtcccgcctcccggcgtccgctccacgcctccactgctcccggcgtccgctccattgctaccatcgtccggcgttctgctcctgcgccctccctttgattcgttgccagttgtagtgtccgggcagatttgagctgtggcagcaagcaaggattgacgaagcgtgcgttcccatcgcaccaccatgggctacacagagatcgacatccacccctctgggagcggcaagatgtgatagatattagtatgaaagataaaaactagaatgctatgcctgtcagaggagctttcttcagtttcagaacacacctctccatctttcggtgcttggtggatcaccgtctaaacgatccaccaccagaaccgcccaaccccaagataggcagctccatctcagtcgttgtacccgttcaatggcgagctggtggcagcgatgtaggagatgatccatgccgaggtgcacaagtacatgttagtggacggcacctgccaaagatacaccgtttctactggtacacattttattttttatggtgagaattaattttgtagcttgcgcaaaaccaaaggttgagtgatttgtcaaggcagaaatcagtataatgataggtgtgcttgagcttttaatagctggtttatttgaacttttatctttttatgatcatgatatattgagacataaatatattacatgtacctttgcagtttttcagttggagaaaacatttaagacaacattttcatcgtttgttctccatatggggcttgtttcacgccacttgaaggaagaagggaatggtggtgttaagttcggacaatacatctacacatcttggagcatcggcatcaatgttctcaatcttctcaaatttcaaattatactggtgcgagctgcaatcaaagttaaggcattagtcatcatttgcttcacctcttctggacaggctgcaaggtaattctgacataatgaggaagtccctcttcgtggtcggagaaattgggggcaatgactacaacctacctcttcactagagtgccatttgaaaaggtccgctcattcacaccaagtgtcattcttcactagagtgtcattcttcactttatgattccatggtttgaatgaccaatcatttatgatgtccgtgctcgactgattccttgtactatggtattcaatataaggtattcaatattttcattcatgctgctgaggatgaggtttatatcttatcttgtttatgtttatatttatatgagccatcaacttaatgatgattaaccttgattgcaccagctgaagttggtgcataagttttgcctcgcactaatttgatgtacttttttctagggtgttctggacaaagaaagcttgtaccttaaaacaagaggatacaagaagctggagtggttgtctaaaggcttttgaactgcttgaagcattagtgtagctttggtgattttgtgactgatcagctctggagcagctagagtgatgtagttgtgggcttttgaacaatagctggagtgatatgaaacattagtgatgtggttgtgggcttttgaactgcttcaagctggagtgatgtcgctgtgttgcttttgtgactgatcatctctggagcttttgtgaatgatctaactagctatatgtaaatgatctagttgtgaatggtattataattgtgatgattttgtgaatatataattgtggtgcttttgtgtttatgtgatggatctatgactggtatactgattaactgtgtatgtctttatggtttgtgtataaaaatctgcgatttgtggtgcttaattaaatatatattattattactaac

SEQ ID NO: 75151 - DNA, 1906 bp, Zea Mays
cgagagcccgagaccgcccaggtgcccaccactccaccagccaaccctagagcctctccagtctccactgctcggccgccgcctgccgcagcccgccgtccactggtcccgcctcccggcgtccgctccacgcctccactgctcccggcgtccgctccattgctaccatcgtccggcgttctgctcctgcgccctccctttgattcgttgccagttgtagtgtccgggcagatttgagctgtggcagcaagcaaggattgacgaagcgtgcgttcccatcgcaccaccatgggctacacagagatcgacatccacccctctgggagcggcaagatgtgatagatattagtatgaaagataaaaactagaatgctatgcctgtcagaggagctttcttcagtttcagaacacacctctccatctttcggtgcttggtggatcaccgtctaaacgatccaccaccagaaccgcccaaccccaagataggcagctccatctcagtcgttgtacccgttcaatggcgagctggtggcagcgatgtaggagatgatccatgccgaggtgcacaagtacatgttagtggacggcacctgccaaagatacaccgtttctactggtacacattttattttttatggtgagaattaattttgtagcttgcgcaaaaccaaaggttgagtgatttgtcaaggcagaaatcagtataatgataggtgtgcttgagcttttaatagctggtttatttgaacttttatctttttatgatcatgatatattgagacataaatatattacatgtacctttgcagtttttcagttggagaaaacatttaagacaacattttcatcgtttgttctccatatggggcttgtttcacgccacttgaaggaagaagggaatggtggtgttaagttcggacaatacatctacacatcttggagcatcggcatcaatgtgcgagctgcaatcaaagttaaggcattagtcatcatttgcttcacctcttctggacaggctgcaaggtaattctgacataatgaggaagtccctcttcgtggtcggagaaattgggggcaatgactacaacctacctcttcactagagtgccatttgaaaaggtccgctcattcacaccaagtgtcattcttcactagagtgtcattcttcactttatgattccatggtttgaatgaccaatcatttatgatgtccgtgctcgactgattccttgtactatggtattcaatataaggtattcaatattttcattcatgctgctgaggatgaggtttatatcttatcttgtttatgtttatatttatatgagccatcaacttaatgatgattaaccttgattgcaccagctgaagttggtgcataagttttgcctcgcactaatttgatgtacttttttctagggtgttctggacaaagaaagcttgtaccttaaaacaagaggatacaagaagctggagtggttgtctaaaggcttttgaactgcttgaagcattagtgtagctttggtgattttgtgactgatcagctctggagcagctagagtgatgtagttgtgggcttttgaacaatagctggagtgatatgaaacattagtgatgtggttgtgggcttttgaactgcttcaagctggagtgatgtcgctgtgttgcttttgtgactgatcatctctggagcttttgtgaatgatctaactagctatatgtaaatgatctagttgtgaatggtattataattgtgatgattttgtgaatatataattgtggtgcttttgtgtttatgtgatggatctatgactggtatactgattaactgtgtatgtctttatggtttgtgtataaaaatctgcgatttgtggtgcttaattaaatatatattattattactaac

SEQ ID NO: 75152 - DNA, 1947 bp, Zea Mays
cgagagcccgagaccgcccaggtgcccaccactccaccagccaaccctagagcctctccagtctccactgctcggccgccgcctgccgcagcccgccgtccactggtcccgcctcccggcgtccgctccacgcctccactgctcccggcgtccgctccattgctaccatcgtccggcgttctgctcctgcgccctccctttgattcgttgccagttgtagtgtccgggcagatttgagctgtggcagcaagcaaggattgacgaagcgtgcgttcccatcgcaccaccatgggctacacagagatcgacatccacccctctgggagcggcaagatgtgatagatattagtatgaaagataaaaactagaatgctatgcctgtcagaggagctttcttcagtttcagaacacacctctccatctttcggtgcttggtggatcaccgtctaaacgatccaccaccagaaccgcccaaccccaagatagctccatctcagtcgttgtacccgttcaatggcgagctggtggcagcgatgtaggagatgatccatgccgaggtgcacaagtacatgttagtggacggcacctgccaaagatacaccgtttctactggtacacattttattttttatggtgagaattaattttgtagcttgcgcaaaaccaaaggttgagtgatttgtcaaggcagaaatcagtataatgatagtttttcagttggagaaaacatttaagacaacattttcatcgtttgttctccatatggggcttgtttcacgccacttgaaggaagaagggaatggtggtgttaagttcggacaatacatctacacatcttggagcatcggcatcaatgttctcaatcttctcaaatttcaaattatactggtcattactttgaccattagaataaaatccctataaaacgtggccatgcaatcactggttgtaaactgatgggcagaatgttgtaggatggattggctcaagaactaatatagcttacttatgacaatgtagtaattcatgaagttattgttccttatgttcatggagtttgttctgctaggtttttatgcttttaatttctatttccttaacgaaacctcaggcaccttaaagacagcttggatgattggtttcatgaacagctagagaacttggatgatgattatcttgtgtttgattgccctaatatattctcaaatcatcttttcatgctttagttgtttcttaatagttgcacagtttcatctcactcatattcttgccacttacatgtatgtgacaaaacagacaatccgtcttttttattgcttatggcgttgtgcattatacatgtccaccaattatatacaaataccatttgtgggttacctctggtgtgtttaggtgcgagctgcaatcaaagttaaggcattagtcatcatttgcttcacctcttctggacaggctgcaagggtgttctggacaaagaaagcttgtaccttaaaacaagaggatacaagaagctggagtggttgtctaaaggcttttgaactgcttgaagcattagtgtagctttggtgattttgtgactgatcagctctggagcagctagagtgatgtagttgtgggcttttgaacaatagctggagtgatatgaaacattagtgatgtggttgtgggcttttgaactgcttcaagctggagtgatgtcgctgtgttgcttttgtgactgatcatctctggagcttttgtgaatgatctaactagctatatgtaaatgatctagttgtgaatggtattataattgtgatgattttgtgaatatataattgtggtgcttttgtgtttatgtgatggatctatgactggtatactgattaactgtgtatgtctttatggtttgtgtataaaaatctgcgatttgtggtgcttaattaaatatatattattattactaac

SEQ ID NO: 75153 - DNA, 1950 bp, Zea Mays
cgagagcccgagaccgcccaggtgcccaccactccaccagccaaccctagagcctctccagtctccactgctcggccgccgcctgccgcagcccgccgtccactggtcccgcctcccggcgtccgctccacgcctccactgctcccggcgtccgctccattgctaccatcgtccggcgttctgctcctgcgccctccctttgattcgttgccagttgtagtgtccgggcagatttgagctgtggcagcaagcaaggattgacgaagcgtgcgttcccatcgcaccaccatgggctacacagagatcgacatccacccctctgggagcggcaagatgtgatagatattagtatgaaagataaaaactagaatgctatgcctgtcagaggagctttcttcagtttcagaacacacctctccatctttcggtgcttggtggatcaccgtctaaacgatccaccaccagaaccgcccaaccccaagataggcagctccatctcagtcgttgtacccgttcaatggcgagctggtggcagcgatgtaggagatgatccatgccgaggtgcacaagtacatgttagtggacggcacctgccaaagatacaccgtttctactgtttttcagttggagaaaacatttaagacaacattttcatcgtttgttctccatatggggcttgtttcacgccacttgaaggaagaagggaatggtggtgttaagttcggacaatacatctacacatcttggagcatcggcatcaatgttctcaatcttctcaaatttcaaattatactggtcattactttgaccattagaataaaatccctataaaacgtggccatgcaatcactggttgtaaactgatgggcagaatgttgtaggatggattggctcaagaactaatatagcttacttatgacaatgtagtaattcatgaagttattgttccttatgttcatggagtttgttctgctaggtttttatgcttttaatttctatttccttaacgaaacctcaggcaccttaaagacagcttggatgattggtttcatgaacagctagagaacttggatgatgattatcttgtgtttgattgccctaatatattctcaaatcatcttttcatgctttagttgtttcttaatagttgcacagtttcatctcactcatattcttgccacttacatgtatgtgacaaaacagacaatccgtcttttttattgcttatggcgttgtgcattatacatgtccaccaattatatacaaataccatttgtgggttacctctggtgtgtttaggtgcgagctgcaatcaaagttaaggcattagtcatcatttgcttcacctcttctggacaggctgcaaggtaattctgacataatgaggaagtccctcttcgtggtcggagaaattgggggcaatgactacaacctacctcttcactagagtgccatttgaaaagggtgttctggacaaagaaagcttgtaccttaaaacaagaggatacaagaagctggagtggttgtctaaaggcttttgaactgcttgaagcattagtgtagctttggtgattttgtgactgatcagctctggagcagctagagtgatgtagttgtgggcttttgaacaatagctggagtgatatgaaacattagtgatgtggttgtgggcttttgaactgcttcaagctggagtgatgtcgctgtgttgcttttgtgactgatcatctctggagcttttgtgaatgatctaactagctatatgtaaatgatctagttgtgaatggtattataattgtgatgattttgtgaatatataattgtggtgcttttgtgtttatgtgatggatctatgactggtatactgattaactgtgtatgtctttatggtttgtgtataaaaatctgcgatttgtggtgcttaattaaatatatattattattactaac

SEQ ID NO: 75154 - DNA, 3782 bp, Zea Mays
aggacgctgaccctaacgcacccgtggaaaggaatataccgacggcctctcgcttccacccatccggtcgcgtttcccccgttccaaattcgccaacccacaccaccttcctctctctcgccgccgccctcagatcagatcaaagcggaacaccaactcctcctcttcctcctcctcgtagggtttggtgtgttcacctcacctctcgcggcgacagcgaagccttctcttctcttcccctccgctccgctccgctccgctccgctcggtgtttcagccatgatgtcgcggtcgtacaccaacctgctcgacctcgcggagggcaacttcgcggcgctgggcccggccgccggcgccggcggcggcgggcggcagaggcaggggtcgttcgggctgaggcggatgtcgcgggtgatgacggtgccggggacgctctcggagctcgacggcgaggacgagtcggagccggcggccaccagcagcgtcgcctccgacgcgccctcgtccgtggcggcggaccgcctcatagtggtctccaaccagctgcccatcgtcgcgcgccggaggcccgacggccgaggatggtccttcgtgtgggacgacgactcgcttctgctccagctccgcgacggcattcccgaggatatggaggtgctcttcgtcggctccctccgcgccgacgtccccgtagccgagcaggacgaggtgtcgcaggcgttgctcgaccggttccgctgcgcgccggtcttcctccctgaccgcctcaacgaccgcttctaccacggcttctgcaagcgccaactctggcctctgttccactacatgctccccttctcctcatccgcgtccgccgccggcaccacctcttcctcctccgccgccacttgcaacggtcgcttcgaccgcagcgcttgggaggcgtacgtgctcgccaacaagttcttcttcgagaaggtcgtcgaggcacttcctctcgtgctgcagtaggatgctgggaattgaataccagtcaaagcgtgggtacattgaattggattactttggccgcactgtcgggatcaaaatcatgccagtgggagttcatatgggtcaattggagttgggtctgcgcttgcctgatagggaatggaggctttctgagcttcaacggcagtttcaggggaaaactgtcttgcttggtgtggatgatatggatatctttaaggggatcaatttgaagcttctcgcctttgagaacatgttgaggacacatcccaagtggcaggggagagcagtgttagtgcagattgctaacccagcccgtggaaggggtaaagatctggaagccatccaggctgagattgaggagagctgccagcggatcaatggagactttggccagtcagggtatagccctgttgttttcatcggccgtgatgtgtcaagtgttgagaagatcgcctattatacgatagcggaatgtgtggtggtcactgctgtgagggatgggatgaacttgacaccgtatgaatacgttgtctgtaggcagggtgcaccaggatctcagtcggtatcagaggtgagtgggccaaagaagagcatgctggttgtgtcagagtttattggctgctcaccgtcactgagcggtgctattagggttaacccatggaatatagaggcaaccgcagaggcgatgaatgaggccatttcaatgccagaacaggaaaaacagttgaggcatgagaaacattaccgttatgtcaggagccatgacgtcgcttattggtcaaagagcttcatcatagacttggaaagggtttgtaaggatcacttcaagaggacttgttggggcatagggttgggttttggtttcagggtggtggccttggaccctcatttcacaaagcttaacatggattcaatcattaatgcttatgagctttcagagagcagggctatattgctcgattatgatggaactctggttccccaaacttccctcaacaaggaacctagtccacaggttttgagcatcatcaataccctttgctcagatagtagaaacatcgtttttcttgtcagtggtcgagacaaagataccttgggaaagtggttctcctcatgtccaagattggggattgcagctgaacatggttacttcttgaggtggtctagagaagaagagtggcaaacatgcactcaggcattggacttcggatggatgcaaatggcgaagccagtgatgaatttatatacagaagcaactgatggatcctacattgaggccaaggaaagtgccttggtgtggcaccatcaggatgctgacctaggctttggatcctcacaggcaaaggagatgcttgatcacctggaaagtgtactagcaaatgaaccagtctctgtcaagagtggccagttcattgttgaagtcaaaccacagggaataagcaagggaatagttgccgagaggatacttgcatcagtgaaggagagaggaaagcaggctgatttcttattgtgcatcggcgatgataggtctgatgaggacatgtttgaaaatattgctgatatcattgggaggaatttggttgctccaagaacagcactgtttgcgtgcactgtgggacaaaaaccaagcaaagccaaattctacctggatgatacattcgaagtggtcactatgctgagcgcactggcagatgccacaggtcctgaactggagactgattcggctgatgaatctgtcgcatatatctcatcacttgatattggtgacgaacaatcagaatccagtgataaaccagttgaagggtcttagccagttttctcttgcgttttcagaacatgatgattgtttcaatagtcaattctattctacacaattttctgatgggaactcaacgactaacaactggttctacgaatgctccagagtgaagcttctcaatctgctgtgctccaagttctccagttgggcaagatagtacagtctgttgctccaaggcgtagatccatatgttcatagctgacttacttggcacgttctttcactttctcattcctggttgaattaaaatgaaaacctcacagaagacaaagggagcgctgtttggctcattggctgaagtaatctggggggaggtataggagtggcgtatgtgaaaggagcctgtgcgcaggttgtgatatgattccttattaacacgacgttacaaagtggtgtcacttcttgaactaccagtagtaacaatcccaagagtgaggttcgaattgattaattaattgcttcaaagccggatctcggatggttttgctccaacgttttcccctcgtgcggttttttttaataaattttctgggtttacgttgaaagatgccttggaagatagcatatttttaggcctgtctatcagttctgatgaccactgccaatcagcgctggatgcttggcgattgtgtaccttaacacgctaagagcatctccaataatattaatccaaataagagggtattggtgatttcacaattagtgttttttttttgtaaatattagggaaggtgctcaataatccttcacaatatataagatccacctgttctgttggtaaaaaaagaaagattgaacatgaacatggaggtttgctgtgttatatagaaaactcaatgacagagtgcttcctagtaggatgaccctaggacatggaagtcttgtctcctctggcagaactgttgtttaactcttatcacacatcccttggatgttctccattcaaggccttagatggggttgaacctaaaactgg

SEQ ID NO: 75155 - DNA, 3728 bp, Zea Mays
ggacgctgaccctaacgcacccgtggaaaggaatataccgacggcctctcgcttccacccatccggtcgcgtttcccccgttccaaattcgccaacccacaccaccttcctctctctcgccgccgccctcagatcagatcaaagcggaacaccaactcctcctcttcctcctcctcgtagggtttggtgtgttcacctcacctctcgcggcgacagcgaagccttctcttctcttcccctccgctccgctccgctccgctccgctcggtgtttcagccatgatgtcgcggtcgtacaccaacctgctcgacctcgcggagggcaacttcgcggcgctgggcccggccgccggcgccggcggcggcgggcggcagaggcaggggtcgttcgggctgaggcggatgtcgcgggtgatgacggtgccggggacgctctcggagctcgacggcgaggacgagtcggagccggcggccaccagcagcgtcgcctccgacgcgccctcgtccgtggcggcggaccgcctcatagtggtctccaaccagctgcccatcgtcgcgcgccggaggcccgacggccgaggatggtccttcgtgtgggacgacgactcgcttctgctccagctccgcgacggcattcccgaggatatggaggtgctcttcgtcggctccctccgcgccgacgtccccgtagccgagcaggacgaggtgtcgcaggcgttgctcgaccggttccgctgcgcgccggtcttcctccctgaccgcctcaacgaccgcttctaccacggcttctgcaagcgccaactctggcctctgttccactacatgctccccttctcctcatccgcgtccgccgccggcaccacctcttcctcctccgccgccacttgcaacggtcgcttcgaccgcagcgcttgggaggcgtacgtgctcgccaacaagttcttcttcgagaaggtcgtcgaggtaatcaacccggaggatgactacgtttgggttcacgactaccatctcatggcgctgcctaccttcctccgccgctgcttcaaccgcctccgcatcggattcttcctccacagccccttcccctcgtccgagatctaccgcaccctccctgttcgggaggagatactcaaggcgctgctcaactgtgacctaattggcttccacacttttgattacgccaggcacttcctctcgtgctgcagtaggatgctgggaattgaataccagtcaaagcgtgggtacattgaattggattactttggccgcactgtcgggatcaaaatcatgccagtgggagttcatatgggtcaattggagttgggtctgcgcttgcctgatagggaatggaggctttctgagcttcaacggcagtttcaggggaaaactgtcttgcttggtgtggatgatatggatatctttaaggggatcaatttgaagcttctcgcctttgagaacatgttgaggacacatcccaagtggcaggggagagcagtgttagtgcagattgctaacccagcccgtggaaggggtaaagatctggaagccatccaggctgagattgaggagagctgccagcggatcaatggagactttggccagtcagggtatagccctgttgttttcatcggccgtgatgtgtcaagtgttgagaagatcgcctattatacgatagcggaatgtgtggtggtcactgctgtgagggatgggatgaacttgacaccgtatgaatacgttgtctgtaggcagggtgcaccaggatctcagtcggtatcagaggtgagtgggccaaagaagagcatgctggttgtgtcagagtttattggctgctcaccgtcactgagcggtgctattagggttaacccatggaatatagaggcaaccgcagaggcgatgaatgaggccatttcaatgccagaacaggaaaaacagttgaggcatgagaaacattaccgttatgtcaggagccatgacgtcgcttattggtcaaagagcttcatcatagacttggaaagggtttgtaaggatcacttcaagaggacttgttggggcatagggttgggttttggtttcagggtggtggccttggaccctcatttcacaaagcttaacatggattcaatcattaatgcttatgagctttcagagagcagggctatattgctcgattatgatggaactctggttccccaaacttccctcaacaaggaacctagtccacaggttttgagcatcatcaataccctttgctcagatagtagaaacatcgtttttcttgtcagtggtcgagacaaagataccttgggaaagtggttctcctcatgtccaagattggggattgcagctgaacatggttacttcttgagggaataagcaagggaatagttgccgagaggatacttgcatcagtgaaggagagaggaaagcaggctgatttcttattgtgcatcggcgatgataggtctgatgaggacatgtttgaaaatattgctgatatcattgggaggaatttggttgctccaagaacagcactgtttgcgtgcactgtgggacaaaaaccaagcaaagccaaattctacctggatgatacattcgaagtggtcactatgctgagcgcactggcagatgccacaggtcctgaactggagactgattcggctgatgaatctgtcgcatatatctcatcacttgatattggtgacgaacaatcagaatccagtgataaaccagttgaagggtcttagccagttttctcttgcgttttcagaacatgatgattgtttcaatagtcaattctattctacacaattttctgatgggaactcaacgactaacaactggttctacgaatgctccagagtgaagcttctcaatctgctgtgctccaagttctccagttgggcaagatagtacagtctgttgctccaaggcgtagatccatatgttcatagctgacttacttggcacgttctttcactttctcattcctggttgaattaaaatgaaaacctcacagaagacaaagggagcgctgtttggctcattggctgaagtaatctggggggaggtataggagtggcgtatgtgaaaggagcctgtgcgcaggttgtgatatgattccttattaacacgacgttacaaagtggtgtcacttcttgaactaccagtagtaacaatcccaagagtgaggttcgaattgattaattaattgcttcaaagccggatctcggatggttttgctccaacgttttcccctcgtgcggttttttttaataaattttctgggtttacgttgaaagatgccttggaagatagcatatttttaggcctgtctatcagttctgatgaccactgccaatcagcgctggatgcttggcgattgtgtaccttaacacgctaagagcatctccaataatattaatccaaataagagggtattggtgatttcacaattagtgttttttttttgtaaatattagggaaggtgctcaataatccttcacaatatataagatccacctgttctgttggtaaaaaaagaaagattgaacatgaacatggaggtttgctgtgttatatagaaaactcaatgacagagtgcttcctagtaggatgaccctaggacatggaagtcttgtctcctctggcagaactgttgtttaactcttatcacacatcccttggatgttctccattcaaggccttagatggggttgaacctaaaactgg

SEQ ID NO: 75156 - DNA, 1462 bp, Zea Mays
tgccgttgtgtatggatggggcacgggttcaggggttttctcgacctgcgtggggtcttcttcttaatataactcccaggggctgtcttacccccgcagggaataagcaagggaatagttgccgagaggatacttgcatcagtgaaggagagaggaaagcaggctgatttcttattgtgcatcggcgatgataggtctgatgaggacatgtttgaaaatattgctgatatcattgggaggaatttggttgctccaagaacagcactgtttgcgtgcactgtgggacaaaaaccaagcaaagccaaattctacctggatgatacattcgaagtggtcactatgctgagcgcactggcagatgccacaggtcctgaactggagactgattcggctgatgaatctgtcgcatatatctcatcacttgatattggtgacgaacaatcagaatccagtgataaaccagttgaagggtcttagccagttttctcttgcgttttcagaacatgatgattgtttcaatagtcaattctattctacacaattttctgatgggaactcaacgactaacaactggttctacgaatgctccagagtgaagcttctcaatctgctgtgctccaagttctccagttgggcaagatagtacagtctgttgctccaaggcgtagatccatatgttcatagctgacttacttggcacgttctttcactttctcattcctggttgaattaaaatgaaaacctcacagaagacaaagggagcgctgtttggctcattggctgaagtaatctggggggaggtataggagtggcgtatgtgaaaggagcctgtgcgcaggttgtgatatgattccttattaacacgacgttacaaagtggtgtcacttcttgaactaccagtagtaacaatcccaagagtgaggttcgaattgattaattaattgcttcaaagccggatctcggatggttttgctccaacgttttcccctcgtgcggttttttttaataaattttctgggtttacgttgaaagatgccttggaagatagcatatttttaggcctgtctatcagttctgatgaccactgccaatcagcgctggatgcttggcgattgtgtaccttaacacgctaagagcatctccaataatattaatccaaataagagggtattggtgatttcacaattagtgttttttttttgtaaatattagggaaggtgctcaataatccttcacaatatataagatccacctgttctgttggtaaaaaaagaaagattgaacatgaacatggaggtttgctgtgttatatagaaaactcaatgacagagtgcttcctagtaggatgaccctaggacatggaagtcttgtctcctctggcagaactgttgtttaactcttatcacacatcccttggatgttctccattcaaggccttagatggggttgaacctaaaactgg

SEQ ID NO: 75157 - DNA, 5248 bp, Zea Mays
cagagtggcagagtccagagaccagacccgcgagctcaccgctcagactttaccgccaagccttttgttcaccgttactccgttcaccccgcgaggcgtgactcgtgagctctccgtgtcttggcgatgactgggcgaccgacgatgcagccgtaggccaggggccccaggtcttcctctggtccttctccggcgaagagcaccggtcaggtcctgacacatctattttgactggataacaacgaaggtttctctgatattctgatgttgtagcagttactgtggacgatgttcgtttgtgtttatcattttcttggtcttgttcggggcaacaacgacattgggaataagtgtacggcagacaaacagtaacatgggaaggaaaggctcagaaatgtcaccaagtaaaaggtatcccttgaggtctccacatagtagtggtagagttcttcgctctgccttagccaatgataataaggacagtgagcctctgaatgctgctgctgctacccaagccgctgtgaaaaaaagaagtggcagtcagttggatagtcctaatagcagtgtcaggttgtttcactctacatcaaaaaataagaacgaggcatgtagcgggcctctaaatgacaggatccctgataagccagctgcaaataaaagaaaacgtgccagtccttcacaggtgggaagttccagcaacagtgtcagggtgcttcgctctgcaataaaaaataaagatgaggcatgcagtaaatctctaagtgacaggaccgctggtgagccagctgcaaataaaagaaaaaacgtcaatcgctcaaagacggggagtctgagctgtggtgtcagggtgcttctatctgcttcaaaagctaaggatgagacatctaccaagcctttaaatgatagtgctgctgttgaaccagcttcaggtaaaaggaaaggcaccagtccgtcaaaggtgggaagtgccagcaatagtgtcagggtgcttcgatctacttcaaaatataagaatgagacatgtactgagcctttaaatgatagtggtgctgttgaaccagctgcaaataaaaggaaaggtgtcagtcgttcaaagaagagaagtctcaatagcagtgtcagggtgcttcgctctgcctcaaataataagattgaggtatctattaagcctctaggtaatagtactgctggccaaccagctgcgaaaagaagaaaaagcggcagttccttcgaggcaggaagccctgtgagcagtgccagggtgcttcgctctacctcagaaaggaagaatgaggcatctaagcctttaaatgaaagtactgctgctcaaccagctgcgaggaaaaaaaaagctggggtaatttcaaagaccgacaatccaaagattggtctcagggttcttcgctctgcctcaggaaagaagaatgaagcatgtattgggcatgtaaatgatagtacttctgctgaaccaactgtgacaaaaagaaaccgcaagccttcaatggatcgcagtcccaagaaggactacttaaaaatttgtcaaagagttagatatattttgaatcgaatgaactatcaacaaacctttattcaagcttatgcaagtgaaggttggaaaggccaaagtttggaaaaaataagacctgaaaaggagcttgaacgagccaaggcagaaatcctccaatgcaagttaagaatccgtgaagcttttcgaaatatggactctcttttatccaaggggaagcttgaagaatctttgtttgattccgcaggagaaatttcaagcgaagatatattttgtgctgtatgtggctcaaaggatgttactttacaaaatgacatcattctttgtgatggagcctgtgacagaggattccaccagaactgtttgaaccctcctttgctaactgaagatatacctccgggggatcaaagatggctttgccctgcatgtgtctgcaaagcagactctatagatgcactaaatgaacttcaaggaagcaagctctccattcatgactcatgggagaaagttttccctgaggcagcttcaattgccaacggttctaaacaagttgatacttctgatctgctgccagatcatataaagcacagtgacaaccctgcattggttgaagggctgatggtgaatgaagtcaggctttctgcagaggatgacagcaaagcggatgaccttggcttgccttcggaggactcaggggatggtgacttcgatccgtcaggtccagattctagtgaagaccaaaaagatggattgaactcagaagagtcagatttcacatctgactctgatgatttttgtgctgagattgccaaatcttgtggccaggatgaagtctcggcatctccattatcaaatgtgataaaccatacttatagaatgaaactcagggccagcaacaaccgctctaatgaagaaaaccatgatcatgtatttatggacatggagctagggcaagacatggtgctaccagtttcaagcaggcggcaggtggaacggttggattacaaaaaactatatgatgaggcatatgggaaagaatcatctaattcaagtgatgacaaagagtggtctggaaaagaactattagaaggcagtgaaacagattcacttagtgagcgacctcatcctgtaaaacggtgctctagaagagcacaagcagagcagcagaataatgaacatacaccacagagggagcgccttcatggttctgaaagtgagcagaaaactggaattcttcgatccaatggcagcagtagcacaggacggaagtttggtcctgtagctacccagaaattgaaggtacattttgagaaagatccatatcctagccgtgaaacgaaagagaatatatcagaagaactaggcttgacatttaatcaggtctccagatggttctctagcactcgtcactattcaagggttgcttctgccagaaaagaaatgcatcctgacggccatactagcgagaataatgataccacgactgtagatagcatgcaagcaaggcaacccaacactgtggtgatggaaaagttgactgggaatagaaatgacattgtttctgagaaaccgatggtgcagaacaatcttaaccaaggggtggcagaaaagttgactagggatagaaatgacattgttcctgagaaacaggtggtgcagagcaatcttaaccaatgtaataatgaagatatcccgctttctggaacagaaattgagatggagtcttacgaacaagaatcatctgaaagcagtgatgaagagtggtccacacttagcacaccacgaaaaacaaaattacaaggcaacgaaaaagtatcacttactgaatcactacgttctgcaaaacggtgttctagaagagcaccagctagggagcagaataatgaacatactcagagtgagcagcttcatggttctgcaagtgagcagcaagctagagagcaacttcatggttctgtaagtaaacagcaaactgaagttcttcgctccaatgtcagcagtggcgatgcctcaaaatgtcattttggccctatagttactcagaagctgaaggaacattttgaaaaagatccatatccttgccgtgcaacaaaagagggtctggcacaagagctaggactgacatttaatcagatcagtaagtggttctctgccacccatcattattcaagagatgctgttgccaagaaccaaaaatacccaggagaaaatactactgagaataatagtagcacaatctttgatggtatacaagtaatagaacccaattttggtttgatagataaaccagatgcagatacaaatgacatgatttctgaaaagttgatggtacaaattaatcttaacgaaggcattgaagaggatatcccaccgagccaatatactaccaggtgtgaagagaaattaactatgactcaagctgccatctcaagggaagctggacctccaggttatggtcctggagaaaactttcttcaggtcagttcaaggattactagctgtgagcagagtgtgataatggctcctagcgctatcgcaagaggagttggtccaccaggatatacgcctggagaacaccagggcaatggggctccatggaatacaagctatgagcgaagaccgtttacgagtcctacgactagctcaagagaagtcggacctccaggatatgggcctgaagaaaaccaaggcagtggcatttcctgtaatacaagcagagagcaaatattgtttatgagccctacaaccatctcgagagaacttggtccaccaggatatttgcccagagaaaaccagcgcagtgacacttcatggaatacaagctgtgagtcgggactatttatgagtcctgcgaccacctcaatagaacatggtccaccaggatatgggcctggagaaaaccaggagaatgacagtacaagctgcgagttgagaatgtttacaagtcctacaatcgtctccagagaagttggcccaccaggataccagcagggagtgtttatgagtcctaaaaccatctcaagagaagtctgtcctccaggatttgggtctggagagaaccagggcaacgacactacatggtacaaacagagcgcgtttacaagtcctacaaccatctcgagagaagtcggtccgccagggtatggacaggaagatcagggcaatggtggttcttggaacacgagttgtgagcagggagtgtttacgagtcctactagaggcatctcaagagaagtcggtccgccaggatacgggcccggggaaagtcagggcaataccacttcgtggatttcgacctgccagcagagaatgcttgcaggaatccagagaactggtggctcaaggagtatggacttggaagcctttccaccgggatacggacctggtggtgcttcagggagtgtcataagcccccaagctcggtctgcagagaatgtagaattttcggacgaggctagaaaaaaggctatacagcgggagctgagacggcggcagaagttcaggtgaaggcaatatatccagtcttcaagacaagacaatatatccagtcttgatggctgaatgagtgggcgaccttagttgccatcaagcaaaacccttgttgtatcagctgcttatcttccttttacagacttgcttggtttgtcaaggatttcttatgtgaaccctcttgaacctgaagtattcaatgcgctgtgaatttgtgcagttgcctttcttctg

SEQ ID NO: 75158 - DNA, 5243 bp, Zea Mays
cagagtggcagagtccagagaccagacccgcgagctcaccgctcagactttaccgccaagccttttgttcaccgttactccgttcaccccgcgaggcgtgactcgtgagctctccgtgtcttggcgatgactgggcgaccgacgatgcagccgtaggccaggggccccaggtcttcctctggtccttctccggcgaagagcaccggtcaggtcctgacacatctattttgactggataacaacgaaggtttctctgatattctgatgttgtagcagttactgtggacgatgttcgtttgtgtttatcattttcttggtcttgttcggggcaacaacgacattgggaataagtgtacggcagacaaacagtaacatgggaaggaaaggctcagaaatgtcaccaagtaaaaggtatcccttgaggtctccacatagtagtggtagagttcttcgctctgccttagccaatgataataaggacagtgagcctctgaatgctgctgctgctacccaagccgctgtgaaaaaaagaagtggcagtcagttggatagtcctaatagcagtgtcaggttgtttcactctacatcaaaaaataagaacgaggcatgtagcgggcctctaaatgacaggatccctgataagccagctgcaaataaaagaaaacgtgccagtccttcacaggtgggaagttccagcaacagtgtcagggtgcttcgctctgcaataaaaaataaagatgaggcatgcagtaaatctctaagtgacaggaccgctggtgagccagctgcaaataaaagaaaaaacgtcaatcgctcaaagacggggagtctgagctgtggtgtcagggtgcttctatctgcttcaaaagctaaggatgagacatctaccaagcctttaaatgatagtgctgctgttgaaccagcttcaggtaaaaggaaaggcaccagtccgtcaaaggtgggaagtgccagcaatagtgtcagggtgcttcgatctacttcaaaatataagaatgagacatgtactgagcctttaaatgatagtggtgctgttgaaccagctgcaaataaaaggaaaggtgtcagtcgttcaaagaagagaagtctcaatagcagtgtcagggtgcttcgctctgcctcaaataataagattgaggtatctattaagcctctaggtaatagtactgctggccaaccagctgcgaaaagaagaaaaagcggcagttccttcgaggcaggaagccctgtgagcagtgccagggtgcttcgctctacctcagaaaggaagaatgaggcatctaagcctttaaatgaaagtactgctgctcaaccagctgcgaggaaaaaaaaagctggggtaatttcaaagaccgacaatccaaagattggtctcagggttcttcgctctgcctcaggaaagaagaatgaagcatgtattgggcatgtaaatgatagtacttctgctgaaccaactgtgacaaaaagaaaccgcaagccttcaatggatcgcagtcccaagaaggactacttaaaaatttgtcaaagagttagatatattttgaatcgaatgaactatcaacaaacctttattcaagcttatgcaagtgaaggttggaaaggccaaagtttggaaaaaataagacctgaaaaggagcttgaacgagccaaggcagaaatcctccaatgcaagttaagaatccgtgaagcttttcgaaatatggactctcttttatccaaggggaagcttgaagaatctttgtttgattccgcaggagaaatttcaagcgaagatatattttgtgctgtatgtggctcaaaggatgttactttacaaaatgacatcattctttgtgatggagcctgtgacagaggattccaccagaactgtttgaaccctcctttgctaactgaagatatacctccgggggatcaaagatggctttgccctgcatgtgtctgcaaagcagactctatagatgcactaaatgaacttcaaggaagcaagctctccattcatgactcatgggagaaagttttccctgaggcagcttcaattgccaacggttctaaacaagttgatacttctgatctgctgccagatcatataaagcacagtgacaaccctgcattggttgaagggctgatggtgaatgaagtcaggctttctgcagaggatgacagcaaagcggatgaccttggcttgccttcggaggactcaggggatggtgacttcgatccgtcaggtccagattctagtgaagaccaaaaagatggattgaactcagaagagtcagatttcacatctgactctgatgatttttgtgctgagattgccaaatcttgtggccaggatgaagtctcggcatctccattatcaaatgtgataaaccatacttatagaatgaaactcagggccagcaacaaccgctctaatgaagaaaaccatgatcatgtatttatggacatggagctagggcaagacatggtgctaccagtttcaagcaggcggcaggtggaacggttggattacaaaaaactatatgatgaggcatatgggaaagaatcatctaattcaagtgatgacaaagagtggtctggaaaagaactattagaaggcagtgaaacagattcacttagtgagcgacctcatcctgtaaaacggtgctctagaagagcacaagcagagcagcagaataatgaacatacaccacagagggagcgccttcatggttctgaaagtgagcagaaaactggaattcttcgatccaatggcagcagtagcacaggacggaagtttggtcctgtagctacccagaaattgaaggtacattttgagaaagatccatatcctagccgtgaaacgaaagagaatatatcagaagaactaggcttgacatttaatcaggtctccagatggttctctagcactcgtcactattcaagggttgcttctgccagaaaagaaatgcatcctgacggccatactagcgagaataatgataccacgactgtagatagcatgcaagcaaggcaacccaacactgtggtgatggaaaagttgactgggaatagaaatgacattgtttctgagaaaccgatggtgcagaacaatcttaaccaaggggtggcagaaaagttgactagggatagaaatgacattgttcctgagaaacaggtggtgcagagcaatcttaaccaatgtaataatgaagatatcccgctttctggaacagaaattgagatggagtcttacgaacaagaatcatctgaaagcagtgatgaagagtggtccacacttagcacaccacgaaaaacaaaattacaaggcaacgaaaaagtatcacttactgaatcactacgttctgcaaaacggtgttctagaagagcaccagctagggagcagaataatgaacatactcagagtgagcagcttcatggttctgcaagtgagcagcaagctagagagcaacttcatggttctgtaagtaaacagcaaactgaagttcttcgctccaatgtcagcagtggcgatgcctcaaaatgtcattttggccctatagttactcagaagctgaaggaacattttgaaaaagatccatatccttgccgtgcaacaaaagagggtctggcacaagagctaggactgacatttaatcagtaagtggttctctgccacccatcattattcaagagatgctgttgccaagaaccaaaaatacccaggagaaaatactactgagaataatagtagcacaatctttgatggtatacaagtaatagaacccaattttggtttgatagataaaccagatgcagatacaaatgacatgatttctgaaaagttgatggtacaaattaatcttaacgaaggcattgaagaggatatcccaccgagccaatatactaccaggtgtgaagagaaattaactatgactcaagctgccatctcaagggaagctggacctccaggttatggtcctggagaaaactttcttcaggtcagttcaaggattactagctgtgagcagagtgtgataatggctcctagcgctatcgcaagaggagttggtccaccaggatatacgcctggagaacaccagggcaatggggctccatggaatacaagctatgagcgaagaccgtttacgagtcctacgactagctcaagagaagtcggacctccaggatatgggcctgaagaaaaccaaggcagtggcatttcctgtaatacaagcagagagcaaatattgtttatgagccctacaaccatctcgagagaacttggtccaccaggatatttgcccagagaaaaccagcgcagtgacacttcatggaatacaagctgtgagtcgggactatttatgagtcctgcgaccacctcaatagaacatggtccaccaggatatgggcctggagaaaaccaggagaatgacagtacaagctgcgagttgagaatgtttacaagtcctacaatcgtctccagagaagttggcccaccaggataccagcagggagtgtttatgagtcctaaaaccatctcaagagaagtctgtcctccaggatttgggtctggagagaaccagggcaacgacactacatggtacaaacagagcgcgtttacaagtcctacaaccatctcgagagaagtcggtccgccagggtatggacaggaagatcagggcaatggtggttcttggaacacgagttgtgagcagggagtgtttacgagtcctactagaggcatctcaagagaagtcggtccgccaggatacgggcccggggaaagtcagggcaataccacttcgtggatttcgacctgccagcagagaatgcttgcaggaatccagagaactggtggctcaaggagtatggacttggaagcctttccaccgggatacggacctggtggtgcttcagggagtgtcataagcccccaagctcggtctgcagagaatgtagaattttcggacgaggctagaaaaaaggctatacagcgggagctgagacggcggcagaagttcaggtgaaggcaatatatccagtcttcaagacaagacaatatatccagtcttgatggctgaatgagtgggcgaccttagttgccatcaagcaaaacccttgttgtatcagctgcttatcttccttttacagacttgcttggtttgtcaaggatttcttatgtgaaccctcttgaacctgaagtattcaatgcgctgtgaatttgtgcagttgcctttcttctg

SEQ ID NO: 75159 - DNA, 5171 bp, Zea Mays
agtccagagaccagacccgcgagctcaccgctcagactttaccgccaagccttttgttcaccgttactccgttcaccccgcgaggcgtgactcgtgagctctccgtgtcttggcgatgactgggcgaccgacgatgcagccgtaggccaggggccccaggtcttcctctggtccttctccggcgaagagcaccggtcagttactgtggacgatgttcgtttgtgtttatcattttcttggtcttgttcggggcaacaacgacattgggaataagtgtacggcagacaaacagtaacatgggaaggaaaggctcagaaatgtcaccaagtaaaaggtatcccttgaggtctccacatagtagtggtagagttcttcgctctgccttagccaatgataataaggacagtgagcctctgaatgctgctgctgctacccaagccgctgtgaaaaaaagaagtggcagtcagttggatagtcctaatagcagtgtcaggttgtttcactctacatcaaaaaataagaacgaggcatgtagcgggcctctaaatgacaggatccctgataagccagctgcaaataaaagaaaacgtgccagtccttcacaggtgggaagttccagcaacagtgtcagggtgcttcgctctgcaataaaaaataaagatgaggcatgcagtaaatctctaagtgacaggaccgctggtgagccagctgcaaataaaagaaaaaacgtcaatcgctcaaagacggggagtctgagctgtggtgtcagggtgcttctatctgcttcaaaagctaaggatgagacatctaccaagcctttaaatgatagtgctgctgttgaaccagcttcaggtaaaaggaaaggcaccagtccgtcaaaggtgggaagtgccagcaatagtgtcagggtgcttcgatctacttcaaaatataagaatgagacatgtactgagcctttaaatgatagtggtgctgttgaaccagctgcaaataaaaggaaaggtgtcagtcgttcaaagaagagaagtctcaatagcagtgtcagggtgcttcgctctgcctcaaataataagattgaggtatctattaagcctctaggtaatagtactgctggccaaccagctgcgaaaagaagaaaaagcggcagttccttcgaggcaggaagccctgtgagcagtgccagggtgcttcgctctacctcagaaaggaagaatgaggcatctaagcctttaaatgaaagtactgctgctcaaccagctgcgaggaaaaaaaaagctggggtaatttcaaagaccgacaatccaaagattggtctcagggttcttcgctctgcctcaggaaagaagaatgaagcatgtattgggcatgtaaatgatagtacttctgctgaaccaactgtgacaaaaagaaaccgcaagccttcaatggatcgcagtcccaagaaggactacttaaaaatttgtcaaagagttagatatattttgaatcgaatgaactatcaacaaacctttattcaagcttatgcaagtgaaggttggaaaggccaaagtttggaaaaaataagacctgaaaaggagcttgaacgagccaaggcagaaatcctccaatgcaagttaagaatccgtgaagcttttcgaaatatggactctcttttatccaaggggaagcttgaagaatctttgtttgattccgcaggagaaatttcaagcgaagatatattttgtgctgtatgtggctcaaaggatgttactttacaaaatgacatcattctttgtgatggagcctgtgacagaggattccaccagaactgtttgaaccctcctttgctaactgaagatatacctccgggggatcaaagatggctttgccctgcatgtgtctgcaaagcagactctatagatgcactaaatgaacttcaaggaagcaagctctccattcatgactcatgggagaaagttttccctgaggcagcttcaattgccaacggttctaaacaagttgatacttctgatctgctgccagatcatataaagcacagtgacaaccctgcattggttgaagggctgatggtgaatgaagtcaggctttctgcagaggatgacagcaaagcggatgaccttggcttgccttcggaggactcaggggatggtgacttcgatccgtcaggtccagattctagtgaagaccaaaaagatggattgaactcagaagagtcagatttcacatctgactctgatgatttttgtgctgagattgccaaatcttgtggccaggatgaagtctcggcatctccattatcaaatgtgataaaccatacttatagaatgaaactcagggccagcaacaaccgctctaatgaagaaaaccatgatcatgtatttatggacatggagctagggcaagacatggtgctaccagtttcaagcaggcggcaggtggaacggttggattacaaaaaactatatgatgaggcatatgggaaagaatcatctaattcaagtgatgacaaagagtggtctggaaaagaactattagaaggcagtgaaacagattcacttagtgagcgacctcatcctgtaaaacggtgctctagaagagcacaagcagagcagcagaataatgaacatacaccacagagggagcgccttcatggttctgaaagtgagcagaaaactggaattcttcgatccaatggcagcagtagcacaggacggaagtttggtcctgtagctacccagaaattgaaggtacattttgagaaagatccatatcctagccgtgaaacgaaagagaatatatcagaagaactaggcttgacatttaatcaggtctccagatggttctctagcactcgtcactattcaagggttgcttctgccagaaaagaaatgcatcctgacggccatactagcgagaataatgataccacgactgtagatagcatgcaagcaaggcaacccaacactgtggtgatggaaaagttgactgggaatagaaatgacattgtttctgagaaaccgatggtgcagaacaatcttaaccaaggggtggcagaaaagttgactagggatagaaatgacattgttcctgagaaacaggtggtgcagagcaatcttaaccaatgtaataatgaagatatcccgctttctggaacagaaattgagatggagtcttacgaacaagaatcatctgaaagcagtgatgaagagtggtccacacttagcacaccacgaaaaacaaaattacaaggcaacgaaaaagtatcacttactgaatcactacgttctgcaaaacggtgttctagaagagcaccagctagggagcagaataatgaacatactcagagtgagcagcttcatggttctgcaagtgagcagcaagctagagagcaacttcatggttctgtaagtaaacagcaaactgaagttcttcgctccaatgtcagcagtggcgatgcctcaaaatgtcattttggccctatagttactcagaagctgaaggaacattttgaaaaagatccatatccttgccgtgcaacaaaagagggtctggcacaagagctaggactgacatttaatcagatcagtaagtggttctctgccacccatcattattcaagagatgctgttgccaagaaccaaaaatacccaggagaaaatactactgagaataatagtagcacaatctttgatggtatacaagtaatagaacccaattttggtttgatagataaaccagatgcagatacaaatgacatgatttctgaaaagttgatggtacaaattaatcttaacgaaggcattgaagaggatatcccaccgagccaatatactaccaggtgtgaagagaaattaactatgactcaagctgccatctcaagggaagctggacctccaggttatggtcctggagaaaactttcttcaggtcagttcaaggattactagctgtgagcagagtgtgataatggctcctagcgctatcgcaagaggagttggtccaccaggatatacgcctggagaacaccagggcaatggggctccatggaatacaagctatgagcgaagaccgtttacgagtcctacgactagctcaagagaagtcggacctccaggatatgggcctgaagaaaaccaaggcagtggcatttcctgtaatacaagcagagagcaaatattgtttatgagccctacaaccatctcgagagaacttggtccaccaggatatttgcccagagaaaaccagcgcagtgacacttcatggaatacaagctgtgagtcgggactatttatgagtcctgcgaccacctcaatagaacatggtccaccaggatatgggcctggagaaaaccaggagaatgacagtacaagctgcgagttgagaatgtttacaagtcctacaatcgtctccagagaagttggcccaccaggataccagcagggagtgtttatgagtcctaaaaccatctcaagagaagtctgtcctccaggatttgggtctggagagaaccagggcaacgacactacatggtacaaacagagcgcgtttacaagtcctacaaccatctcgagagaagtcggtccgccagggtatggacaggaagatcagggcaatggtggttcttggaacacgagttgtgagcagggagtgtttacgagtcctactagaggcatctcaagagaagtcggtccgccaggatacgggcccggggaaagtcagggcaataccacttcgtggatttcgacctgccagcagagaatgcttgcaggaatccagagaactggtggctcaaggagtatggacttggaagcctttccaccgggatacggacctggtggtgcttcagggagtgtcataagcccccaagctcggtctgcagagaatgtagaattttcggacgaggctagaaaaaaggctatacagcgggagctgagacggcggcagaagttcaggtgaaggcaatatatccagtcttcaagacaagacaatatatccagtcttgatggctgaatgagtgggcgaccttagttgccatcaagcaaaacccttgttgtatcagctgcttatcttccttttacagacttgcttggtttgtcaaggatttcttatgtgaaccctcttgaacctgaagtattcaatgcgctgtgaatttgtgcagttgcctttcttctg

SEQ ID NO: 75160 - DNA, 5193 bp, Zea Mays
cagacccgcgagctcaccgctcagactttaccgccaagccttttgttcaccgttactccgttcaccccgcgaggcgtgactcgtgagctctccgtgtcttggcgatgactgggcgaccgacgatgcagccgtaggccaggggccccaggtcttcctctggtccttctccggcgaagagcaccggtcaggtcctgacacatctattttgactggataacaacgaaggtttctctgatattctgatgttgtagcagttactgtggacgatgttcgtttgtgtttatcattttcttggtcttgttcggggcaacaacgacattgggaataagtgtacggcagacaaacagtaacatgggaaggaaaggctcagaaatgtcaccaagtaaaaggtatcccttgaggtctccacatagtagtggtagagttcttcgctctgccttagccaatgataataaggacagtgagcctctgaatgctgctgctgctacccaagccgctgtgaaaaaaagaagtggcagtcagttggatagtcctaatagcagtgtcaggttgtttcactctacatcaaaaaataagaacgaggcatgtagcgggcctctaaatgacaggatccctgataagccagctgcaaataaaagaaaacgtgccagtccttcacaggtgggaagttccagcaacagtgtcagggtgcttcgctctgcaataaaaaataaagatgaggcatgcagtaaatctctaagtgacaggaccgctggtgagccagctgcaaataaaagaaaaaacgtcaatcgctcaaagacggggagtctgagctgtggtgtcagggtgcttctatctgcttcaaaagctaaggatgagacatctaccaagcctttaaatgatagtgctgctgttgaaccagcttcaggtaaaaggaaaggcaccagtccgtcaaaggtgggaagtgccagcaatagtgtcagggtgcttcgatctacttcaaaatataagaatgagacatgtactgagcctttaaatgatagtggtgctgttgaaccagctgcaaataaaaggaaaggtgtcagtcgttcaaagaagagaagtctcaatagcagtgtcagggtgcttcgctctgcctcaaataataagattgaggtatctattaagcctctaggtaatagtactgctggccaaccagctgcgaaaagaagaaaaagcggcagttccttcgaggcaggaagccctgtgagcagtgccagggtgcttcgctctacctcagaaaggaagaatgaggcatctaagcctttaaatgaaagtactgctgctcaaccagctgcgaggaaaaaaaaagctggggtaatttcaaagaccgacaatccaaagattggtctcagggttcttcgctctgcctcaggaaagaagaatgaagcatgtattgggcatgtaaatgatagtacttctgctgaaccaactgtgacaaaaagaaaccgcaagccttcaatggatcgcagtcccaagaaggactacttaaaaatttgtcaaagagttagatatattttgaatcgaatgaactatcaacaaacctttattcaagcttatgcaagtgaaggttggaaaggccaaagtttggaaaaaataagacctgaaaaggagcttgaacgagccaaggcagaaatcctccaatgcaagttaagaatccgtgaagcttttcgaaatatggactctcttttatccaaggggaagcttgaagaatctttgtttgattccgcaggagaaatttcaagcgaagatatattttgtgctgtatgtggctcaaaggatgttactttacaaaatgacatcattctttgtgatggagcctgtgacagaggattccaccagaactgtttgaaccctcctttgctaactgaagatatacctccgggggatcaaagatggctttgccctgcatgtgtctgcaaagcagactctatagatgcactaaatgaacttcaaggaagcaagctctccattcatgactcatgggagaaagttttccctgaggcagcttcaattgccaacggttctaaacaagttgatacttctgatctgctgccagatcatataaagcacagtgacaaccctgcattggttgaagggctgatggtgaatgaagtcaggctttctgcagaggatgacagcaaaggggatggtgacttcgatccgtcaggtccagattctagtgaagaccaaaaagatggattgaactcagaagagtcagatttcacatctgactctgatgatttttgtgctgagattgccaaatcttgtggccaggatgaagtctcggcatctccattatcaaatgtgataaaccatacttatagaatgaaactcagggccagcaacaaccgctctaatgaagaaaaccatgatcatgtatttatggacatggagctagggcaagacatggtgctaccagtttcaagcaggcggcaggtggaacggttggattacaaaaaactatatgatgaggcatatgggaaagaatcatctaattcaagtgatgacaaagagtggtctggaaaagaactattagaaggcagtgaaacagattcacttagtgagcgacctcatcctgtaaaacggtgctctagaagagcacaagcagagcagcagaataatgaacatacaccacagagggagcgccttcatggttctgaaagtgagcagaaaactggaattcttcgatccaatggcagcagtagcacaggacggaagtttggtcctgtagctacccagaaattgaaggtacattttgagaaagatccatatcctagccgtgaaacgaaagagaatatatcagaagaactaggcttgacatttaatcaggtctccagatggttctctagcactcgtcactattcaagggttgcttctgccagaaaagaaatgcatcctgacggccatactagcgagaataatgataccacgactgtagatagcatgcaagcaaggcaacccaacactgtggtgatggaaaagttgactgggaatagaaatgacattgtttctgagaaaccgatggtgcagaacaatcttaaccaaggggtggcagaaaagttgactagggatagaaatgacattgttcctgagaaacaggtggtgcagagcaatcttaaccaatgtaataatgaagatatcccgctttctggaacagaaattgagatggagtcttacgaacaagaatcatctgaaagcagtgatgaagagtggtccacacttagcacaccacgaaaaacaaaattacaaggcaacgaaaaagtatcacttactgaatcactacgttctgcaaaacggtgttctagaagagcaccagctagggagcagaataatgaacatactcagagtgagcagcttcatggttctgcaagtgagcagcaagctagagagcaacttcatggttctgtaagtaaacagcaaactgaagttcttcgctccaatgtcagcagtggcgatgcctcaaaatgtcattttggccctatagttactcagaagctgaaggaacattttgaaaaagatccatatccttgccgtgcaacaaaagagggtctggcacaagagctaggactgacatttaatcagatcagtaagtggttctctgccacccatcattattcaagagatgctgttgccaagaaccaaaaatacccaggagaaaatactactgagaataatagtagcacaatctttgatggtatacaagtaatagaacccaattttggtttgatagataaaccagatgcagatacaaatgacatgatttctgaaaagttgatggtacaaattaatcttaacgaaggcattgaagaggatatcccaccgagccaatatactaccaggtgtgaagagaaattaactatgactcaagctgccatctcaagggaagctggacctccaggttatggtcctggagaaaactttcttcaggtcagttcaaggattactagctgtgagcagagtgtgataatggctcctagcgctatcgcaagaggagttggtccaccaggatatacgcctggagaacaccagggcaatggggctccatggaatacaagctatgagcgaagaccgtttacgagtcctacgactagctcaagagaagtcggacctccaggatatgggcctgaagaaaaccaaggcagtggcatttcctgtaatacaagcagagagcaaatattgtttatgagccctacaaccatctcgagagaacttggtccaccaggatatttgcccagagaaaaccagcgcagtgacacttcatggaatacaagctgtgagtcgggactatttatgagtcctgcgaccacctcaatagaacatggtccaccaggatatgggcctggagaaaaccaggagaatgacagtacaagctgcgagttgagaatgtttacaagtcctacaatcgtctccagagaagttggcccaccaggataccagcagggagtgtttatgagtcctaaaaccatctcaagagaagtctgtcctccaggatttgggtctggagagaaccagggcaacgacactacatggtacaaacagagcgcgtttacaagtcctacaaccatctcgagagaagtcggtccgccagggtatggacaggaagatcagggcaatggtggttcttggaacacgagttgtgagcagggagtgtttacgagtcctactagaggcatctcaagagaagtcggtccgccaggatacgggcccggggaaagtcagggcaataccacttcgtggatttcgacctgccagcagagaatgcttgcaggaatccagagaactggtggctcaaggagtatggacttggaagcctttccaccgggatacggacctggtggtgcttcagggagtgtcataagcccccaagctcggtctgcagagaatgtagaattttcggacgaggctagaaaaaaggctatacagcgggagctgagacggcggcagaagttcaggtgaaggcaatatatccagtcttcaagacaagacaatatatccagtcttgatggctgaatgagtgggcgaccttagttgccatcaagcaaaacccttgttgtatcagctgcttatcttccttttacagacttgcttggtttgtcaaggatttcttatgtgaaccctcttgaacctgaagtattcaatgcgctgtgaatttgtgcagttgcctttcttctg

SEQ ID NO: 75161 - DNA, 5010 bp, Zea Mays
cagacccgcgagctcaccgctcagactttaccgccaagccttttgttcaccgttactccgttcaccccgcgaggcgtgactcgtgagctctccgtgtcttggcgatgactgggcgaccgacgatgcagccgtaggccaggggccccaggtcttcctctggtccttctccggcgaagagcaccggtcagttactgtggacgatgttcgtttgtgtttatcattttcttggtcttgttcggggcaacaacgacattgggaataagtgtacggcagacaaacagtaacatgggaaggaaaggctcagaaatgtcaccaagtaaaaggtatcccttgaggtctccacatagtagtggtagagttcttcgctctgccttagccaatgataataaggacagtgagcctctgaatgctgctgctgctacccaagccgctgtgaaaaaaagaagtggcagtcagttggatagtcctaatagcagtgtcaggttgtttcactctacatcaaaaaataagaacgaggcatgtagcgggcctctaaatgacaggatccctgataagccagctgcaaataaaagaaaacgtgccagtccttcacaggtgggaagttccagcaacagtgtcagggtgcttcgctctgcaataaaaaataaagatgaggcatgcagtaaatctctaagtgacaggaccgctggtgagccagctgcaaataaaagaaaaaacgtcaatcgctcaaagacggggagtctgagctgtggtgtcagggtgcttctatctgcttcaaaagctaaggatgagacatctaccaagcctttaaatgatagtgctgctgttgaaccagcttcaggtaaaaggaaaggcaccagtccgtcaaaggtgggaagtgccagcaatagtgtcagggtgcttcgatctacttcaaaatataagaatgagacatgtactgagcctttaaatgatagtggtgctgttgaaccagctgcaaataaaaggaaaggtgtcagtcgttcaaagaagagaagtctcaatagcagtgtcagggtgcttcgctctgcctcaaataataagattgaggtatctattaagcctctaggtaatagtactgctggccaaccagctgcgaaaagaagaaaaagcggcagttccttcgaggcaggaagccctgtgagcagtgccagggtgcttcgctctacctcagaaaggaagaatgaggcatctaagcctttaaatgaaagtactgctgctcaaccagctgcgaggaaaaaaaaagctggggtaatttcaaagaccgacaatccaaagattggtctcagggttcttcgctctgcctcaggaaagaagaatgaagcatgtattgggcatgtaaatgatagtacttctgctgaaccaactgtgacaaaaagaaaccgcaagccttcaatggatcgcagtcccaagaaggactacttaaaaatttgtcaaagagttagatatattttgaatcgaatgaactatcaacaaacctttattcaagcttatgcaagtgaaggttggaaaggccaaagtttggaaaaaataagacctgaaaaggagcttgaacgagccaaggcagaaatcctccaatgcaagttaagaatccgtgaagcttttcgaaatatggactctcttttatccaaggggaagcttgaagaatctttgtttgattccgcaggagaaatttcaagcgaagatgtaggggtacctccgggggatcaaagatggctttgccctgcatgtgtctgcaaagcagactctatagatgcactaaatgaacttcaaggaagcaagctctccattcatgactcatgggagaaagttttccctgaggcagcttcaattgccaacggttctaaacaagttgatacttctgatctgctgccagatcatataaagcacagtgacaaccctgcattggttgaagggctgatggtgaatgaagtcaggctttctgcagaggatgacagcaaaggggatggtgacttcgatccgtcaggtccagattctagtgaagaccaaaaagatggattgaactcagaagagtcagatttcacatctgactctgatgatttttgtgctgagattgccaaatcttgtggccaggatgaagtctcggcatctccattatcaaatgtgataaaccatacttatagaatgaaactcagggccagcaacaaccgctctaatgaagaaaaccatgatcatgtatttatggacatggagctagggcaagacatggtgctaccagtttcaagcaggcggcaggtggaacggttggattacaaaaaactatatgatgaggcatatgggaaagaatcatctaattcaagtgatgacaaagagtggtctggaaaagaactattagaaggcagtgaaacagattcacttagtgagcgacctcatcctgtaaaacggtgctctagaagagcacaagcagagcagcagaataatgaacatacaccacagagggagcgccttcatggttctgaaagtgagcagaaaactggaattcttcgatccaatggcagcagtagcacaggacggaagtttggtcctgtagctacccagaaattgaaggtacattttgagaaagatccatatcctagccgtgaaacgaaagagaatatatcagaagaactaggcttgacatttaatcaggtctccagatggttctctagcactcgtcactattcaagggttgcttctgccagaaaagaaatgcatcctgacggccatactagcgagaataatgataccacgactgtagatagcatgcaagcaaggcaacccaacactgtggtgatggaaaagttgactgggaatagaaatgacattgtttctgagaaaccgatggtgcagaacaatcttaaccaaggggtggcagaaaagttgactagggatagaaatgacattgttcctgagaaacaggtggtgcagagcaatcttaaccaatgtaataatgaagatatcccgctttctggaacagaaattgagatggagtcttacgaacaagaatcatctgaaagcagtgatgaagagtggtccacacttagcacaccacgaaaaacaaaattacaaggcaacgaaaaagtatcacttactgaatcactacgttctgcaaaacggtgttctagaagagcaccagctagggagcagaataatgaacatactcagagtgagcagcttcatggttctgcaagtgagcagcaagctagagagcaacttcatggttctgtaagtaaacagcaaactgaagttcttcgctccaatgtcagcagtggcgatgcctcaaaatgtcattttggccctatagttactcagaagctgaaggaacattttgaaaaagatccatatccttgccgtgcaacaaaagagggtctggcacaagagctaggactgacatttaatcagatcagtaagtggttctctgccacccatcattattcaagagatgctgttgccaagaaccaaaaatacccaggagaaaatactactgagaataatagtagcacaatctttgatggtatacaagtaatagaacccaattttggtttgatagataaaccagatgcagatacaaatgacatgatttctgaaaagttgatggtacaaattaatcttaacgaaggcattgaagaggatatcccaccgagccaatatactaccaggtgtgaagagaaattaactatgactcaagctgccatctcaagggaagctggacctccaggttatggtcctggagaaaactttcttcaggtcagttcaaggattactagctgtgagcagagtgtgataatggctcctagcgctatcgcaagaggagttggtccaccaggatatacgcctggagaacaccagggcaatggggctccatggaatacaagctatgagcgaagaccgtttacgagtcctacgactagctcaagagaagtcggacctccaggatatgggcctgaagaaaaccaaggcagtggcatttcctgtaatacaagcagagagcaaatattgtttatgagccctacaaccatctcgagagaacttggtccaccaggatatttgcccagagaaaaccagcgcagtgacacttcatggaatacaagctgtgagtcgggactatttatgagtcctgcgaccacctcaatagaacatggtccaccaggatatgggcctggagaaaaccaggagaatgacagtacaagctgcgagttgagaatgtttacaagtcctacaatcgtctccagagaagttggcccaccaggataccagcagggagtgtttatgagtcctaaaaccatctcaagagaagtctgtcctccaggatttgggtctggagagaaccagggcaacgacactacatggtacaaacagagcgcgtttacaagtcctacaaccatctcgagagaagtcggtccgccagggtatggacaggaagatcagggcaatggtggttcttggaacacgagttgtgagcagggagtgtttacgagtcctactagaggcatctcaagagaagtcggtccgccaggatacgggcccggggaaagtcagggcaataccacttcgtggatttcgacctgccagcagagaatgcttgcaggaatccagagaactggtggctcaaggagtatggacttggaagcctttccaccgggatacggacctggtggtgcttcagggagtgtcataagcccccaagctcggtctgcagagaatgtagaattttcggacgaggctagaaaaaaggctatacagcgggagctgagacggcggcagaagttcaggtgaaggcaatatatccagtcttcaagacaagacaatatatccagtcttgatggctgaatgagtgggcgaccttagttgccatcaagcaaaacccttgttgtatcagctgcttatcttccttttacagacttgcttggtttgtcaaggatttcttatgtgaaccctcttgaacctgaagtattcaatgcgctgtgaatttgtgcagttgcctttcttctg

SEQ ID NO: 75162 - DNA, 2752 bp, Zea Mays
cgtcgcatttcaaattgaaccccccgtttcctcaagtgctgtcgtttcgttcgcaccccaccccatggtggccagctcccactcgtccccggcggccagccggacgccgaacctgaaatcggcgctggcgccgtcaccatccccatccacccgccgggcggcaacagatgtggcatcggcgtcggccgcggtggactcgaaagcacggttcgaggcttacaaccggctgcaggcggcggcagtggctttcggcgagaatcttcccatcccggagatagtggcgataggaggccagtcggatgggaagagctccctcctggaggcgctccttggcttccgcttcaacgtccgcgaggttgagatgggcacccgccgtcctctcgtcctccagatggttcacgaccccaccgccctcgagcccagatgccgattccaggaggaggattccgaggagtacgggagcccgatggtgctggctactgccatcgcggacctcatcaagcagcgcactgaatcacacctccggaagatccaggctgctgtctcatccaaaccaatcgtcatgagggcagagtatgcccactgccccaacctcacaatcatcgacaccccaggtttcgtgcttaaggctaagagaggcgagccagggagcacaccggatgagatacggtcaatggtgaagtcactcgcgtcccctcctcaccgcctcgttctgttcctccagcaaagcagcgttgagtggtgctcgtcgatctggcttgacacgcttaaagagattgaccccactttcaggcgcaccataatagtcatctccaagtttgacaaccgtctcaagagaggtgggaggtcgataccttcttgagtgcaagtggctaccttggggataacatccacccgttcttcgtggctcttccaaaggaccatggtacaatttccaatgaggagttccgcaggcagatctgtcaggtcgatattgatgtgctacgtcacttgcgagaaaatgtgaaagggggtttcaatgaagagaaatatgtatcatgcattgggttcagctgcctcaagaagtacctcgaatctgaacttcagaagaggtacaaagaagcagctccagctaccctggcattgttagagcagaggtgcaccgaagtctcaatgaacctaacgagactagactccaaactacaagcagcgtcggatgtctctcagctccggagatcggcaatgcttcatgcagcttctatttgcaccaacttgaatgcattacttgatggagctgctgatccagctccagaaatatgggggaaaactacggaggaggaacaaatacatagtggtattggcagctggcctggcattaatatgcctgtaaaacctgccaactccagccttaagctgtatggtggtgcagcttttgagagagtaatgcatgaatttcgctgtgcaacgtattcattggaatgcccacaagtgtcaagggagaaggttgcgaacatactacttgctcatgctggaagacgcggaagcagtaggttgactgaggcagcagttgcgatagctcgtgcagccgcacgatcatggcttgctcctcttattgataccgcatgtgaccggcttgcatttgtcctacaaaatctgtttgatcttgctatggagcgcaaccgcaataatgactcacaatatcatcaaaattttgaagatatggatagttatgttggctttcttgctgctctccggtgctcatattataagttcgtcaaagaactgtccaagcaatgcaagcagatagtgcgtcatcaccttgattctgttacgagcccctactcccatatttgctacgacgacgacttttttagtggtgttggatctgtagcaaactccacgtgtaggtttaaccacttcactggagttacatcctttgacctagcagacagtggatcagcactagaggaagctcaggagaacttgcctccaaaagatcagcaccatatgacaccgcctattaataaagggaatgactcaaaggaggtcctcagagaaagccagctaacagtacctgagacaccttctcctgatctgccatctgatatacatggtggtaagaagaaagataatgggatcccaaatgacggtggcccaaggaaaagacatgccaggatggcagcatatacaagcagaaatcaccataacagtatgattggtgctgatgacatggcctcaaagtcagggtcatcatactccaccatatgcgcaatatctgctcaatattttgccaaaatgcgagaagtccttattgaaagaaatgccccctctgcattgaactctggattcttaacaccatgccgtgaaaggttatttctggcacttggctttgagctatttgctgtgagtgacaataagttcatgggcatgtttgtcctgcctggggcagttgatggtatccagaatgagcgccattctcttctcaaacggcagaagattttgctgtcctgtttgaacgagtttaagaacatatcccgggctctgtaatgatgatgtttctcgatttcttcaggcctttattgtgtatcctttagacccattctgttgtcatgtatctttcttggcataacctattttcttgaaatctgtaccactctctgtcaagttccttcgctgacaaggtctttatcactaacatttgttcagattcaatacttgatattattgattatgctcgatgactcgaatacaaaactattaacttgtgatctca

SEQ ID NO: 75163 - DNA, 2760 bp, Zea Mays
cgtcgcatttcaaattgaaccccccgtttcctcaagtgctgtcgtttcgttcgcaccccaccccatggtggccagctcccactcgtccccggcggccagccggacgccgaacctgaaatcggcgctggcgccgtcaccatccccatccacccgccgggcggcaacagatgtggcatcggcgtcggccgcggtggactcgaaagcacggttcgaggcttacaaccggctgcaggcggcggcagtggctttcggcgagaatcttcccatcccggagatagtggcgataggaggccagtcggatgggaagagctccctcctggaggcgctccttggcttccgcttcaacgtccgcgaggttgagatgggcacccgccgtcctctcgtcctccagatggttcacgaccccaccgccctcgagcccagatgccgattccaggaggaggattccgaggagtacgggagcccgatggtgctggctactgccatcgcggacctcatcaagcagcgcactgaatcacacctccggaagatccaggctgctgtctcatccaaaccaatcgtcatgagggcagagtatgcccactgccccaacctcacaatcatcgacaccccaggtttcgtgcttaaggctaagagaggcgagccagggagcacaccggatgagatacggtcaatggtgaagtcactcgcgtcccctcctcaccgcctcgttctgttcctccagcaaagcagcgttgagtggtgctcgtcgatctggcttgacacgcttaaagagattgaccccactttcaggcgcaccataatagtcatctccaagtttgacaaccgtctcaaggaattcacagagaggtgggaggtcgataccttcttgagtgcaagtggctaccttggggataacatccacccgttcttcgtggctcttccaaaggaccatggtacaatttccaatgaggagttccgcaggcagatctgtcaggtcgatattgatgtgctacgtcacttgcgagaaaatgtgaaagggggtttcaatgaagagaaatatgtatcatgcattgggttcagctgcctcaagaagtacctcgaatctgaacttcagaagaggtacaaagaagcagctccagctaccctggcattgttagagcagaggtgcaccgaagtctcaatgaacctaacgagactagactccaaactacaagcagcgtcggatgtctctcagctccggagatcggcaatgcttcatgcagcttctatttgcaccaacttgaatgcattacttgatggagctgctgatccagctccagaaatatgggggaaaactacggaggaggaacaaatacatagtggtattggcagctggcctggcattaatatgcctgtaaaacctgccaactccagccttaagctgtatggtggtgcagcttttgagagagtaatgcatgaatttcgctgtgcaacgtattcattggaatgcccacaagtgtcaagggagaaggttgcgaacatactacttgctcatgctggaagacgcggaagcagtaggttgactgaggcagcagttgcgatagctcgtgcagccgcacgatcatggcttgctcctcttattgataccgcatgtgaccggcttgcatttgtcctacaaaatctgtttgatcttgctatggagcgcaaccgcaataatgactcacaatatcatcaaaattttgaagatatggatagttatgttggctttcttgctgctctccggtgctcatattataagttcgtcaaagaactgtccaagcaatgcaagcagatagtgcgtcatcaccttgattctgttacgagcccctactcccatatttgctacgacgacgacttttttagtggtgttggatctgtagcaaactccacgtgtaggtttaaccacttcactggagttacatcctttgacctagcagacagtggatcagcactagaggaagctcaggagaacttgcctccaaaagatcagcaccatatgacaccgcctattaataaagggaatgactcaaaggaggtcctcagagaaagccagctaacagtacctgagacaccttctcctgatctgccatctgatatacatggtggtaagaagaaagataatgggatcccaaatgacggtggcccaaggaaaagacatgccaggatggcagcatatacaagcagaaatcaccataacagtatgattggtgctgatgacatggcctcaaagtcagggtcatcatactccaccatatgcgcaatatctgctcaatattttgccaaaatgcgagaagtccttattgaaagaaatgccccctctgcattgaactctggattcttaacaccatggtgaaaggttatttctggcacttggctttgagctatttgctgtgagtgacaataagttcatgggcatgtttgtcctgcctggggcagttgatggtatccagaatgagcgccattctcttctcaaacggcagaagattttgctgtcctgtttgaacgagtttaagaacatatcccgggctctgtaatgatgatgtttctcgatttcttcaggcctttattgtgtatcctttagacccattctgttgtcatgtatctttcttggcataacctattttcttgaaatctgtaccactctctgtcaagttccttcgctgacaaggtctttatcactaacatttgttcagattcaatacttgatattattgattatgctcgatgactcgaatacaaaactattaacttgtgatctca

SEQ ID NO: 75164 - DNA, 6333 bp, Zea Mays
ctcgacgccatctcatctcgagtcgcctgtagcagatctctcctgcgccctgctgctctcgcctctcggtctctccttctgagaggcaaccacaatccccaatcacaaaccctagggaagccggtaggcaggcaccggcggccgacaagcgcaacgctgcgacggtgcaaccgcgttgccatcgcccagcgcgaggctgcgacaagcggacggaggcgaatgcgcgccaccgcctagcgtgcgaactctgcagcgcgccaacggaagtagagcaggcgggcagcatccagcgtcccggcctcccggggccgagctcgagcgccgcgcacacacgtccgactgacggtgtgtagtagcggtggctgggaatactcaatcacccaaatcctggtctggcactattccactcatagaatcagtatgtccgacgctgagccacctcctgcaatggaggtggccacgctgacaaccccggatgttatgctaggcgaggactacaaggatattgaggctattgagggtcagaaggattacgagacttgttatggtggaggtggcagtgttatagtggcaaatgagctcgtggggatttctgaagaccccaaccaacccgatattgctactgctgacgagccagaggagggtgctgatgtagaggggcaaactaatgacattagtgctgccgtgtcaacctccaagctggtggatgatcccatggaggttggcatgcaaacagaggttagtgctgctgcagatgatctcatagaggtcggtgctgctctggtatcatctgcagaggattgcacagcggtggctgcttgcctggttaatgatgactgcaatataattttccctggaggtgtgcataggtccgatgaccaaactgatcaggagtttggtggcaattcccttgacgctgatgaggtcgctctcttggtaaatgacatacaagatgacagtgcaaggatggatatggatgtttcagcccatggtgatgtgcatgctcaggatcgggaaagctcacagttggatgtggctacagctctgttaaatgaggtgggaacagagcttgtggaagctggtgaccatgctgtacaggaatgcacaaatatggatatgcggattcaagccggagataacaatgaggcagaacgtgttggcactattgctgacactgccacaaatgaggagcacagacacatgggtgaagttaccatgaccagagatgatagtgagaaacatgatgtggcaggtggtgttgatgtgcctgatgagaggatacaaatgggtaggggtggactgcctggagatgataatgagcaaaaggaagttgcaacagctgatgaagatcgtgtggaagatgaaggcatgcaggtagatgcagtaaacattactggagacatggttgaggaaggcagaattgctgttgaatacattgcaggtgaagctgtaattggcgagggtggtattgatgtccctgaagaaaaggctgctcagatagacagggcgggtaatgacattcccgaagaagagggtctccaaatgggggaagctggcttgattggcagtgataatgggctgaaagaggctgtgattgctgatcatgatggagtggaagtaaatgccataccgacggaggcaactggcacaactaacgatgatgatgaaaacaacacaattgttggtgaagatgttgcagaggctgtcaatgacataactggtgatgatgtccctgacgaagaggctgcacatatggaagatgatgacgacgacgaacctcctcctttagtggaaaagaaaggtggagggcgtcgtaagagaggccgtccatcttccaaggtccagggtgtggtcaagccatctgtaaagaggaaggatgaggaggaggtttgcttcatttgctttgatggtggtgatcttgtgatttgtgatcgtaggggttgccctaaagcctaccatccttcttgtgttaaccgggatgatgacttcttcaagtcaaagggtcggtggaactgtgggtggcacatttgtagcaactgtcagaaacctgcccgccatatgtgctacacatgcaccttttcattatgcaaggcatgcatgaaagatgcaaagtttagctgtgtcagagaaaataagggcttctgtgatacatgcatgaacactgtgatgttgatagagaatagagaggaggctgcggacccaatggaggtggattttgatgacaaaggcagctggtggtatttgttcaaggactattggttaaatttgaagacaaacttgtcgttgacagttgaggaaatatcagcagccaaatctcgaaagagtggagagttacctgatactaatgatgaagttaattcagagagttcatcagggcgcaatctagaaagcaatacatcaaaaaagaggggaaggaagcgatctaaacaagctgccatcaatgagggttctgaaggaaaagcgagcactaggaaatctgccaaacgagacctgtcaggcattcatgatgttcagacctcgtcagggaaaaaggttagaaaactatccaggcgttctttgagcagccagcattcatcaaaagactctgaaagtgttgggacatctacatcctcagctgaagaggacagctgggcttctaaggagctcattaactttgtagctcatgtgagaaatggcgataaatctgtgatcagccgatatgacgttcaaccccttttacttgactatatcaaacgcaacaaactgcgtgatcctcgtcggaaaagccagataatttgtgattctttgctccaaagtctcttcgcgaaagaacgtgttgggcattttgagatgcttaagcttcttgaatcacattttttcatgagtgaggtttcaccaattgatgctgatgaaaatcatggtggtgtagtagatcctgatcctagtcaggatgctgatggtaacagtgaagcttcagttgttatgagttcagaaaaaagaagaaaatcacgcaagtatgacctgaggcaccagcctaatcttgatgattatgcggcaatagataaccataacattggcttgatgtacttacgtcgcaacctaatggaagaattgattggcgatgttgacacatttgatgagaaagttgttggatcatttgtgaggataaaaatacctggtacagggcaaaggcaagacatttatagacttgtacaaattgttgggactggaagatctgcagaaaaatataaatatgggaaaaggactactgatataactctagagatactaaacttagacaagcgggaggcagtaactattgacataatctcaaaccaagagttcactgaggaggaatgcaaacgcttgcgtcaaagcataaagtatggattcattccaaggctgactgtgggagaggttcaggagaaggcaagggttctccaaactctgaaagtcaatgactggattgaaagcgaaaagatgcgacttgggcatcttcgtgaccgcgcaagtgatatgggctatagaaaagatcttagggaatgtgtagagaagcttagattgctaagcactcctgaggagcgtgctcgtaggctgaatgaagaacttgaaatacatgctgaccctgcgatggatccatattatgaatctccggaggaacaggagcaggaaattgaaaaaagtagcttcaacaagtccagaggttctttcttgaggaaagatggtaatcctgtgcctccaggtaaaggagatggtagaaatgctgcacagcgagattcaaaaactaattgggaatctaatcgaaatacatgggccgaatcgagttctcatatggaatcaccccttccacggaggtccacattttcttctcaaggtgaaagtgctggttatacaagtaaatcagagagcccaaacactggtgcacaaacagttaaactggaaggcaccacacgcagtgctccacaagggtcacctggtgcctcttctggaattttagctaataacatatgttcaggggcaaaaactgcacctcaatcagccattaacgagtctgagaagatctggctgtacatggatccttctaataaaatccaaggtcctttctcaatcatacagctgcggaaatggaacagcaatggctacttccctcctagtttgaaaatatggaaagctagtgagaagcaggacgattccattctattgactgatgctttggcagggaagtttgagaaagaccttcctccatgggaaccgccacatgttagtttgtttcaaattaacaaaacccctcttgagcaaagcacaatagctggtgaacaaactccaaaatcagtagttgcaaagtctttctcaagtagtaatcaaagacatggttatagttcaacaaaccttggaacaaccatgatccattctggcacacaaggttattatggaatgcaaaattcccatgcagcatacacaagccaacattctcttactggaagttggaatgccacgtcaagtcagtttggggttgcggtaaatcctgtgacacctactcagcctgccatggggagcttttcaggacaaaacatagtgtctgcagaaaatatgggtcatctaactcctggaacggctcctgcagctgcaaatgcagaaatggttaattcagatttgacctcccagaagcaaatatcgtatttaccgcaaacagacggcatattagctgatgacattgaatccaaatcaggagaagatgtttcacatggaaaagtgagctcttcagccaaagcaattggaccactgggtgcacagcttggacaaggacaactgaacactcagcaacatgaagatgatgtcaacaccatccgctgcatcagtacaaccttcattgtcaaccattgctggcagtgataatcaaagcagtgggtgggctgtacctacacaagtggtgaacacatctggccagtctcagataactggaaatctgacctggggaaatacacctcagggtgatgcaagcttaggttggggaatgatgggacagaacaatatgaatatgccttgggtagcatcagctcaaggtgcttcgggctacaacatgggtgcagccatgccaacccagccaaatgcagttccaaacatgggttggttaccaaatccaggaaacaccaacatgaacatgatctgggccgcaactcaaggccaggggattccaaatgcagctgctatgatgggaggtcagatgcaaggagtcgcagtggccccttggggtggtgttgcagcaggaaatgcaaattcttatcctgcctggggaaaccaacaagttggaaacatgaaccaaaacgttcgatggagtgctcctgtgcagggaaacccgagtcaggaaaataacaacatgaactggaatgcaccaaatggtaatcctaataattggaataatcagcagagagagaatgagggcaggcactctggacaccgtggtgcttttagtgctggcgactcaggcagaaagtcatggaagccacgctctggtgccgatggggggtcatgggggacatagaggagtctgctatacatttcttgaacgcggggactgctttaaagttgactgcaaattcgcccattcaacaaacacagagggatatccatccatccaggattcgggcaacgagatgcgatatgagaatcacaatgagagaaatgatcgacagtttgataggcagccttcggataatgaaaggcatcatgttaggcctgatgacaggcatggtggcagggatgacgataggcaggctgataggtctcagtcaagagagccgcgttagaactgatttctgtttcgtaccttccctttgttgtatgtgcagtagcaaactagcataatagcttccgtgcatgttttgaactttatgccctgtagcaagctgcaaacatgtgcaaatcgtgtacagcagttgtagtttaatgctgtgtgcgtcctagccccatatttaataatttacttgaataaatcgtagttgtctgatatctgatgtatagcaggggctacacacccaggtcctttatggtgatgactattgagtgttttcttataagcctcatgattgtaagtgaaggtgtttttggaaatcctatgacctaatgtccgatctgtgttcttcgttgtgcaatgatgccattgagcctccgtgatcaaatagtacttcattttgtttgactgttgtgggtggctgggtgctgtgtatgtgtatccacccagctggtttacctgttaagcatgtgcatcatctttcggctgatgtgtttaaaaaaaaaacaccttccacactccctcgtgctcagctgtattttaacttatttttgtaaaaaaaa

SEQ ID NO: 75165 - DNA, 6389 bp, Zea Mays
ctcgacgccatctcatctcgagtcgcctgtagcagatctctcctgcgccctgctgctctcgcctctcggtctctccttctgagaggcaaccacaatccccaatcacaaaccctagggaagccggtaggcaggcaccggcggccgacaagcgcaacgctgcgacggtgcaaccgcgttgccatcgcccagcgcgaggctgcgacaagcggacggaggcgaatgcgcgccaccgcctagcgtgcgaactctgcagcgcgccaacggaagtagagcaggcgggcagcatccagcgtcccggcctcccggggccgagctcgagcgccgcgcacacacgtccgactgacggtgtgtagtagcggtggctgggaatactcaatcacccaaatcctggtctggcactattccactcatagaatcagtatgtccgacgctgagccacctcctgcaatggaggtggccacgctgacaaccccggatgttatgctaggcgaggactacaaggatattgaggctattgagggtcagaaggattacgagacttgttatggtggaggtggcagtgttatagtggcaaatgagctcgtggggatttctgaagaccccaaccaacccgatattgctactgctgacgagccagaggagggtgctgatgtagaggggcaaactaatgacattagtgctgccgtgtcaacctccaagctggtggatgatcccatggaggttggcatgcaaacagaggttagtgctgctgcagatgatctcatagaggtcggtgctgctctggtatcatctgcagaggattgcacagcggtggctgcttgcctggttaatgatgactgcaatataattttccctggaggtgtgcataggtccgatgaccaaactgatcaggagtttggtggcaattcccttgacgctgatgaggtcgctctcttggtaaatgacatacaagatgacagtgcaaggatggatatggatgtttcagcccatggtgatgtgcatgctcaggatcgggaaagctcacagttggatgtggctacagctctgttaaatgaggtgggaacagagcttgtggaagctggtgaccatgctgtacaggaatgcacaaatatggatatgcggattcaagccggagataacaatgaggcagaacgtgttggcactattgctgacactgccacaaatgaggagcacagacacatgggtgaagttaccatgaccagagatgatagtgagaaacatgatgtggcaggtggtgttgatgtgcctgatgagaggatacaaatgggtaggggtggactgcctggagatgataatgagcaaaaggaagttgcaacagctgatgaagatcgtgtggaagatgaaggcatgcaggtagatgcagtaaacattactggagacatggttgaggaaggcagaattgctgttgaatacattgcaggtgaagctgtaattggcgagggtggtattgatgtccctgaagaaaaggctgctcagatagacagggcgggtaatgacattcccgaagaagagggtctccaaatgggggaagctggcttgattggcagtgataatgggctgaaagaggctgtgattgctgatcatgatggagtggaagtaaatgccataccgacggaggcaactggcacaactaacgatgatgatgaaaacaacacaattgttggtgaagatgttgcagaggctgtcaatgacataactggtgatgatgtccctgacgaagaggctgcacatatggaagatgatgacgacgacgaacctcctcctttagtggaaaagaaaggtggagggcgtcgtaagagaggccgtccatcttccaaggtccagggtgtggtcaagccatctgtaaagaggaaggatgaggaggaggtttgcttcatttgctttgatggtggtgatcttgtgatttgtgatcgtaggggttgccctaaagcctaccatccttcttgtgttaaccgggatgatgacttcttcaagtcaaagggtcggtggaactgtgggtggcacatttgtagcaactgtcagaaacctgcccgccatatgtgctacacatgcaccttttcattatgcaaggcatgcatgaaagatgcaaagtttagctgtgtcagagaaaataagggcttctgtgatacatgcatgaacactgtgatgttgatagagaatagagaggaggctgcggacccaatggaggtggattttgatgacaaaggcagctggtggtatttgttcaaggactattggttaaatttgaagacaaacttgtcgttgacagttgaggaaatatcagcagccaaatctcgaaagagtggagagttacctgatactaatgatgaagttaattcagagagttcatcagggcgcaatctagaaagcaatacatcaaaaaagaggggaaggaagcgatctaaacaagctgccatcaatgagggttctgaaggaaaagcgagcactaggaaatctgccaaacgagacctgtcaggcattcatgatgttcagacctcgtcagggaaaaaggttagaaaactatccaggcgttctttgagcagccagcattcatcaaaagactctgaaagtgttgggacatctacatcctcagctgaagaggacagctgggcttctaaggagctcattaactttgtagctcatgtgagaaatggcgataaatctgtgatcagccgatatgacgttcaaccccttttacttgactatatcaaacgcaacaaactgcgtgatcctcgtcggaaaagccagataatttgtgattctttgctccaaagtctcttcgcgaaagaacgtgttgggcattttgagatgcttaagcttcttgaatcacattttttcatgagtgaggtttcaccaattgatgctgatgaaaatcatggtggtgtagtagatcctgatcctagtcaggatgctgatggtaacagtgaagcttcagttgttatgagttcagaaaaaagaagaaaatcacgcaagtatgacctgaggcaccagcctaatcttgatgattatgcggcaatagataaccataacattggcttgatgtacttacgtcgcaacctaatggaagaattgattggcgatgttgacacatttgatgagaaagttgttggatcatttgtgaggataaaaatacctggtacagggcaaaggcaagacatttatagacttgtacaaattgttgggactggaagatctgcagaaaaatataaatatgggaaaaggactactgatataactctagagatactaaacttagacaagcgggaggcagtaactattgacataatctcaaaccaagagttcactgaggaggaatgcaaacgcttgcgtcaaagcataaagtatggattcattccaaggctgactgtgggagaggttcaggagaaggcaagggttctccaaactctgaaagtcaatgactggattgaaagcgaaaagatgcgacttgggcatcttcgtgaccgcgcaagtgatatgggctatagaaaagatcttagggaatgtgtagagaagcttagattgctaagcactcctgaggagcgtgctcgtaggctgaatgaagaacttgaaatacatgctgaccctgcgatggatccatattatgaatctccggaggaacaggagcaggaaattgaaaaaagtagcttcaacaagtccagaggttctttcttgaggaaagatggtaatcctgtgcctccaggtaaaggagatggtagaaatgctgcacagcgagattcaaaaactaattgggaatctaatcgaaatacatgggccgaatcgagttctcatatggaatcaccccttccacggaggtccacattttcttctcaaggtgaaagtgctggttatacaagtaaatcagagagcccaaacactggtgcacaaacagttaaactggaaggcaccacacgcagtgctccacaagggtcacctggtgcctcttctggaattttagctaataacatatgttcaggggcaaaaactgcacctcaatcagccattaacgagtctgagaagatctggctgtacatggatccttctaataaaatccaaggtcctttctcaatcatacagctgcggaaatggaacagcaatggctacttccctcctagtttgaaaatatggaaagctagtgagaagcaggacgattccattctattgactgatgctttggcagggaagtttgagaaagaccttcctccatgggaaccgccacatgttagtttgtttcaaattaacaaaacccctcttgagcaaagcacaatagctggtgaacaaactccaaaatcagtagttgcaaagtctttctcaagtagtaatcaaagacatggttatagttcaacaaaccttggaacaaccatgatccattctggcacacaaggttattatggaatgcaaaattcccatgcagcatacacaagccaacattctcttactggaagttggaatgccacgtcaagtcagtttggggttgcggtaaatcctgtgacacctactcagcctgccatggggagcttttcaggacaaaacatagtgtctgcagaaaatatgggtcatctaactcctggaacggctcctgcagctgcaaatgcagaaatggttaattcagatttgacctcccagaagcaaatatcgtatttaccgcaaacagacggcatattagctgatgacattgaatccaaatcaggagaagatgtttcacatggaaaagtgagctcttcagccaaagcaattggaccactgggtgcacagcttggacaaggacaactgaacactcagcaacatgaagacataaaaaaccagatgtcatcaactgatgtctccaactcgacgatgccatcgcagatgatgtcaacaccatccgctgcatcagtacaaccttcattgtcaaccattgctggcagtgataatcaaagcagtgggtgggctgtacctacacaagtggtgaacacatctggccagtctcagataactggaaatctgacctggggaaatacacctcagggtgatgcaagcttaggttggggaatgatgggacagaacaatatgaatatgccttgggtagcatcagctcaaggtgcttcgggctacaacatgggtgcagccatgccaacccagccaaatgcagttccaaacatgggttggttaccaaatccaggaaacaccaacatgaacatgatctgggccgcaactcaaggccaggggattccaaatgcagctgctatgatgggaggtcagatgcaaggagtcgcagtggccccttggggtggtgttgcagcaggaaatgcaaattcttatcctgcctggggaaaccaacaagttggaaacatgaaccaaaacgttcgatggagtgctcctgtgcagggaaacccgagtcaggaaaataacaacatgaactggaatgcaccaaatggtaatcctaataattggaataatcagcagagagagaatgagggcaggcactctggacaccgtggtgcttttagtgctggcgactcaggcagaaagtcatggaagccacgctctggtgccgatggggggtcatgggggacatagaggagtctgctatacatttcttgaacgcggggactgctttaaagttgactgcaaattcgcccattcaacaaacacagagggatatccatccatccaggattcgggcaacgagatgcgatatgagaatcacaatgagagaaatgatcgacagtttgataggcagccttcggataatgaaaggcatcatgttaggcctgatgacaggcatggtggcagggatgacgataggcaggctgataggtctcagtcaagagagccgcgttagaactgatttctgtttcgtaccttccctttgttgtatgtgcagtagcaaactagcataatagcttccgtgcatgttttgaactttatgccctgtagcaagctgcaaacatgtgcaaatcgtgtacagcagttgtagtttaatgctgtgtgcgtcctagccccatatttaataatttacttgaataaatcgtagttgtctgatatctgatgtatagcaggggctacacacccaggtcctttatggtgatgactattgagtgttttcttataagcctcatgattgtaagtgaaggtgtttttggaaatcctatgacctaatgtccgatctgtgttcttcgttgtgcaatgatgccattgagcctccgtgatcaaatagtacttcattttgtttgactgttgtgggtggctgggtgctgtgtatgtgtatccacccagctggtttacctgttaagcatgtgcatcatctttcggctgatgtgtttaaaaaaaaaacaccttccacactccctcgtgctcagctgtattttaacttatttttgtaaaaaaaa

SEQ ID NO: 75166 - DNA, 1658 bp, Zea Mays
tctccgcgctccagctccacgccaattaaaccctactctactgcttctttctctctcttctctctctgcgtcatctcatttccgtttccgtctctccctctcctcgcccacacgtccaaaaccgaagggagcaaacgaacaaaacccggccgagtaacgcaggagacgaagctgcggaaggcgagcaagcacgatggaggcggcagcgtcagccgagtacgggtactacggcggaggcgcgggcccacacgagacgaagaccgccgggtgcggggaccacttcgtcgtggacgacctcctcgcgctgccgccgtacgacgacgaggaggagggggcgacaggcgagaccccgctgtgcctgcagcctgtcaaggaggaggagggcggcctcgggaatttctcggccgactcgtccatcgtcgtcacagcaatcgacagctgcagcaactccttctctaggctagccgacgacgacttcccgggggaattctacgagccgtacgaccaactggtggagctagaatggctatcaaactacatgggcgagggcgaggaaactttcgcggcggaggacctggagaagctgaagctcatttccggtgggttctccccggcggctgtgaacgtgtcagcaccagctccagtgggcgtagcttcagccgcctctgcgacacagtccgcgtccatggccatttcgccctcggagtccggcatctcggcgcagcaggcgttccgcgccaagaagccgccgccgtcgaagaagaaagacgcggcggcaccggcaccggcaccggcagaagggcgacggtgcgtgcactgcgacacggacaagacgccgcagtggaggacggggcccatgggccccaagacgctgtgcaacgcgtgcggggtgcggtacaagtcggggcggctggtgccggagtacaggcccgcggcgagccccaccttcgtgatgtccaagcactccaactcccaccgaaaggtgctggagctgcgccgccagaaggaggtggtagtgcagcagccgccgcacgtgatgggcggcgccggcggtcctgcaggcgggctgatgcgcatgcagagcgcgatgctgttggacgggccggtggcggcggtgtcgtcgtcgtcccccatcgtcggcggcgacgagtttttgatccaccagcacttagggacggcagactaccggcagcgcatctaactagatgagtttttgatcagttagcctactagcccagtaataatcaatatgcgcaccagcttaaatccaagtaccctccttaaaaacatgaaagaactaataatcttgccttaattaattaattaggagttatttttcctcttcactatattttgtttattaattagttgctgtgttccggttcagatccttggaaattttttcgtggcgactttcgtatggttttgtatctctctttttttttattttttgctagactctcctaattaacatgcctatgagaactctacgagagagagagagagagagttttcctatctattttcttcctttgtttcttagcattatatatgtaatttaaggggctagctctcgttctgcttccggtccggagcacgcatgaaaagaagactggaaattttggtaatttaatttttttgttcaccttagcttgttt

SEQ ID NO: 75167 - DNA, 1144 bp, Zea Mays
gggagatatttttctccgtcgtcttgctccctcgatctacgtctatttactagtggtgcagataaactgaggcaaatatagttgtgcatctacaagtagagtacaaggcacaatggcctcccaagcctgggttgcagaaagagctataccattgttgaagaagaagccaaacatgggagccattgaacttcagtcagctttggaggaaaagtatggtttgaaaatcaactactagacagtatggtatgggagacaaagggcagcaaacaaattatttggtagttggaatgattcttttgattggttgtataggttcaaagcagaggtagagctaaggtcacccgggtgtatagtagagattgatacagtcatagtagataataagttacattccagcaggtttttctgtgcattccaaggtagcattgaaggatttttaaatggttgtaggccttacattagtgtagagtccacagctctgaatggcctttggaatggtcacatgccagctgccttaggcttagatggacacaattggatgtttccattggcctttgggttcttgactctgagactagggacaattgggtttggtttatggaccagcttggaaaggccataggatttgtgccacatttggcagtatgcacagatgcctgtaagggtctagaagcagcagtccagcaggtatttccttgggctgaacaaagagaatgttccaggcacttgatagagaatatgaagaaagggtttactggagatgtatatggagctaacatgtggccagcagatagagcatactcagataggatgtacaagtatttcatggacaaagtgattgcagccagccctagtgtacaaacttggttagatgaacactacagtctcttctgggcaaggtccaagttcaatacataggtgaagtgtgagtacatcaacaataatctagctgagtgttggaatgcatggattaaacagctgaaggatctaccattgcattgcatggttgatgccattagagagaagggggtgtgttatttgagaagaggaggagcatagcaagggcactagatggggtgatcttgccagctgttgtgcaacagttgaatgctgcctccaaaggactgaaccatttgaaagtgac

SEQ ID NO: 75168 - DNA, 2457 bp, Zea Mays
atttttccttttttttctctcgaatcgttaggtggtggcctggtgggtttggatcgattttggttttacggcttcacccgctgccgtggccggagatctcacatcactacaccagccaattttatcaagctcgctcgccgtcacactgcgccaccagcggcgatcccgccatggcctcctggctcaaggtcgccgaagacttgctcgaagtcgtcgaccggagggccaagatcgtggcaacagaactgtcggatgagcagtctacctctcagccttcaggaccaaacaaccaagaagtgcaagcaaagaagggaaagccgagggagaagggtccattgaagctcactaatgccgatggtggcaacaagatatctgctcagaaggaaaagaggagtaggcaacggccgcgagagcggatgaagatcgagaagatcaggccttcgccacctgcaggttcatcaagtgttgataccagtgctagtgaaccagaagtcactccgatcgatgttaaggaagtgggtaatgagggtacattggagaaaggagagaaagagattgctgttgaaagctatttttcagttatggatgcaaaaagtgagtcgagcagcagtaaccagacttccgagattggttcagtgattaatttggaggagagagactctactgtggctgttatccaggacacaaatgcgtctgaattgccaaatacagaggttactggcaaactgcaggaatcaaagaaagcgagtgtttcagattcatcagaaagcatagaagatcgacgcaaacaaaaatctgatacaatttctgtgaaagaacaagaccaacttgaggaggctcagggattgttaaaaagtgctgtcaagactggccagtcaaaagaagctaggttagctcgggtttgtgctggactttcatcccgcctccaagagtataagtctgaaaatgcacagctggaggaacttcttgttcaagagagagagaaatctacattgcatgaagctcatataaagcaactacagcaagagttatcaatgtccagagtagaaggttcaagagctgaattgaatatggttgatgctttgactgcaaaaaatgcagagattgaatctcttgttaaatcattggactcttggaagaaaagagcagcaacttcagaagaaaagcttgcttctttagaggaagatatagatggtctcaagaggaactgtgaacttactgaaaccagagttatacaggctttacgggaggaacttgctaccacagagcgtagggctgaagaagagcgcattgctcataatgccacaaaaatggcagctgttgagagagaagtagaactagaacatcgggctgttgaggcatcgagcgctttagctagaatccagagagctgctgatcaaagctcatcaagagtgctggaattggagcacaagttggctgttcttgaggttgaatgtgcttcattgcaacaagaactacaggagatggaagctcgtaatcgccgcgtacagaaaaaaccttccgaagaagctaatcaagttcttcagatgcaggcttggcaggaagaagttgagcgtgcacgccaaagccaacgagaggcagaggcaaagatatcatccttggaggcagagttgcagaaaatgagagttgaaatggctggaatgagaagagatgcagagcattattctagacaggagcatgttgaacttgagaagagataccgtgagctaactgacttactgtaccacaagcaaacacaattggaatccatggccagcgaaaaggctgcgttagagttccaactggagaaatcattgaaacaatttcatgaagtgcagattgaggcagaaaggagtaaagctactcgcagatcagcatcgtcgtgggaagaagatgctgatatcaaggcattagagcctcttcctctacatcatcgacacatggcaacagcaaatcagcagttacaaaaggctgcgaagcttttagacacaggagctgtgcgcgcaacaagatttttgtggcgacatcccgttgcacgagtcagcctgctgttctatttggtgttcgtgcatttgttcttgatgcacttgttaaaccgccttcaggacttcgcgtccagagaaggaacatcagccatgggggatctggccagcgcgaacctgccatagcccatagtctctgtgcccttcttgttgattcaggcattccccactgattcttggtccacatgccttcaaagtttcatttcatcctcctgtttctttttttttccgtcttccccatcttttgtaaagtagtagtgttcgttgtttggccatgcgctgtataatccattcttttacattgactgatgagtcagattgagtatgtaccaagtaccttgacatgatataccaagccaattgagccagttcttgtaccctcgagtctcttcaagcaaactgtcgggcatttgaa

SEQ ID NO: 75169 - DNA, 2672 bp, Zea Mays
atttttccttttttttctctcgaatcgttaggtggtggcctggtgggtttggatcgattttggttttacggcttcacccgctgccgtggccggagatctcacatcactacaccagccaattttatcaagctcgctcgccgtcacactgcgccaccagcggcgatcccgccatggcctcctggctcaaggtcgccgaagacttgctcgaagtcgtcgaccggagggccaagatcgtggcaacagaactgtcggatgagcagtctacctctcagccttcaggaccaaacaaccaagaagtgcaagcaaagaagggaaagccgagggagaagggtccattgaagctcactaatgccgatggtggcaacaagatatctgctcagaaggaaaagaggagtaggcaacggccgcgagagcggatgaagatcgagaagatcaggccttcgccacctgcaggttcatcaagtgttgataccagtgctagtgaaccagaagtcactccgatcgatgttaaggaagtgggtaatgagggtacattggagaaaggagagaaaggtactgatggccttaagactgatgggtctgggattgttaataccatggttgaagttcaactgatgcagaaaaactctgacaatgccactctggatggtgttacacataccaattcagagattgctgttgaaagctatttttcagttatggatgcaaaaagtgagtcgagcagcagtaaccagacttccgagattggttcagtgattaatttggaggagagagactctactgtggctgttatccaggacacaaatgcgtctgaattgccaaatacagaggttactggcaaactgcaggaatcaaagaaagcgagtgtttcagattcatcagaaagcatagaagatcgacgcaaacaaaaatctgatacaatttctgtgaaagaacaagaccaacttgaggaggctcagggattgttaaaaagtgctgtcaagactggccagtcaaaagaagctaggttagctcgggtttgtgctggactttcatcccgcctccaagagtataagtctgaaaatgcacagctggaggaacttcttgttcaagagagagagaaatctacattgcatgaagctcatataaagcaactacagcaagagttatcaatgtccagagtagaaggttcaagagctgaattgaatatggttgatgctttgactgcaaaaaatgcagagattgaatctcttgttaaatcattggactcttggaagaaaagagcagcaacttcagaagaaaagcttgcttctttagaggaagatatagatggtctcaagaggaactgtgaacttactgaaaccagagttatacaggctttacgggaggaacttgctaccacagagcgtagggctgaagaagagcgcattgctcataatgccacaaaaatggcagctgttgagagagaagtagaactagaacatcgggctgttgaggcatcgagcgctttagctagaatccagagagctgctgatcaaagctcatcaagagtgctggaattggagcacaagttggctgttcttgaggttgaatgtgcttcattgcaacaagaactacaggagatggaagctcgtaatcgccgcgtacagaaaaaaccttccgaagaagctaatcaagttcttcagatgcaggcttggcaggaagaagttgagcgtgcacgccaaagccaacgagaggcagaggcaaagatatcatccttggagagttgcagaaaatgagagttgaaatggctggaatgagaagagatgcagagcattattctagacaggagcatgttgaacttgagaagagataccgtgagctaactgacttactgtaccacaagcaaacacaattggaatccatggccagcgaaaaggctgcgttagagttccaactggagaaatcattgaaacaatttcatgaagtgcagattgaggcagaaaggagtaaagctactcgcagatcagcatcgtcgtgggaagaagatgctgatatcaaggcattagagcctcttcctctacatcatcgacacatggcaacagcaaatcagcagttacaaaaggctgcgaagcttttagacacaggagctgtgcgcgcaacaagatttttgtggcgacatcccgttgcacgagtcagcctgctgttctatttggcacggaccacataacttgagcttcctctatgtttgcacttctctttttttaacccaaattaagacttctttctgactataaatctgctttcgccacaccaggtgttcgtgcatttgttcttgatgcacttgttaaaccgccttcaggacttcgcgtccagagaaggaacatcagccatgggggatctggccagcgcgaacctgccatagcccatagtctctgtgcccttcttgttgattcaggcattccccactgattcttggtccacatgccttcaaagtttcatttcatcctcctgtttctttttttttccgtcttccccatcttttgtaaagtagtagtgttcgttgtttggccatgcgctgtataatccattcttttacattgactgatgagtcagattgagtatgtaccaagtaccttgacatgatataccaagccaattgagccagttcttgtaccctcgagtctcttcaagcaaactgtcgggcatttgaa

SEQ ID NO: 75170 - DNA, 2389 bp, Zea Mays
tcgattttggttttacggcttcacccgctgccgtggccggagatctcacatcactacaccagccaattttatcaagctcgctcgccgtcacactgcgccaccagcggcgatcccgccatggcctcctggctcaaggtcgccgaagacttgctcgaagtcgtcgaccggagggccaagatcgtggcaacagaactgtcggatgagcagtctacctctcagccttcaggaccaaacaaccaagaagtgcaagcaaagaagggaaagccgagggagaagggtccattgaagctcactaatgccgatggtggcaacaagatatctgctcagaaggaaaagaggagtaggcaacggccgcgagagcggatgaagatcgagaagatcaggccttcgccacctgcaggttcatcaagtgttgataccagtgctagtgaaccagaagtcactccgatcgatgttaaggaagtgggtaatgagggtacattggagaaaggagagaaaggtactgatggccttaagactgatgggtctgggattgttaataccatggttgaagttcaactgatgcagaaaaactctgacaatgccactctggatggtgttacacataccaattcagagattgctgttgaaagctatttttcagttatggatgcaaaaagtgagtcgagcagcagtaaccagacttccgagattggttcagtgattaatttggaggagagagactctactgtggctgttatccaggacacaaatgcgtctgaattgccaaatacagaggttactggcaaactgcaggaatcaaagaaagcgagtgtttcagattcatcagaaagcatagaagatcgacgcaaacaaaaatctgatacaatttctgtgaaagaacaagaccaacttgaggaggctcagggattgttaaaaagtgctgtcaagactggccagtcaaaagaagctaggttagctcgggtttgtgctggactttcatcccgcctccaagagtataagtctgaaaatgcacagctggaggaacttcttgttcaagagagagagaaatctacattgcatgaagctcatataaagcaactacagcaagagttatcaatgtccagagtagaaggttcaagagctgaattgaatatggttgatgctttgactgcaaaaaatgcagagattgaatctcttgttaaatcattggactcttggaagaaaagagcagcaacttcagaagaaaagcttgcttctttagaggaagatatagatggtctcaagaggaactgtgaacttactgaaaccagagttatacaggctttacgggaggaacttgctaccacagagcgtagggctgaagaagagcgcattgctcataatgccacaaaaatggcagctgttgagagagaagtagaactagaacatcgggctgttgaggcatcgagcgctttagctagaatccaggtaattttacaagagagctgctgatcaaagctcatcaagagtgctggaattggagcacaagttggctgttcttgaggttgaatgtgcttcattgcaacaagaactacaggagatggaagctcgtaatcgccgcgtacagaaaaaaccttccgaagaagctaatcaagttcttcagatgcaggcttggcaggaagaagttgagcgtgcacgccaaagccaacgagaggcagaggcaaagatatcatccttggaggcagagttgcagaaaatgagagttgaaatggctggaatgagaagagatgcagagcattattctagacaggagcatgttgaacttgagaagagataccgtgagctaactgacttactgtaccacaagcaaacacaattggaatccatggccagcgaaaaggctgcgttagagttccaactggagaaatcattgaaacaatttcatgaagtgcagattgaggcagaaaggagtaaagctactcgcagatcagcatcgtcgtgggaagaagatgctgatatcaaggcattagagtgttcgtgcatttgttcttgatgcacttgttaaaccgccttcaggacttcgcgtccagagaaggaacatcagccatgggggatctggccagcgcgaacctgccatagcccatagtctctgtgcccttcttgttgattcaggcattccccactgattcttggtccacatgccttcaaagtttcatttcatcctcctgtttctttttttttccgtcttccccatcttttgtaaagtagtagtgttcgttgtttggccatgcgctgtataatccattcttttacattgactgatgagtcagattgagtatgtaccaagtaccttgacatgatataccaagccaattgagccagttcttgtaccctcgagtctcttcaagcaaactgtcgggcatttgaa

SEQ ID NO: 75171 - DNA, 2597 bp, Zea Mays
cttcacccgctgccgtggccggagatctcacatcactacaccagccaattttatcaagctcgctcgccgtcacactgcgccaccagcggcgatcccgccatggcctcctggctcaaggtcgccgaagacttgctcgaagtcgtcgaccggagggccaagatcgtggcaacagaactgtcggatgagcagtctacctctcagccttcaggaccaaacaaccaagaagtgcaagcaaagaagggaaagccgagggagaagggtccattgaagctcactaatgccgatggtggcaacaagatatctgctcagaaggaaaagaggagtaggcaacggccgcgagagcggatgaagatcgagaagatcaggccttcgccacctgcaggttcatcaagtgttgataccagtgctagtgaaccagaagtcactccgatcgatgttaaggaagtgggtaatgagggtacattggagaaaggagagaaaggtactgatggccttaagactgatgggtctgggattgttaataccatggttgaagttcaactgatgcagaaaaactctgacaatgccactctggatggtgttacacataccaattcagagattgctgttgaaagctatttttcagttatggatgcaaaaagtgagtcgagcagcagtaaccagacttccgagattggttcagtgattaatttggaggagagagactctactgtggctgttatccaggacacaaatgcgtctgaattgccaaatacagaggttactggcaaactgcaggaatcaaagaaagcgagtgtttcagattcatcagaaagcatagaagatcgacgcaaacaaaaatctgatacaatttctgtgaaagaacaagaccaacttgaggaggctcagggattgttaaaaagtgctgtcaagactggccagtcaaaagaagctaggttagctcgggtttgtgctggactttcatcccgcctccaagagtataagtctgaaaatgcacagctggaggaacttcttgttcaagagagagagaaatctacattgcatgaagctcatataaagcaactacagcaagagttatcaatgtccagagtagaaggttcaagagctgaattgaatatggttgatgctttgactgcaaaaaatgcagagattgaatctcttgttaaatcattggactcttggaagaaaagagcagcaacttcagaagaaaagcttgcttctttagaggtcgattttcccaactgcagaaagattgggagtcgagatagggagttgttggagagcgatttttttcagtcttggcaaaaaatcaagattgagagaagatatagatggtctcaagaggaactgtgaacttactgaaaccagagttatacaggctttacgggaggaacttgctaccacagagcgtagggctgaagaagagcgcattgctcataatgccacaaaaatggcagctgttgagagagaagtagaactagaacatcgggctgttgaggcatcgagcgctttagctagaatccagagagctgctgatcaaagctcatcaagagtgctggaattggagcacaagttggctgttcttgaggttgaatgtgcttcattgcaacaagaactacaggagatggaagctcgtaatcgccgcgtacagaaaaaaccttccgaagaagctaatcaagttcttcagatgcaggcttggcaggaagaagttgagcgtgcacgccaaagccaacgagaggcagaggcaaagatatcatccttggaggcagagttgcagaaaatgagagttgaaatggctggaatgagaagagatgcagagcattattctagacaggagcatgttgaacttgagaagagataccgtgagctaactgacttactgtaccacaagcaaacacaattggaatccatggccagcgaaaaggctgcgttagagttccaactggagaaatcattgaaacaatttcatgaagtgcagattgaggcagaaaggagtaaagctactcgcagatcagcatcgtcgtgggaagaagatgctgatatcaaggcattagagcctcttcctctacatcatcgacacatggcaacagcaaatcagcagttacaaaaggctgcgaagcttttagacacaggagctgtgcgcgcaacaagatttttgtggcgacatcccgttgcacgagtcagcctgctgttctatttggtgttcgtgcatttgttcttgatgcacttgttaaaccgccttcaggacttcgcgtccagagaaggaacatcagccatgggggatctggccagcgcgaacctgccatagcccatagtctctgtgcccttcttgttgattcaggcattccccactgattcttggtccacatgccttcaaagtttcatttcatcctcctgtttctttttttttccgtcttccccatcttttgtaaagtagtagtgttcgttgtttggccatgcgctgtataatccattcttttacattgactgatgagtcagattgagtatgtaccaagtaccttgacatgatataccaagccaattgagccagttcttgtaccctcgagtctcttcaagcaaactgtcgggcatttgaa

SEQ ID NO: 75172 - DNA, 2504 bp, Zea Mays
ccgtggccggagatctcacatcactacaccagccaattttatcaagctcgctcgccgtcacactgcgccaccagcggcgatcccgccatggcctcctggctcaaggtcgccgaagacttgctcgaagtcgtcgaccggagggccaagatcgtggcaacagaactgtcggatgagcagtctacctctcagccttcaggaccaaacaaccaagaagtgcaagcaaagaagggaaagccgagggagaagggtccattgaagctcactaatgccgatggtggcaacaagatatctgctcagaaggaaaagaggagtaggcaacggccgcgagagcggatgaagatcgagaagatcaggccttcgccacctgcaggttcatcaagtgttgataccagtgctagtgaaccagaagtcactccgatcgatgttaaggaagtgggtaatgagggtacattggagaaaggagagaaaggtactgatggccttaagactgatgggtctgggattgttaataccatggttgaagttcaactgatgcagaaaaactctgacaatgccactctggatggtgttacacataccaattcagagattgctgttgaaagctatttttcagttatggatgcaaaaagtgagtcgagcagcagtaaccagacttccgagattggttcagtgattaatttggaggagagagactctactgtggctgttatccaggacacaaatgcgtctgaattgccaaatacagaggttactggcaaactgcaggaatcaaagaaagcgagtgtttcagattcatcagaaagcatagaagatcgacgcaaacaaaaatctgatacaatttctgtgaaagaacaagaccaacttgaggaggctcagggattgttaaaaagtgctgtcaagactggccagtcaaaagaagctaggttagctcgggtttgtgctggactttcatcccgcctccaagagtataagtctgaaaatgcacagctggaggaacttcttgttcaagagagagagaaatctacattgcatgaagctcatataaagcaactacagcaagagttatcaatgtccagagtagaaggttcaagagctgaattgaatatggttgatgctttgactgcaaaaaatgcagagattgaatctcttgttaaatcattggactcttggaagaaaagagcagcaacttcagaagaaaagcttgcttctttagaggaagatatagatggtctcaagaggaactgtgaacttactgaaaccagagttatacaggctttacgggaggaacttgctaccacagagcgtagggctgaagaagagcgcattgctcataatgccacaaaaatggcagctgttgagagagaagtagaactagaacatcgggctgttgaggcatcgagcgctttagctagaatccaggtaattttacaagagagctgctgatcaaagctcatcaagagtgctggaattggagcacaagttggctgttcttgaggttgaatgtgcttcattgcaacaagaactacaggagatggaagctcgtaatcgccgcgtacagaaaaaaccttccgaagaagctaatcaagttcttcagatgcaggcttggcaggaagaagttgagcgtgcacgccaaagccaacgagaggcagaggcaaagatatcatccttggaggcagagttgcagaaaatgagagttgaaatggctggaatgagaagagatgcagagcattattctagacaggagcatgttgaacttgagaagagataccgtgagctaactgacttactgtaccacaagcaaacacaattggaatccatggccagcgaaaaggctgcgttagagttccaactggagaaatcattgaaacaatttcatgaagtgcagattgaggcagaaaggagtaaagctactcgcagatcagcatcgtcgtgggaagaagatgctgatatcaaggcattagagcctcttcctctacatcatcgacacatggcaacagcaaatcagcagttacaaaaggctgcgaagcttttagacacaggagctgtgcgcgcaacaagatttttgtggcgacatcccgttgcacgagtcagcctgctgttctatttggtgttcgtgcatttgttcttgatgcacttgttaaaccgccttcaggacttcgcgtccagagaaggaacatcagccatgggggatctggccagcgcgaacctgccatagcccatagtctctgtgcccttcttgttgattcaggcattccccactgattcttggtccacatgccttcaaagtttcatttcatcctcctgtttctttttttttccgtcttccccatcttttgtaaagtagtagtgttcgttgtttggccatgcgctgtataatccattcttttacattgactgatgagtcagattgagtatgtaccaagtaccttgacatgatataccaagccaattgagccagttcttgtaccctcgagtctcttcaagcaaactgtcgggcatttgaa

SEQ ID NO: 75173 - DNA, 2458 bp, Zea Mays
ccgtggccggagatctcacatcactacaccagccaattttatcaagctcgctcgccgtcacactgcgccaccagcggcgatcccgccatggcctcctggctcaaggtcgccgaagacttgctcgaagtcgtcgaccggagggccaagatcgtggcaacagaactgtcggatgagcagtctacctctcagccttcaggaccaaacaaccaagaagtgcaagcaaagaagggaaagccgagggagaagggtccattgaagctcactaatgccgatggtggcaacaagatatctgctcagaaggaaaagaggagtaggcaacggccgcgagagcggatgaagatcgagaagatcaggccttcgccacctgcaggttcatcaagtgttgataccagtgctagtgaaccagaagtcactccgatcgatgttaaggaagtgggtaatgagggtacattggagaaaggagagaaaggtactgatggccttaagactgatgggtctgggattgttaataccatggttgaagttcaactgatgcagaaaaactctgacaatgccactctggatggtgttacacataccaattcagagattgctgttgaaagctatttttcagttatggatgcaaaaagtgagtcgagcagcagtaaccagacttccgagattggttcagtgattaatttggaggagagagactctactgtggctgttatccaggacacaaatgcgtctgaattgccaaatacagaggttactggcaaactgcaggaatcaaagaaagcgagtgtttcagattcatcagaaagcatagaagatcgacgcaaacaaaaatctgatacaatttctgtgaaagaacaagaccaacttgaggaggctcagggattgttaaaaagtgctgtcaagactggccagtcaaaagaagctaggttagctcgggtttgtgctggactttcatcccgcctccaagagtataagtctgaaaatgcacagctggaggaacttcttgttcaagagagagagaaatctacattgcatgaagctcatataaagcaactacagcaagagttatcaatgtccagagtagaaggttcaagagctgaattgaatatggttgatgctttgactgcaaaaaatgcagagattgaatctcttgttaaatcattggactcttggaagaaaagagcagcaacttcagaagaaaagcttgcttctttagaggaagatatagatggtctcaagaggaactgtgaacttactgaaaccagagttatacaggctttacgggaggaacttgctaccacagagcgtagggctgaagaagagcgcattgctcataatgccacaaaaatggcagctgttgagagagaagtagaactagaacatcgggctgttgaggcatcgagcgctttagctagaatccagagagctgctgatcaaagctcatcaagagtgctggaattggagcacaagttggctgttcttgaggagatggaagctcgtaatcgccgcgtacagaaaaaaccttccgaagaagctaatcaagttcttcagatgcaggcttggcaggaagaagttgagcgtgcacgccaaagccaacgagaggcagaggcaaagatatcatccttggaggcagagttgcagaaaatgagagttgaaatggctggaatgagaagagatgcagagcattattctagacaggagcatgttgaacttgagaagagataccgtgagctaactgacttactgtaccacaagcaaacacaattggaatccatggccagcgaaaaggctgcgttagagttccaactggagaaatcattgaaacaatttcatgaagtgcagattgaggcagaaaggagtaaagctactcgcagatcagcatcgtcgtgggaagaagatgctgatatcaaggcattagagcctcttcctctacatcatcgacacatggcaacagcaaatcagcagttacaaaaggctgcgaagcttttagacacaggagctgtgcgcgcaacaagatttttgtggcgacatcccgttgcacgagtcagcctgctgttctatttggtgttcgtgcatttgttcttgatgcacttgttaaaccgccttcaggacttcgcgtccagagaaggaacatcagccatgggggatctggccagcgcgaacctgccatagcccatagtctctgtgcccttcttgttgattcaggcattccccactgattcttggtccacatgccttcaaagtttcatttcatcctcctgtttctttttttttccgtcttccccatcttttgtaaagtagtagtgttcgttgtttggccatgcgctgtataatccattcttttacattgactgatgagtcagattgagtatgtaccaagtaccttgacatgatataccaagccaattgagccagttcttgtaccctcgagtctcttcaagcaaactgtcgggcatttgaa

SEQ ID NO: 75174 - DNA, 2391 bp, Zea Mays
cgcactactcgtcgcccacacagatccatccctctgcgtcggcgaagatatgccgttctcctctcaatcccacaactctcgtactttccccgcgctgattactccgtgagactagtattgcctccatctgtgacttgctcgaagtcgtcgaccggagggccaagatcgtggcaacagaactgtcggatgagcagtctacctctcagccttcaggaccaaacaaccaagaagtgcaagcaaagaagggaaagccgagggagaagggtccattgaagctcactaatgccgatggtggcaacaagatatctgctcagaaggaaaagaggagtaggcaacggccgcgagagcggatgaagatcgagaagatcaggccttcgccacctgcaggttcatcaagtgttgataccagtgctagtgaaccagaagtcactccgatcgatgttaaggaagtgggtaatgagggtacattggagaaaggagagaaagagattgctgttgaaagctatttttcagttatggatgcaaaaagtgagtcgagcagcagtaaccagacttccgagattggttcagtgattaatttggaggagagagactctactgtggctgttatccaggacacaaatgcgtctgaattgccaaatacagaggttactggcaaactgcaggaatcaaagaaagcgagtgtttcagattcatcagaaagcatagaagatcgacgcaaacaaaaatctgatacaatttctgtgaaagaacaagaccaacttgaggaggctcagggattgttaaaaagtgctgtcaagactggccagtcaaaagaagctaggttagctcgggtttgtgctggactttcatcccgcctccaagagtataagtctgaaaatgcacagctggaggaacttcttgttcaagagagagagaaatctacattgcatgaagctcatataaagcaactacagcaagagttatcaatgtccagagtagaaggttcaagagctgaattgaatatggttgatgctttgactgcaaaaaatgcagagattgaatctcttgttaaatcattggactcttggaagaaaagagcagcaacttcagaagaaaagcttgcttctttagaggaagatatagatggtctcaagaggaactgtgaacttactgaaaccagagttatacaggctttacgggaggaacttgctaccacagagcgtagggctgaagaagagcgcattgctcataatgccacaaaaatggcagctgttgagagagaagtagaactagaacatcgggctgttgaggcatcgagcgctttagctagaatccagagagctgctgatcaaagctcatcaagagtgctggaattggagcacaagttggctgttcttgaggttgaatgtgcttcattgcaacaagaactacaggagatggaagctcgtaatcgccgcgtacagaaaaaaccttccgaagaagctaatcaagttcttcagatgcaggcttggcaggaagaagttgagcgtgcacgccaaagccaacgagaggcagaggcaaagatatcatccttggaggcagagttgcagaaaatgagagttgaaatggctggaatgagaagagatgcagagcattattctagacaggagcatgttgaacttgagaagagataccgtgagctaactgacttactgtaccacaagcaaacacaattggaatccatggccagcgaaaaggctgcgttagagttccaactggagaaatcattgaaacaatttcatgaagtgcagattgaggcagaaaggagtaaagctactcgcagatcagcatcgtcgtgggaagaagatgctgatatcaaggcattagagcctcttcctctacatcatcgacacatggcaacagcaaatcagcagttacaaaaggctgcgaagcttttagacacaggagctgtgcgcgcaacaagatttttgtggcgacatcccgttgcacgagtcagcctgctgttctatttggtgttcgtgcatttgttcttgatgcacttgttaaaccgccttcaggacttcgcgtccagagaaggaacatcagccatgggggatctggccagcgcgaacctgccatagcccatagtctctgtgcccttcttgttgattcaggcattccccactgattcttggtccacatgccttcaaagtttcatttcatcctcctgtttctttttttttccgtcttccccatcttttgtaaagtagtagtgttcgttgtttggccatgcgctgtataatccattcttttacattgactgatgagtcagattgagtatgtaccaagtaccttgacatgatataccaagccaattgagccagttcttgtaccctcgagtctcttcaagcaaactgtcgggcatttgaa

SEQ ID NO: 75175 - DNA, 2368 bp, Zea Mays
gaatccctgtgttcgtgatatcttggttccaataacctcgcgtctgcgacacaccaacccgaaccttaggtagcgtcccggtccgcggtgccagccaccgcgtgccgccgcctgggtcttccctcctcagctccttcctgagctcggcggtggaatcacgggaggaggcggaatagtaagctgaggcggggccatcgggctccgtggttgaggatgcctgtgctgcgtagcgcggcgcgaagggcccgagaggcgcaggggcatccggcggcagctgatgaaaaagctccggaggcggcggcagcagcattagcagcagccccggcaccaccgccggtggagaagaggcggagagtgacgagggcggaggagagggagcgggaggagatcaggcctagggaggtcgtcgcgggagaaggcggcgacgacgagggggagcgtgggatggacgaaccggacagcgcggcacgcagcgccgacaagctgacattcgatgatgaggacggccccactgtccctgaagcggtccaggtgggtagttcaccgaagtatagagtcgacaggaagcttgggaaaggtggttttggccaagtatatgttggccaccgcatgtcagctactggtccaggtgccgtcgaggtggcactgaagtttgagcataggaccagtaaaggatgtcactatggccctccttatgaatggacagcttacaacgccattggtggcattcatgggtttccccgagtccactacaaaggacgccaaggggattactttgttatggttatggatatgctcggacccagtctgtgggatgtctggaataataaatctcacataatgtcagttgagatggtttcttgtattgctattgaagcaatctgcatacttgagaaattacattcaaaagggtatgttcatggcgatgtcaaaccagagaatttcttgctagggactcctgggacacctgaagaaaagaaactcttccttgttgatcttggcttagctacgaagtggaaggatattgcaacagggcggcacgttaaatatgatcagcgttcagatgttttcaggggaacatttcgctatgctagtgttcatgcacatcttgggagaacaggtagcaggagggatgatttagaatctctagcatatacactagtctttcttctacgaggatgtctaccttggcaaggttatcagggtgacaacaaaagcttccttgtctgcaagaagaaaatggccacctttccagtatctctctgttgcttttgcccacatcctttcagaaagtttgtagagtatgttgtcaacttgaagtttgatgaagaacccgactatgcaaaatgtgcatcactttttcatagtgtactaagtgtagtaggttcaaatccagatgtcagaccaattaacactgatggtgctcagaagcttatacatcaatttggtcaaaagagaggccgattttttatagaggaagaagcagatgaacaaccaaagaagaagatcagggtgggaatgcctgcaacacagtggataagtgtctataatggcagagtacctatgaaacaaaggtaccactacaatgtttcagattcaagagttggacagcacatcgaaaaagggaatgccgatggactgtttatcagttgcataacatcttgttccgatctatgggctctaatcatggatgctggaactggtttcacatcccaaatttatgagctcattccacatttccttcacaaagaatgggtaatggaccaatgggagagggactactatataactgcggttgctggggcaaacaatggcagctcgttggtagtgatgtctaaaggcacaaagtacacacaacaatcctacaaagttagcaatagtttcccctacaaatggataaacaagaaatggcaagatggtttctatgtaacttccatggcaactgctggaagtaggtgggctgttgtcatgtctcataatgctgggttttctaatcaggtggttgaactggatttcttgtatcccagcgagggaattcataaaaggtgggacaggggttactggataaccgcagctcctgctacttgtgatcaggctgctttcgttttaagtgtaccaaggaggcgacttacagatgaaacccaagagacactgaggacaattaatttccctagtaaacatgtgaaggacaaatggtctaagaatctctacctagcatcggtatgctatggtcgtactatatcctagggatcttttcgagcggaatcctgccagcaccatcttttgacgtaggagatatccagagccacctgccagaagaaagcagaggaagaaaaaaacaaaacaaattattagtcggtgtatggat

SEQ ID NO: 75176 - DNA, 1993 bp, Zea Mays
gttcgtgatatcttggttccaataacctcgcgtctgcgacacaccaacccgaaccttaggtagcgtcccggtccgcggtgccagccaccgcgtgccgccgcctgggtcttccctcctcagctccttcctgagctcggcggtggaatcacgggaggaggcggaatagtaagctgaggcggggccatcgggctccgtggttgaggatgcctgtgctgcgtagcgcggcgcgaagggcccgagaggcgcaggggcatccggcggcagctgatgaaaaagctccggaggcggcggcagcagcattagcagcagccccggcaccaccgccggtggagaagaggcggagagtgacgagggcggaggagagggagcgggaggagatcaggcctagggaggtcgtcgcgggagaaggcggcgacgacgagggggagcgtgggatggacgaaccggacagcgcggcacgcagcgccgacaagctgacattcgatgatgaggacggccccactgtccctgaagcggtccaggtgggtagttcaccgaagtatagagtcgacaggaagcttgggaaaggtggttttggccaagtatatgttggccaccgcatgtcagctactggtccaggtgccgtcgaggtggcactgaagtttgagcataggaccagtaaaggatgtcactatggccctccttatgaatggacagcttacaacgccattggtggcattcatgggtttccccgagtccactacaaaggacgccaaggggattactttgttatggttatggatatgctcggacccagtctgtgggatgtctggaataataaatctcacataatgtcagttgagatggtttcttgtattgctattgaagcaatctgcatacttgagaaattacattcaaaagggtatgttcatggcgatgtcaaaccagagaatttcttgctagggactcctgggacacctgaagaaaagaaactcttccttgttgatcttggcttagctacgaagtggaaggatattgcaacagggcggcacgttaaatatgatcagcgttcagatgttttcaggggaacatttcgctatgctagtgttcatgcacatcttgggagaacaggtagcaggagggatgatttagaatctctagcatatacactagtctttcttctacgaggatgtctaccttggcaaggttatcagggtgacaacaaaagcttccttgtctgcaagaagaaaatggccacctttccagtatctctctgttgcttttgcccacatcctttcagaaagtttgtagagtatgttgtcaacttgaagtttgatgaagaacccgactatgcaaaatgtgcatcactttttcatagtgtactaagtgtagtaggttcaaatccagatgtcagaccaattaacactgatggtgctcagaagagaggccgattttttatagaggaagaagcagatgaacaaccaaagaagaagatcagggtgggaatgcctgcaacacagtggataagtgtctataatggcagagtacctatgaaacaaaggtaccactacaatgtttcagattcaagagttggacagcacatcgaaaaagggaatgccgatggactgtttatcagttgcataacatcttgttccgatctatgggctctaatcatggatgctggaactggtttcacatcccaaatttatgagctcattccacatttccttcacaaagaatgggtaatggaccaatgggagagggactactatataactgcggttgctggggcaaacaatggcagctcgttggtagtgatgtctaaaggcacaaagtacacacaacaatcctacaaagttagcaatagtttcccctacaaatggataaacaagaaatggcaagatggtttctatgtaacttccatggcaactgctggaagtaggtgggctgttgtcatgtctcataatgctgggttttctaatcagctggtaccctctgatagagcaagacgttc

SEQ ID NO: 75177 - DNA, 2080 bp, Zea Mays
ataacctcgcgtctgcgacacaccaacccgaaccttaggtagcgtcccggtccgcggtgccagccaccgcgtgccgccgcctgggtcttccctcctcagctccttcctgagctcggcggtggaatcacgggaggaggcggaatagtaagctgaggcggggccatcgggctccgtggttgaggatgcctgtgctgcgtagcgcggcgcgaagggcccgagaggcgcaggggcatccggcggcagctgatgaaaaagctccggaggcggcggcagcagcattagcagcagccccggcaccaccgccggtggagaagaggcggagagtgacgagggcggaggagagggagcgggaggagatcaggcctagggaggtcgtcgcgggagaaggcggcgacgacgagggggagcgtgggatggacgaaccggacagcgcggcacgcagcgccgacaagctgacattcgatgatgaggacggccccactgtccctgaagcggtccaggtgggtagttcaccgaagtatagagtcgacaggaagcttgggaaaggtggttttggccaagtatatgttggccaccgcatgtcagctactggtccaggtgccgtcgaggtggcactgaagtttgagcataggaccagtaaaggatgtcactatggccctccttatgaatggacagcttacaacgccattggtggcattcatgggtttccccgagtccactacaaaggacgccaaggggattactttgttatggttatggatatgctcggacccagtctgtgggatgtctggaataataaatctcacataatgtcagttgagatggtttcttgtattgctattgaagcaatctgcatacttgagaaattacattcaaaagggtatgttcatggcgatgtcaaaccagagaatttcttgctagggactcctgggacacctgaagaaaagaaactcttccttgttgatcttggcttagctacgaagtggaaggatattgcaacagggcggcacgttaaatatgatcagcgttcagatgttttcaggggaacatttcgctatgctagtgttcatgcacatcttgggagaacaggtagcaggagggatgatttagaatctctagcatatacactagtctttcttctacgaggatgtctaccttggcaaggttatcagggtgacaacaaaagcttccttgtctgcaagaagaaaatggccacctttccagtatctctctgttgcttttgcccacatcctttcagaaagtttgtagagtatgttgtcaacttgaagtttgatgaagaacccgactatgcaaaatgtgcatcactttttcatagtgtactaagtgtagtaggttcaaatccagatgtcagaccaattaacactgatggtgctcagaagcttatacatcaatttggtcaaaagagaggccgattttttatagaggaagaagcagatgaacaaccaaagaagaagatcagggtgggaatgcctgcaacacagtggataagtgtctataatggcagagtacctatgaaacaaaggtaccactacaatgtttcagattcaagagttggacagcacatcgaaaaagggaatgccgatggactgtttatcagttgcataacatcttgttccgatctatgggctctaatcatggatgctggaactggtttcacatcccaaatttatgagctcattccacatttccttcacaaagaatgggtaatggaccaatgggagagggactactatataactgcggttgctggggcaaacaatggcagctcgttggtagtgatgtctaaaggcacaaagtacacacaacaatcctacaaagttagcaatagtttcccctacaaatggataaacaagaaatggcaagatggtttctatgtaacttccatggcaactgctggaagtaggtgggctgttgtcatgtctcataatgctgggttttctaatcagccaatgtaaggaaggatgttgcaaacagagtagttgcatgcctcacaagatctctatcatttgtcttggtcctcatcaagtcatgaatcattccatatccatagataaataag

SEQ ID NO: 75178 - DNA, 2746 bp, Zea Mays
ataacctcgcgtctgcgacacaccaacccgaaccttaggtagcgtcccggtccgcggtgccagccaccgcgtgccgccgcctgggtcttccctcctcagctccttcctgagctcggcggtggaatcacgggaggaggcggaatagtaagctgaggcggggccatcgggctccgtggttgaggatgcctgtgctgcgtagcgcggcgcgaagggcccgagaggcgcaggggcatccggcggcagctgatgaaaaagctccggaggcggcggcagcagcattagcagcagccccggcaccaccgccggtggagaagaggcggagagtgacgagggcggaggagagggagcgggaggagatcaggcctagggaggtcgtcgcgggagaaggcggcgacgacgagggggagcgtgggatggacgaaccggacagcgcggcacgcagcgccgacaagctgacattcgatgatgaggacggccccactgtccctgaagcggtccaggtgggtagttcaccgaagtatagagtcgacaggaagcttgggaaaggtggttttggccaagtatatgttggccaccgcatgtcagctactggtccaggtgccgtcgaggtggcactgaagtttgagcataggaccagtaaaggatgtcactatggccctccttatgaatggacagcttacaacgccattggtggcattcatgggtttccccgagtccactacaaaggacgccaaggggattactttgttatggttatggatatgctcggacccagtctgtgggatgtctggaataataaatctcacataatgtcagttgagatggtttcttgtattgctattgaagcaatctgcatacttgagaaattacattcaaaagggtatgttcatggcgatgtcaaaccagagaatttcttgctagggactcctgggacacctgaagaaaagaaactcttccttgttgatcttggcttagctacgaagtggaaggatattgcaacagggcggcacgttaaatatgatcagcgttcagatgttttcaggggaacatttcgctatgctagtgttcatgcacatcttgggagaacaggtagcaggagggatgatttagaatctctagcatatacactagtctttcttctacgaggatgtctaccttggcaaggttatcagggtgacaacaaaagcttccttgtctgcaagaagaaaatggccacctttccagtatctctctgttgcttttgcccacatcctttcagaaagtttgtagagtatgttgtcaacttgaagtttgatgaagaacccgactatgcaaaatgtgcatcactttttcatagtgtactaagtgtagtaggttcaaatccagatgtcagaccaattaacactgatggtgctcagaagcttatacatcaatttggtcaaaagagaggccgattttttatagaggaagaagcagatgaacaaccaaagaagaagatcagggtgggaatgcctgcaacacagtggataagtgtctataatggcagagtacctatgaaacaaaggtaccactacaatgtttcagattcaagagttggacagcacatcgaaaaagggaatgccgatggactgtttatcagttgcataacatcttgttccgatctatgggctctaatcatggatgctggaactggtttcacatcccaaatttatgagctcattccacatttccttcacaaagaatgggtaatggaccaatgggagagggactactatataactgcggttgctggggcaaacaatggcagctcgttggtagtgatgtctaaaggcacaaagtacacacaacaatcctacaaagttagcaatagtttcccctacaaatggataaacaagaaatggcaagatggtttctatgtaacttccatggcaactgctggaagtaggtgggctgttgtcatgtctcataatgctgggttttctaatcaggtggttgaactggatttcttgtatcccagcgagggaattcataaaaggtgggacaggggttactggataaccgcagctcctgctacttgtgatcaggctgctttcgttttaagtgtaccaaggaggcgacttacagatgaaacccaagagacactgaggacaattaatttccctagtaaacatgtgaaggacaaatggtctaagaatctctacctagcatcggtatgctatggtcgtactatatcctagggatcttttcgagcggaatcctgccagcaccatcttttgacgtaggagatatccagagccacctgccagaagaaagcagaggaagaaaaaaacaaaacaaattattagtcggtgtatggatatacagtgatatacggccagaaaaagtggaagaagagcacccctacaagcatctacggatgaccaaattggcatggccacaagcacggaagtttattaggattattattcatttagattaaattagttcctattttctagagtaagtcagttttatgtttggtcagggataaactagaaagtgaagttgtttagatatttatggagtcggttcctattttctagggtgagtcggttgtagatggattataaagccttattgtaataatgcagagagggcaagacctacagttatcatttcatttaatctagtatctattatcttcattcctctttggtgctttgccgagaaaagcattcgagtttctctgcgaaagtgagatcaacgcctgctgctcaaccaatttctg

SEQ ID NO: 75179 - DNA, 2851 bp, Zea Mays
ataacctcgcgtctgcgacacaccaacccgaaccttaggtagcgtcccggtccgcggtgccagccaccgcgtgccgccgcctgggtcttccctcctcagctccttcctgagctcggcggtggaatcacgggaggaggcggaatagtaagctgaggcggggccatcgggctccgtggttgaggatgcctgtgctgcgtagcgcggcgcgaagggcccgagaggcgcaggggcatccggcggcagctgatgaaaaagctccggaggcggcggcagcagcattagcagcagccccggcaccaccgccggtggagaagaggcggagagtgacgagggcggaggagagggagcgggaggagatcaggcctagggaggtcgtcgcgggagaaggcggcgacgacgagggggagcgtgggatggacgaaccggacagcgcggcacgcagcgccgacaagctgacattcgatgatgaggacggccccactgtccctgaagcggtccaggtgggtagttcaccgaagtatagagtcgacaggaagcttgggaaaggtggttttggccaagtatatgttggccaccgcatgtcagctactggtccaggtgccgtcgaggtggcactgaagtttgagcataggaccagtaaaggatgtcactatggccctccttatgaatggacagcttacaacgccattggtggcattcatgggtttccccgagtccactacaaaggacgccaaggggattactttgttatggttatggatatgctcggacccagtctgtgggatgtctggaataataaatctcacataatgtcagttgagatggtttcttgtattgctattgaagcaatctgcatacttgagaaattacattcaaaagggtatgttcatggcgatgtcaaaccagagaatttcttgctagggactcctgggacacctgaagaaaagaaactcttccttgttgatcttggcttagctacgaagtggaaggatattgcaacagggcggcacgttaaatatgatcagcgttcagatgttttcagttcatccacgagaggatcactaggccgtggtcaagcatttgatgcgctaaatcaagggcctgatcagggagtcgcctcccccaagatctgtggagaggaaatgcagctcaagggcttcagcgacagcgacatggggaacatttcgctatgctagtgttcatgcacatcttgggagaacaggtagcaggagggatgatttagaatctctagcatatacactagtctttcttctacgaggatgtctaccttggcaaggttatcagggtgacaacaaaagcttccttgtctgcaagaagaaaatggccacctttccagtatctctctgttgcttttgcccacatcctttcagaaagtttgtagagtatgttgtcaacttgaagtttgatgaagaacccgactatgcaaaatgtgcatcactttttcatagtgtactaagtgtagtaggttcaaatccagatgtcagaccaattaacactgatggtgctcagaagcttatacatcaatttggtcaaaagagaggccgattttttatagaggaagaagcagatgaacaaccaaagaagaagatcagggtgggaatgcctgcaacacagtggataagtgtctataatggcagagtacctatgaaacaaaggtaccactacaatgtttcagattcaagagttggacagcacatcgaaaaagggaatgccgatggactgtttatcagttgcataacatcttgttccgatctatgggctctaatcatggatgctggaactggtttcacatcccaaatttatgagctcattccacatttccttcacaaagaatgggtaatggaccaatgggagagggactactatataactgcggttgctggggcaaacaatggcagctcgttggtagtgatgtctaaaggcacaaagtacacacaacaatcctacaaagttagcaatagtttcccctacaaatggataaacaagaaatggcaagatggtttctatgtaacttccatggcaactgctggaagtaggtgggctgttgtcatgtctcataatgctgggttttctaatcagcgagggaattcataaaaggtgggacaggggttactggataaccgcagctcctgctacttgtgatcaggctgctttcgttttaagtgtaccaaggaggcgacttacagatgaaacccaagagacactgaggacaattaatttccctagtaaacatgtgaaggacaaatggtctaagaatctctacctagcatcggtatgctatggtcgtactatatcctagggatcttttcgagcggaatcctgccagcaccatcttttgacagcaggagatatccagagccacctgccagaagaaagcagaggaagaaaaaaacaaaacaaattattagtcggtgtatggatatacagtgatatacggccagaaaaagtggaagaagagcacccctacaagcatctacggatgaccaaattggcatggccacaagcacggaagtttattaggattattattcatttagattaaattagttcctattttctagagtaagtcagttttatgtttggtcagggataaactagaaagtgaagttgtttagatatttatggagtcggttcctattttctagggtgagtcggttgtagatggattataaagccttattgtaataatgcagagagggcaagacctacagttatcatttcatttaatctagtatctattatcttcattcctctttggtgctttgccgagaaaagcattcgagtttctctgcgaaagtgagatcaacgcctgctgctcaaccaatttctg

SEQ ID NO: 75180 - DNA, 3058 bp, Zea Mays
ataacctcgcgtctgcgacacaccaacccgaaccttaggtagcgtcccggtccgcggtgccagccaccgcgtgccgccgcctgggtcttccctcctcagctccttcctgagctcggcggtggaatcacgggaggaggcggaatagtaagctgaggcggggccatcgggctccgtggttgaggatgcctgtgctgcgtagcgcggcgcgaagggcccgagaggcgcaggggcatccggcggcagctgatgaaaaagctccggaggcggcggcagcagcattagcagcagccccggcaccaccgccggtggagaagaggcggagagtgacgagggcggaggagagggagcgggaggagatcaggcctagggaggtcgtcgcgggagaaggcggcgacgacgagggggagcgtgggatggacgaaccggacagcgcggcacgcagcgccgacaagctgacattcgatgatgaggacggccccactgtccctgaagcggtccaggtgggtagttcaccgaagtatagagtcgacaggaagcttgggaaaggtggttttggccaagtatatgttggccaccgcatgtcagctactggtccaggtgccgtcgaggtggcactgaagtttgagcataggaccagtaaaggatgtcactatggccctccttatgaatggacagcttacaacgccattggtggcattcatgggtttccccgagtccactacaaaggacgccaaggggattactttgttatggttatggatatgctcggacccagtctgtgggatgtctggaataataaatctcacataatgtcagttgagatggtttcttgtattgctattgaagcaatctgcatacttgagaaattacattcaaaagggtatgttcatggcgatgtcaaaccagagaatttcttgctagggactcctgggacacctgaagaaaagaaactcttccttgttgatcttggcttagctacgaagtggaaggatattgcaacagggcggcacgttaaatatgatcagcgttcagatgttttcagttcatccacgagaggatcactaggccgtggtcaagcatttgatgcgctaaatcaagggcctgatcagggagtcgcctcccccaagatctgtggagaggaaatgcagctcaagggcttcagcgacagcgacatggggaacatttcgctatgctagtgttcatgcacatcttgggagaacaggtagcaggagggatgatttagaatctctagcatatacactagtctttcttctacgaggatgtctaccttggcaaggttatcagggtgacaacaaaagcttccttgtctgcaagaagaaaatggccacctttccagtatctctctgttgcttttgcccacatcctttcagaaagtttgtagagtatgttgtcaacttgaagtttgatgaagaacccgactatgcaaaatgtgcatcactttttcatagtgtactaagtgtagtaggttcaaatccagatgtcagaccaattaacactgatggtgctcagaagcttatacatcaatttggtcaaaagagaggccgattttttatagaggaagaagcagatgaacaaccaaagaagaagatcagggtgggaatgcctgcaacacagtggataagtgtctataatggcagagtacctatgaaacaaaggtaccactacaatgtttcagattcaagagttggacagcacatcgaaaaagggaatgccgatggactgtttatcagttgcataacatcttgttccgatctatgggctctaatcatggatgctggaactggtttcacatcccaaatttatgagctcattccacatttccttcacaaagaatgggtaatggaccaatgggagagggactactatataactgcggttgctggggcaaacaatggcagctcgttggtagtgatgtctaaaggcacaaagtacacacaacaatcctacaaagttagcaatagtttcccctacaaatggataaacaagaaatggcaagatggtttctatgtaacttccatggcaactgctggaagtaggtgggctgttgtcatgtctcataatgctgggttttctaatcaggtggttgaactggatttcttgtatcccagcgagggaattcataaaaggtgggacaggggttactggataaccgcagctcctgctacttgtgatcaggctgctttcgttttaagtgtaccaaggaggcgacttacagatgaaacccaagagacactgaggacaattaatttccctagtaaacatgtgaaggacaaatggtctaagaatctctacctagcatcggtatgctatggtcgtactatatcctagggatcttttcgagcggaatcctgccagcaccatcttttgacgtaggtagttcactgtagcagctcctatgtgcgggtatcctgagtcgtgttgcgaaggcgtctgctatcgttcttgattatagactagcatatcatgtacaacagtacatgttttgtactacctctgttctcgaatgtttgtcgcctgtgttgaatgcaatttttgtggagctgttagagcaggagatatccagagccacctgccagaagaaagcagaggaagaaaaaaacaaaacaaattattagtcggtgtatggatatacagtgatatacggccagaaaaagtggaagaagagcacccctacaagcatctacggatgaccaaattggcatggccacaagcacggaagtttattaggattattattcatttagattaaattagttcctattttctagagtaagtcagttttatgtttggtcagggataaactagaaagtgaagttgtttagatatttatggagtcggttcctattttctagggtgagtcggttgtagatggattataaagccttattgtaataatgcagagagggcaagacctacagttatcatttcatttaatctagtatctattatcttcattcctctttggtgctttgccgagaaaagcattcgagtttctctgcgaaagtgagatcaacgcctgctgctcaaccaatttctg

SEQ ID NO: 75181 - DNA, 2466 bp, Zea Mays
ataacctcgcgtctgcgacacaccaacccgaaccttaggtagcgtcccggtccgcggtgccagccaccgcgtgccgccgcctgggtcttccctcctcagctccttcctgagctcggcggtggaatcacgggaggaggcggaatagtaagctgaggcggggccatcgggctccgtggttgaggatgcctgtgctgcgtagcgcggcgcgaagggcccgagaggcgcaggggcatccggcggcagctgatgaaaaagctccggaggcggcggcagcagcattagcagcagccccggcaccaccgccggtggagaagaggcggagagtgacgagggcggaggagagggagcgggaggagatcaggcctagggaggtcgtcgcgggagaaggcggcgacgacgagggggagcgtgggatggacgaaccggacagcgcggcacgcagcgccgacaagctgacattcgatgatgaggacggccccactgtccctgaagcggtccaggtgggtagttcaccgaagtatagagtcgacaggaagcttgggaaaggtggttttggccaagtatatgttggccaccgcatgtcagctactggtccaggtgccgtcgaggtggcactgaagtttgagcataggaccagtaaaggatgtcactatggccctccttatgaatggacagcttacaacgccattggtggcattcatgggtttccccgagtccactacaaaggacgccaaggggattactttgttatggttatggatatgctcggacccagtctgtgggatgtctggaataataaatctcacataatgtcagttgagatggtttcttgtattgctattgaagcaatctgcatacttgagaaattacattcaaaagggtatgttcatggcgatgtcaaaccagagaatttcttgctagggactcctgggacacctgaagaaaagaaactcttccttgttgatcttggcttagctacgaagtggaaggatattgcaacagggcggcacgttaaatatgatcagcgttcagatgttttcagttcatccacgagaggatcactaggccgtggtcaagcatttgatgcgctaaatcaagggcctgatcagggagtcgcctcccccaagatctgtggagaggaaatgcagctcaagggcttcagcgacagcgacatggggaacatttcgctatgctagtgttcatgcacatcttgggagaacaggtagcaggagggatgatttagaatctctagcatatacactagtctttcttctacgaggatgtctaccttggcaaggttatcagggtgacaacaaaagcttccttgtctgcaagaagaaaatggccacctttccagtatctctctgttgcttttgcccacatcctttcagaaagtttgtagagtatgttgtcaacttgaagtttgatgaagaacccgactatgcaaaatgtgcatcactttttcatagtgtactaagtgtagtaggttcaaatccagatgtcagaccaattaacactgatggtgctcagaagcttatacatcaatttggtcaaaagagaggccgattttttatagaggaagaagcagatgaacaaccaaagaagaagatcagggtgggaatgcctgcaacacagtggataagtgtctataatggcagagtacctatgaaacaaaggtaccactacaatgtttcagattcaagagttggacagcacatcgaaaaagggaatgccgatggactgtttatcagttgcataacatcttgttccgatctatgggctctaatcatggatgctggaactggtttcacatcccaaatttatgagctcattccacatttccttcacaaagaatgggtaatggaccaatgggagagggactactatataactgcggttgctggggcaaacaatggcagctcgttggtagtgatgtctaaaggcacaaagtacacacaacaatcctacaaagttagcaatagtttcccctacaaatggataaacaagaaatggcaagatggtttctatgtaacttccatggcaactgctggaagtaggtgggctgttgtcatgtctcataatgctgggttttctaatcaggtggttgaactggatttcttgtatcccagcgagggaattcataaaaggtgggacaggggttactggataaccgcagctcctgctacttgtgatcaggctgctttcgttttaagtgtaccaaggaggcgacttacagatgaaacccaagagacactgaggacaattaatttccctagtaaacatgtgaaggacaaatggtctaagaatctctacctagcatcggtatgctatggtcgtactatatcctagggatcttttcgagcggaatcctgccagcaccatcttttgacgagatatccagagccacctgccagaagaaagcagaggaagaaaaaaacaaaacaaattattagtcggtgtatggat

SEQ ID NO: 75182 - DNA, 1205 bp, Zea Mays
gtgttgtgtgtgagtttgagtgaggtactcacttgtgtgggccggcttgatcctaacacatgtgagcttgcatgtttccttgatcagtacagtttttactccttatgaacatcttgctgcaatgaactcacctattctagtcactactggtcaaatggtcctgattggggaacatttcgctatgctagtgttcatgcacatcttgggagaacaggtagcaggagggatgatttagaatctctagcatatacactagtctttcttctacgaggatgtctaccttggcaaggttatcagggtgacaacaaaagcttccttgtctgcaagaagaaaatggccacctttccagtatctctctgttgcttttgcccacatcctttcagaaagtttgtagagtatgttgtcaacttgaagtttgatgaagaacccgactatgcaaaatgtgcatcactttttcatagtgtactaagtgtagtaggttcaaatccagatgtcagaccaattaacactgatggtgctcagaagcttatacatcaatttggtcaaaagagaggccgattttttatagaggaagaagcagatgaacaaccaaagaagaagatcagggtgggaatgcctgcaacacagtggataagtgtctataatggcagagtacctatgaaacaaaggtaccactacaatgtttcagattcaagagttggacagcacatcgaaaaagggaatgccgatggactgtttatcagttgcataacatcttgttccgatctatgggctctaatcatggatgctggaactggtttcacatcccaaatttatgagctcattccacatttccttcacaaagaatgggtaatggaccaatgggagagggactactatataactgcggttgctggggcaaacaatggcagctcgttggtagtgatgtctaaaggcacaaagtacacacaacaatcctacaaagttagcaatagtttcccctacaaatggataaacaagaaatggcaagatggtttctatgtaacttccatggcaactgctggaagtaggtgggctgttgtcatgtctcataatgctgggttttctaatcagccaatgtaaggaaggatgttgcaaacagagtagttgcatgcctcacaagatctctatcatttgtcttggtcctcatcaagtcatgaatcattccatatccatagataaataag

SEQ ID NO: 75183 - DNA, 2050 bp, Zea Mays
gtgttgtgtgtgagtttgagtgaggtactcacttgtgtgggccggcttgatcctaacacatgtgagcttgcatgtttccttgatcagtacagtttttactccttatgaacatcttgctgcaatgaactcacctattctagtcactactggtcaaatggtcctgattggggaacatttcgctatgctagtgttcatgcacatcttgggagaacaggtagcaggagggatgatttagaatctctagcatatacactagtctttcttctacgaggatgtctaccttggcaaggttatcagggtgacaacaaaagcttccttgtctgcaagaagaaaatggccacctttccagtatctctctgttgcttttgcccacatcctttcagaaagtttgtagagtatgttgtcaacttgaagtttgatgaagaacccgactatgcaaaatgtgcatcactttttcatagtgtactaagtgtagtaggttcaaatccagatgtcagaccaattaacactgatggtgctcagaagcttatacatcaatttggtcaaaagagaggccgattttttatagaggaagaagcagatgaacaaccaaagaagaagatcagggtgggaatgcctgcaacacagtggataagtgtctataatggcagagtacctatgaaacaaaggtaccactacaatgtttcagattcaagagttggacagcacatcgaaaaagggaatgccgatggactgtttatcagttgcataacatcttgttccgatctatgggctctaatcatggatgctggaactggtttcacatcccaaatttatgagctcattccacatttccttcacaaagaatgggtaatggaccaatgggagagggactactatataactgcggttgctggggcaaacaatggcagctcgttggtagtgatgtctaaaggcacaaagtacacacaacaatcctacaaagttagcaatagtttcccctacaaatggataaacaagaaatggcaagatggtttctatgtaacttccatggcaactgctggaagtaggtgggctgttgtcatgtctcataatgctgggttttctaatcaggtggttgaactggatttcttgtatcccagcgagggaattcataaaaggtgggacaggggttactggataaccgcagctcctgctacttgtgatcaggctgctttcgttttaagtgtaccaaggaggcgacttacagatgaaacccaagagacactgaggacaattaatttccctagtaaacatgtgaaggacaaatggtctaagaatctctacctagcatcggtatgctatggtcgtactatatcctagggatcttttcgagcggaatcctgccagcaccatcttttgacgtaggtagttcactgtagcagctcctatgtgcgggtatcctgagtcgtgttgcgaaggcgtctgctatcgttcttgattatagactagcatatcatgtacaacagtacatgttttgtactacctctgttctcgaatgtttgtcgcctgtgttgaatgcaatttttgtggagctgttagagcaggagatatccagagccacctgccagaagaaagcagaggaagaaaaaaacaaaacaaattattagtcggtgtatggatatacagtgatatacggccagaaaaagtggaagaagagcacccctacaagcatctacggatgaccaaattggcatggccacaagcacggaagtttattaggattattattcatttagattaaattagttcctattttctagagtaagtcagttttatgtttggtcagggataaactagaaagtgaagttgtttagatatttatggagtcggttcctattttctagggtgagtcggttgtagatggattataaagccttattgtaataatgcagagagggcaagacctacagttatcatttcatttaatctagtatctattatcttcattcctctttggtgctttgccgagaaaagcattcgagtttctctgcgaaagtgagatcaacgcctgctgctcaaccaatttctg

SEQ ID NO: 75184 - DNA, 823 bp, Zea Mays
gcggatctgaacaccaccttgtactctccactctgctagccattagtaagcaaatatcagctaaataatgataatatgtactagatccaatatatcctaagaaaggtcaggataaccaaataggtatatgtggtaatccacatgcaatcaacttcgaataaatagcttatcaacattgggtgatggtcatggcatcaagtgaaaaatggaggctactaaatgtcagttatttatagaatcaacatagtccaaagcttacttaccttggtcataaagtaaccaaataatgtaggatgcatgttaaatatttctgcagtgcaaccgagagcaacctcagtgcataaaaaagccttgtcttcacccgaggtaagtaagacaaaaccttaattgactggatcccagcctgatgtgcctttgattagccaaatctcttcgtggaccaactgcacgtacataaaccatgagggaaatatgttgactacaatgagatagtaacaaacttacaggaaaccatgtaagcaggtaaagaattgtaggtagaatagaaaggaaataccttggataaaaaagtggcagaatgatttgtaccttttagagttttaactaaatccggatcaaagtggccacaatgcgaagtgacacgccgttgagagggtgtggccgcacctaataaattttttcttttctggcgcacaccattataacaatgtatttactatggtacctgttgataattatctttgctggtttagcaattctctatgcacatggcgtgcttcgacacgaggtatgctcaaaggggcatagcacacattagtatgat

SEQ ID NO: 75185 - DNA, 743 bp, Zea Mays
gccatggcgaccaaagggtcagaccctgcctccccggcgtcggcgccaccgccgccaccgaagcggcgaaagatcgagccgcccaggagttaccgattcacaagcaagcagcaactgtactgaactattgtgttgttgcctgttccataatttatctcctctggaacacaggaccaggctttctcaagttaccatcgataacaagtcgtcttccaactcatcgactcctccgggttcgctgccagcgagagttgatctcaacaaagttagagaggcaaagagatttgccgtccttgaagcgcagcatgagggatgccttggaagctataaaagcttcgattccctctttgggaattaccttgttcctgtcataccaacgaacgatttctttcatcaggccgggaccaaatgatgaacaagaatggctatttgtaacgaacagaatgactactaaattttgcaatttcctttaagagcgcgacctgatacagcattactaagctatcaacggaagataacacgaagaccaagttttgtgtgtggtgttgtacgtaggccccctaacttgcaagatctcaaaaggtaaagattatcctgcacagttgcagatctaagtagtgaaaaagtttttgcattatggggagcatatgtcagtgtgtgttagctttctttttttttcccttctagtgcgaatttgtcaagacatattttccatgaatctatttatcactcaaaaaaacgtt

SEQ ID NO: 75186 - DNA, 5537 bp, Zea Mays
attatataatctggattataatctaaattatatataatttagattataatctagatatattataatctacatgtagttgtttggtagtttagattatataaatatagattattcacaaagacaacaatacccttgcttgtttatttgaggtgggaaaagaaggatggcatatattgtaatttctatttacataaccatgggtagtgagtcttttgccaaaataatctcaaataagctacacttgaggagattatgagattatcataatctgggctttagattatataatctgaacccataatctagctgtttgtttacctattggattatttgcgctggattatataatctggagagattataatctgaaacaaacagggcctaagactgttgttgtctcttgttctaaactaataaatcataagccgttggttacacatttttgtttacaccctcgttcactccaagtaaactttagcggtgtaaatgtacagttcgagatcatgcttagccaggcaaatcaaaccatcccaagtagagtttgcatgcttatatatcgttacatatgttataaatatctggtaatctgcgatcaagcatttcagttgacccctgcttgttaagagcacaaagatgaacaacaacaacaacaaccaaaaaaagacttaactataatttagatcgcagcgcttgaaccgcattttgtgcacggacaggtagggcgtgtttgtgattctgtaccgctcggcccgcccaacatgatcaagcctgacctgcttttgccgctgcaactcaccatgtttgcgtccatgtacaaaataagcctggctaagactagatgttgtttgccacccctcagtcacctgccatcacatcaaattttcctaccttgcaccgcgggcagccgagccccgaaaaaacgaaccccagcaccgtttccagggatccaggcgttgttgtcacttttgcacacacacgactgtgctcttaaacgggtcagacacgcaaacacgcccagttgcagcccaggagcgcagccgggctgctaggccaccgtcgcaaacacgcccataaataccattctcagttcactccatcagtgctttgatgctccagataacacatcctgatacttcccatggctccatacaagggggaaaaaaaagagataatccgagaaaaatcgatgcatatcatggaaataagaccataagttttcggtcgcagattccatcagcaaaagtccaagggcgtactcccgcaaggcatgtaaaaatgttattggaatcctctagtacaaaggcgaaaaatcaggctcttgtgtcttgttatagaggtgtagcaaatcctgtggaaacaaacaaatgccccttgagcgcgattcatagatatatatagctagctgcctttccagatctcatcaacaatcttaaataaaacagagaaaacgatcagctgaggcatgtgacaactcataaacagcaattgcaaaaaaaaaatgtaaggtcttctcaacaaatgcttgacgattgaaagaacatcaagaaatatgtatttggcagtaacttgcagtcagtcagacaccacaccattaccagtaacttgcagtcagtcagacaggtgcatccttcattgtggcgataatatttgttaggaaatgacaaacatacagagcaacaaagagaagaataccaaaatccaccaaaggtgccactgctaaagaggcagaaaatcgaggccattttgatccaagtttagacaatggcacacatatagcatcagccagtagcctaccttaacacaatacttgtaattcaggcataccttcgaaaattggtttctagccatcccaaatgggggcctaacgcaggtgaactacttacgtagcagaactatatattcaatattacatcaaactgaagagaatcgattcagtgtatgtaatgtagtaagtctcgatgtcatgcatcattcacggaatcacggcgacgaaacggattaaatcacttaccctcggagagccaaccccaagagtcttttttttttgaaagggaaaggcaaaagatttgccaatccaatatattagaagagataataaactttacaaactgacacaacccaaacaacttaacaaacttgacctagttagaacactgacatttagagataaagacccaaactcccctgaccaggcccccaaccgctacagacaagttaaaactccaccaacgagctctttcaccacctgcgccacttgctctgtcgttctctgctgacccttaaagattctgttgtttctttccaaccataagctccaccagaaataaattagaaggccatcgaagctttttcttgattgcttgctacagagcatcctcagtctaaaccaccacgtgtgcagagatccagtcttagaaataccgtccaggaatcgcaaatcagcccaagtcaagatcatgctccacacttcctcggcgaagggacaatctttacataggtgtgccgctgtctccggagctacattacaaaaagaacaattttgattgcaaggccatccccgtttttgcagattgtctgaagttaaaattttgttgtgcaacaatgtccaagcaaagaaacgacattttggttcagtttttgctttcccaaatggggttgatgtgaattttacagaagttcgttgtgaattgaattttgtatgcgctacttgaactgtattccccatctgcagaccatctccaagaaatggtgtcttcaagatcattgaggccatgtgtgttgttgattgataaccaaagtaagacgaattctctaacttcctcctcccgagtgaaaggcgcgcagaactgcatccagtaattgtttcgaagagccttgaaaaccgagatgttctttcttcttgctttcttgtatagcttaggtgcaatattctttggtgtctgtccttcaatccaactagatccccagaaatctgccatcctcccgttaccaatagtcacaattgttgatgtgttaaagagatctacatccgccttgtcacatggtaaatgcatgccagcccatgctttttctttaaacttccaccttagccacaaccatcttagccttagcgctcttgcaaaacgctccacgtctagaactcccagaccccccttattctttggtaggcaagttgtgggccagttaatcaagcaatgacctccattgcaaaattctggactattccctttccaaagaaagcttcttcttaacttgtcaattcttttaagtaaccatttctgcgccggaaagaccgtcagatgatagataggctgagcagacaacaccgctttaaccaaggtttccctacctgcctttgagagtagcctgtctttccatcctgctagccttttattaattttatcaattagtggttgaacatcaattctcctaacgttcctgaaatgtagaggtagaccaagatacttccctggaaatttagagtatttaccagggaacacctccatcagatctggccaaagagtttgggggtaacgaatcgggaaaatttcggttttattgaaattgatcttcagccctgaacatccttcaaaaacttccagaatccttttcaaaaccttcaaatcctctttatctgctctaacgaacacacctgcgtcatctgcataaagagaacagcgcagtttagccttatttggcagaacccgccccaagagcccagcatctgccgccatctcaatcatcctcttcagagggtccattgctagaataaacaggaacggggatagcgggtcaccctgacgaacgccacgcatgtgcctaattgcatttgtttgttgaccgttgatgatgatttttgaagaggaagaccctaatattgttgcgatccaattcctccatttctgggaaaaacctagagctctcagaacctctaacagatatgcccagttgatggaatcaaaagcttttgatatgtcaggtttgacaaaaagggctggctgattgttcctattaagtttctgaataactttttggacgtagagaaaattatcatgaattgaacgtttctgaatgaacgcattttgggcagtggagacaatctcattcattcttggtgcaagtctgtttgctaaaatcttggtcaatattttcatgaagctattgatgagactgatcggcctaaacatgtcaatcctgtcagcaccctccctcttttgtaaaagcgcgatatttgcctcgttaacgaggtttaggtttttgcatctatggtgatagaaatcatgaaatcgccacttgataagatcatctttaatcagctcaaaacaactcttaatagaagatcccgataaaacaatctggacccggcgccttttcagagtgcatcccccataaccacatttttaatctcatcctcattgaacaagaaatccagatctgataagtcaaatggactatagcctaggttaccccaccgaacggccctctgtctctcaccccttctaccaatagcttcagtgaaatgatggtgggcctcatgcagtttatcttcctgactggtgagtaacctgtcgtcacgaaccagcgatctgatgaaatttttccttcttctattatttgccatcaggtgaaaaaaatttgtgtttgcatctcccagacgcatccatacaagtctggaatgttgtctagctcttgccttttggactgtcactagcccaaggattttcatttttagacttctcctgaactctagctcgtccccggagagttgcctggattcctgtgctctctcaagaagggtaaggacggtctgaatgattgctaattgaactttaaaattgcctactgtctttcgtctccagatcaatagagctttagctgtgcggatcatcttcacatgcagcctaagaatggcatcggaagaacgaacactagatgtccaagcttgctgaaccacctcattgaacccatcaatttttgtccaaaaagcttcaaatctaaaccccctatagaaactaaaggtagataaaccttgcataactaaggggcaatgatctgaggtcatggacccaatggcctgcagatcagcctgggggaagatatcatgccactccgtagtcgccaagaatctgtcaatcctagacatcgtagggtcatcctgttcatttgaccatgtgtataatttaccattgagatcaagttctaaaagctgaaggtaatcgattgtgtggttgaactgtctcatcactcttctattaattaatcctttgtttttctcccttgctctccttatcatgttaaaatcacctaaaaccagccattctggcttcatcagactacgaatatgacgcaactctgccagaaaattcattttctcactttcaggttgagggccataaactccagtgaggtcccaccccacgtcgctcagacgagagctgatactgacgaataacgaatatactgatggatagggaataacagttatgtcaaaaaagtctgcatcgcatgcattagaatcccacctgaggctccaagag

SEQ ID NO: 75187 - DNA, 1646 bp, Zea Mays
ataaaacaagctagattatataatcatatagaaaaataaacacctttaaccaacaactaggctgataaaaaagagcataaatagtgattcgaattccacctggagcatgtttgaatctataaataatgctaaaatctaacattcacttttagctcaactttatttttgcagcaccattatttcttacacttctcgtcttcttcccctttcgctttcactcttcctttgcagctcacactcacaagaatcccccgcgtcgcagacatgcggccgcttatccgaaccgctcgctgctggctcctccgcgcgcgtgttcgcggcatggccacgcttccaatggcgctctcccccgccgccatttcccccttcaccaccctccccctctactattcttcgcgtcctcaccgccgcctcctcgcccgcttcttctccgtcgcttcggcaccgggcggagcgaaagggcaccgaccggcggcctccgccgttgaggtgggcggcgtcaagatcgcgcgcgaggatgttgtgaaggaggatgatccgacaaacaacgtgcccgacaatatcttttcgaagatcggcctgcagctgcacaggagggataaccatccccttgggattttgaagaacacaatttatgattactttgacaagaacttcactgggcagtttgacaagtttgatgacctttgccctcttgtttctgtcaagcagaattttgatgatgtcttggtcccttctgaccatgtaagccggagttacaacgacacatattatgttgatggtcaaacagtcttaaggtgtcataccagtgctcatcaagctgagctgctaaggcatggacatacacactttcttgtaactggagatgtttaccgtagggattccattgattcaactcactatcctgtcttccatcagatggaagggttccgtgtcttctctcctgatgaatggtcagggtctcgcatgggtgggacagcatatgcagctgcagaactcaagaaaacactggaaggcttggcaagacatctatttggtgctgtagagatgcgatgggttgacacttacttcccatttaccaacccatcctttgagctcgaaatatactttcaggatgattggttggaggttttggggtgtggagtcaccgagcaggaaattttgaaaagaaatggcaggagggaccatgtggcttgggcctttggattgggcttggagcgccttgcaatggtcctttttgacattccagatattcgactcttctggtcgaatgataaacggttcacgtcccagttctcagaaggcaagcttggtgtcaagttcaagccattttcaaagtttcctccttgttacaaggatatgagtttctggatcaatgatgcatttacagagaacaacttatgtgaggttgtcagaggaattgctggtgatcttgttgaggaggtatgataacagtgcatttgatgcacattggcttagcttagtcatttcaagtttttatgatccttcagctttcatgttgtcatttcgtataataactgaattcaaacaatagcataatcaatctatactatacttaaagcaccagtttcaacggtcgtcccgcgtcattttttttacaaataacccttcacagctattcaaat

SEQ ID NO: 75188 - DNA, 1457 bp, Zea Mays
cttacacttctcgtcttcttcccctttcgctttcactcttcctttgcagctcacactcacaagaatcccccgcgtcgcagacatgcggccgcttatccgaaccgctcgctgctggctcctccgcgcgcgtgttcgcggcatggccacgcttccaatggcgctctcccccgccgccatttcccccttcaccaccctccccctctactattcttcgcgtcctcaccgccgcctcctcgcccgcttcttctccgtcgcttcggcaccgggcggagcgaaagggcaccgaccggcggcctccgccgttgaggtgggcggcgtcaagatcgcgcgcgaggatgttgtgaaggaggatgatccgacaaacaacgtgcccgacaatatcttttcgaagatcggcctgcagctgcacaggagggataaccatccccttgggattttgaagaacacaatttatgattactttgacaagaacttcactgggcagtttgacaagtttgatgacctttgccctcttgtttctgtcaagcagaattttgatgatgtcttggtcccttctgaccatgtaagccggagttacaacgacacatattatgttgatggtcaaacagtcttaaggtgtcataccagtgctcatcaagctgagctgctaaggcatggacatacacactttcttgtaactggagatgtttaccgtagggattccattgattcaactcactatcctgtcttccatcagggttccgtgtcttctctcctgatgaatggtcagggtctcgcatgggtgggacagcatatgcagctgcagaactcaagaaaacactggaaggcttggcaagacatctatttggtgctgtagagatgcgatgggttgacacttacttcccatttaccaacccatcctttgagctcgaaatatactttcaggatgattggttggaggttttggggtgtggagtcaccgagcaggaaattttgaaaagaaatggcaggagggaccatgtggcttgggcctttggattgggcttggagcgccttgcaatggtcctttttgacattccagatattcgactcttctggtcgaatgataaacggttcacgtcccagttctcagaaggcaagcttggtgtcaagttcaagccattttcaaagtttcctccttgttacaaggatatgagtttctggatcaatgatgcatttacagagaacaacttatgtgaggttgtcagaggaattgctggtgatcttgttgaggaggtatgataacagtgcatttgatgcacattggcttagcttagtcatttcaagtttttatgatccttcagctttcatgttgtcatttcgtataataactgaattcaaacaatagcataatcaatctatactatacttaaagcaccagtttcaacggtcgtcccgcgtcattttttttacaaataacccttcacagctattcaaat

SEQ ID NO: 75189 - DNA, 1400 bp, Zea Mays
ctcacactcacaagaatcccccgcgtcgcagacatgcggccgcttatccgaaccgctcgctgctggctcctccgcgcgcgtgttcgcggcatggccacgcttccaatggcgctctcccccgccgccatttcccccttcaccaccctccccctctactattcttcgcgtcctcaccgccgcctcctcgcccgcttcttctccgtcgcttcggcaccgggcggagcgaaagggcaccgaccggcggcctccgccgttgaggtgggcggcgtcaagatcgcgcgcgaggatgttgtgaaggaggatgatccgacaaacaacgtgcccgacaatatcttttcgaagatcggcctgcagctgcacaggagggataaccatccccttgggattttgaagaacacaatttatgattactttgacaagaacttcactgggcagtttgacaagtttgatgacctttgccctcttgtttctgtcaagcagaattttgatgatgtcttggtcccttctgaccatgtaagccggagttacaacgacacatattatgttgatggtcaaacagtcttaaggtgtcataccagtgctcatcaagctgagctgctaaggcatggacatacacactttcttgtaactggagatgtttaccgtagggattccattgattcaactcactatcctgtcttccatcagatggaagggttccgtgtcttctctcctgatgaatggtcagggtctcgcatgggtgggacagcatatgcagctgcagaactcaagaaaacactggaaggcttggcaagacatctatttggtgctgtagagatgcgatgggttgacacttacttcccatttaccaacccatcctttgagctcgaaatatactttcaggttttggggtgtggagtcaccgagcaggaaattttgaaaagaaatggcaggagggaccatgtggcttgggcctttggattgggcttggagcgccttgcaatggtcctttttgacattccagatattcgactcttctggtcgaatgataaacggttcacgtcccagttctcagaaggcaagcttggtgtcaagttcaagccattttcaaagtttcctccttgttacaaggatatgagtttctggatcaatgatgcatttacagagaacaacttatgtgaggttgtcagaggaattgctggtgatcttgttgaggaggtatgataacagtgcatttgatgcacattggcttagcttagtcatttcaagtttttatgatccttcagctttcatgttgtcatttcgtataataactgaattcaaacaatagcataatcaatctatactatacttaaagcaccagtttcaacggtcgtcccgcgtcattttttttacaaataacccttcacagctattcaaat

SEQ ID NO: 75190 - DNA, 761 bp, Zea Mays
cgcagacatgcggccgcttatccgaaccgctcgctgctggctcctccgcgcgcgtgttcgcggcatggccacgcttccaatggcgctctcccccgccgccatttcccccttcaccaccctccccctctactattcttcgcgtcctcaccgccgcctcctcgcccgcttcttctccgtcgcttcggcaccgggcggagcgaaagggcaccgaccggcggcctccgccgttgaggtgggcggcgtcaagatcgcgcgcgaggatgttgtgaaggaggatgatccgacaaacaacgtgcccgacaatatcttttcgaagatcggcctgcagctgcacaggagggataaccatccccttgggattttgaagaacacaatttatgattactttgacaagaacttcactgggcagtttgacaagtttgatgacctttgccctcttgtttctgtcaagcagaattttgatgatgtcttggtcccttctgaccatgtaagccggagttacaacgacacatattatgttgatggtcaaacagtcttaaggtgtcataccagtgctcatcaagctgagctgctaaggcatggacatacacactttcttgtaactggagatgtttaccgtagggattccattgattcaactcactatcctgtcttccatcaggcatggattctatccatagctcattaggttggaacaaattcatggagatattgtacaagtttatattagaatgcatggatcaaaagaataactagctttg

SEQ ID NO: 75191 - DNA, 3181 bp, Zea Mays
ccaaccggcccttggtcgtggcgtcgctgtccgagcgccagacaagagacaggggagatgaaaaagaggcggtggtggttcgagtgtgaatatgccggtggggagggctctgcctccccaggatacttcgccccccgttccaccgcgagcccttccggcttccgcctctgttccgccgctccagcctccaggatccgtgagaggaaaagtagtagccccatccccaaccggtcctaacccacgggcgttgcttgccaaccacggtatcgttctagccgccggggccgaacgaagtcggggatgtaattgaatccagcgatctttggatgctcgtcatacgtgccaacagcagggtcaatttccctcgaaagagaaggccgaggaaatggaagccggtttcctgtggaaagagatcggtgaccaagccggtgcggcgagaatgtccggtgggaacaagaacaggagcctcgactgggatttgaacgactggaggtgggacgccaacctgttcctggccacaccagcggccgccgcgccatccgagtccatcagcagggagctgagccgaggtcagggggagatcgatttcggcgtcgtcgttgacaagaggcggcggctctcaccagaggaggacggcagcggtgggtgcagcaattctgcggtagcagatggagacaacagtcacgtggtgtgtgttcagagagggcggaacactgaggagacgagacccaggaaaggtgccaattcgagcaccactccttcttgccaggttgacggctgccaagctgatcttagtggtgccagggactaccataagaggcacaaggtgtgtgaagcgcataccaggacaacagtggtctgcatcaataatgtagagcatcggttctgtcagcagtgcagcaggtttcaccttcttcacgaatttgatgatggtaagaagagctgccgatcacgtctggcacaacataatggaaggagaaggaaagttcaaccgcaacctgctgtgaacgggaattccatgaatgaagatcagtctctaagtagcaccttattccttctgttaaaacaactttccgggctcgagtctggtagctcttctgagcaaatcaaccatcctaattctttggttaaccttttgaagaaccttgctgctattgctagcacacatgcatatcaagatgttctaaagaatgcaacttcaatatcatcaaatgatggtaataatgctgcaaatggctctataatgcatgagcaaaccatacggtcaattcctgtcaggagagaatcattagcagaagagcctgcggtgaaaagacgagtacaggactttgatttgaacgattcatgcattgaagaagccgagagccgaacagataaaattgtgttcaaactctttggaaaagagccaaaagattttcctgtagatctacgggaacagatcctaaactggttgtcgcattatccaactgatatggaaagttatattagacctggttgtgttattctaactatttaccttcacctccctaattggatgtgggatgagtttaatgatgacccagcttcatggatagaaaatcttattagcttatccaatgatggattctggagaacaggatggttgtatgctagggtacaggactgcctaacactgagttgcaatggtagtcttatgtttgcatctccctggcaaccggtaattggtgacaagcatcagagactgtgtgtaactccaattgcagttgattgttcttcgtcagtaaaattctctgtgaaaggtttcaatatagttcagccaaccacaaaattactttgtgtgtttgatgaaaaatatttaattcaagaagagacacaaatgctacttgaagattcaactatgcagcaaggccctcaatgcctgaccttctcttgttcctttccttgtacaagtggaagaggattcatagagattgaagactatgatcaaagcagcctttctgttccctttgttgtcacggacaaagatgtatgttctgagattcggatgttggagcatggattggatttagtttcatttgatcaaacctccaaaagaatagatgatctgatgatttatcgcagtcgagcattacattttttgcatgaaatcggatggcttcttcaaaggagccatgtgcgagctacgtctgagcagcgacaatattgtcctgaccgcttccctgttgcaagatttagatggctgctatcctttgcagttgatcaggaatggtgtgctgttctaaggaagcttctgaacaccatgttccagggtgatattgatgtattgtcaccaattgaatttgccttgggagaaaatctattgcatactgcggtcaaaaaacgctcaaagcctttagttgaatttctattaagatacaccacaacaaatattgctccagtgggcggtggagatggtgctccagttcagttcttgttcactcctgcgatgactgaactgtcaaatatcacacctcttcatattgcagccacaatcagtgatgctattggtgttttagatgctttaactgatgatcctcagcagttgggaatcaaagcgtggaagaatgctcgtgacgccactggcttcactcctgaggaatatgctgcaaagagaggcaacatatcctatattcaaatggtacaggacaaaattgacagaagggtgaccagagctcatgtctcggttaccatccccagcacaattgatactgtcggaaagcatggtagccgaatgaagcctgccgatcaaatcacatttggtgttgagaaaaaacaactaagcatcaaccaaacattgagctgcagacagtgtgtccagcaggcccagcagcttgcattccatccccggacaaataggtttctgtctaataggactgcgatgctttccttggtctccattgctgccgtctgcgtctgtgtgggattgatcatgaagagcctgccacaagttggttgtatgaagcctttcctctgggacaatatacgttggggccccaattgatagactgcagaagagccagcccgattgtatcagtgtatgatgaagatgtttgcgccgagcgaagctagtttcttgtaatgttatccataccatctcccattggcttcgcaggtgggctatgctacagaagtcagattctcgcctttttataatggaggctac

SEQ ID NO: 75192 - DNA, 2805 bp, Zea Mays
ccaaccggcccttggtcgtggcgtcgctgtccgagcgccagacaagagacaggggagatgaaaaagaggcggtggtggttcgagtgtgaatatgccggtggggagggctctgcctccccaggatacttcgccccccgttccaccgcgagcccttccggcttccgcctctgttccgccgctccagcctccaggatccgtggggagatcgatttcggcgtcgtcgttgacaagaggcggcggctctcaccagaggaggacggcagcggtgggtgcagcaattctgcggtagcagatggagacaacagtcacgtggtgtgtgttcagagagggcggaacactgaggagacgagacccaggaaaggtgccaattcgagcaccactccttcttgccaggttgacggctgccaagctgatcttagtggtgccagggactaccataagaggcacaaggtgtgtgaagcgcataccaggacaacagtggtctgcatcaataatgtagagcatcggttctgtcagcagtgcagcaggtttcaccttcttcacgaatttgatgatggtaagaagagctgccgatcacgtctggcacaacataatggaaggagaaggaaagttcaaccgcaacctgctgtgaacgggaattccatgaatgaagatcagtctctaagtagcaccttattccttctgttaaaacaactttccgggctcgagtctggtagctcttctgagcaaatcaaccatcctaattctttggttaaccttttgaagaaccttgctgctattgctagcacacatgcatatcaagatgttctaaagaatgcaacttcaatatcatcaaatgatggtaataatgctgcaaatggctctataatgcatgagcaaaccatacggtcaattcctgtcaggagagaatcattagcagaagagcctgcggtgaaaagacgagtacaggactttgatttgaacgattcatgcattgaagaagccgagagccgaacagataaaattgtgttcaaactctttggaaaagagccaaaagattttcctgtagatctacgggaacagatcctaaactggttgtcgcattatccaactgatatggaaagttatattagacctggttgtgttattctaactatttaccttcacctccctaattggatgtgggatgagtttaatgatgacccagcttcatggatagaaaatcttattagcttatccaatgatggattctggagaacaggatggttgtatgctagggtacaggactgcctaacactgagttgcaatggtagtcttatgtttgcatctccctggcaaccggtaattggtgacaagcatcagagactgtgtgtaactccaattgcagttgattgttcttcgtcagtaaaattctctgtgaaaggtttcaatatagttcagccaaccacaaaattactttgtgtgtttgatgaaaaatatttaattcaagaagagacacaaatgctacttgaagattcaactatgcagcaaggccctcaatgcctgaccttctcttgttcctttccttgtacaagtggaagaggattcatagagattgaagactatgatcaaagcagcctttctgttccctttgttgtcacggacaaagatgtatgttctgagattcggatgttggagcatggattggatttagtttcatttgatcaaacctccaaaagaatagatgatctgatgatttatcgcagtcgagcattacattttttgcatgaaatcggatggcttcttcaaaggagccatgtgcgagctacgtctgagcagcgacaatattgtcctgaccgcttccctgttgcaagatttagatggctgctatcctttgcagttgatcaggaatggtgtgctgttctaaggaagcttctgaacaccatgttccagggtgatattgatgtattgtcaccaattgaatttgccttgggagaaaatctattgcatactgcggtcaaaaaacgctcaaagcctttagttgaatttctattaagatacaccacaacaaatattgctccagtgggcggtggagatggtgctccagttcagttcttgttcactcctgcgatgactgaactgtcaaatatcacacctcttcatattgcagccacaatcagtgatgctattggtgttttagatgctttaactgatgatcctcagcagttgggaatcaaagcgtggaagaatgctcgtgacgccactggcttcactcctgaggaatatgctgcaaagagaggcaacatatcctatattcaaatggtacaggacaaaattgacagaagggtgaccagagctcatgtctcggttaccatccccagcacaattgatactgtcggaaagcatggtagccgaatgaagcctgccgatcaaatcacatttggtgttgagaaaaaacaactaagcatcaaccaaacattgagctgcagacagtgtgtccagcaggcccagcagcttgcattccatccccggacaaataggtttctgtctaataggactgcgatgctttccttggtctccattgctgccgtctgcgtctgtgtgggattgatcatgaagagcctgccacaagttggttgtatgaagcctttcctctgggacaatatacgttggggccccaattgatagactgcagaagagccagcccgattgtatcagtgtatgatgaagatgtttgcgccgagcgaagctagtttcttgtaatgttatccataccatctcccattggcttcgcaggtgggctatgctacagaagtcagattctcgcctttttataatggaggctac

SEQ ID NO: 75193 - DNA, 3393 bp, Zea Mays
ccaaccggcccttggtcgtggcgtcgctgtccgagcgccagacaagagacaggggagatgaaaaagaggcggtggtggttcgagtgtgaatatgccggtggggagggctctgcctccccaggatacttcgccccccgttccaccgcgagcccttccggcttccgcctctgttccgccgctccagcctccaggatccgtgagaggaaaagtagtagccccatccccaaccggtcctaacccacggtacccaatacttgactcggctctctccatgagctactgttccatctccatttcttcaatcatttctcgcctttcatgttcaagggcgttgcttgccaaccacggtatcgttctagccgccggggccgaacgaagtcggggatgtaattgaatccagcgatctttggatgctcgtcatacgtgccaacagcagggtcaatttccctcgaaagagaaggccgaggaaatggaagccggtttcctgtggaaagagatcggtgaccaagccggtgcggcgagaatgtccggtgggaacaagaacaggagcctcgactgggatttgaacgactggaggtgggacgccaacctgttcctggccacaccagcggccgccgcgccatccgagtccatcagcagggagctgagccgaggtcagggggagatcgatttcggcgtcgtcgttgacaagaggcggcggctctcaccagaggaggacggcagcggtgggtgcagcaattctgcggtagcagatggagacaacagtcacgtggtgtgtgttcagagagggcggaacactgaggagacgagacccaggaaaggtgccaattcgagcaccactccttcttgccaggttgacggctgccaagctgatcttagtggtgccagggactaccataagaggcacaaggtgtgtgaagcgcataccaggacaacagtggtctgcatcaataatgtagagcatcggttctgtcagcagtgcagcaggtttcaccttcttcacgaatttgatgatggtaagaagagctgccgatcacgtctggcacaacataatggaaggagaaggaaagttcaaccgcaacctgctgtgaacgggaattccatgaatgaagatcagtctctaagtagcaccttattccttctgttaaaacaactttccgggctcgagtctggtagctcttctgagcaaatcaaccatcctaattctttggttaaccttttgaagaaccttgctgctattgctagcacacatgcatatcaagatgttctaaagaatgcaacttcaatatcatcaaatgatggtaataatgctgcaaatggctctataatgcatgagcaaaccatacggtcaattcctgtcaggagagaatcattagcaggtaaagcactttatcgtttacttgattctatttagcatgtcaaatatcaaaggtataaataaaatgatttgaataacttgtgttctcagaagagcctgcggtgaaaagacgagtacaggactttgatttgaacgattcatgcattgaagaagccgagagccgaacagataaaattgtgttcaaactctttggaaaagagccaaaagattttcctgtagatctacgggaacagatcctaaactggttgtcgcattatccaactgatatggaaagttatattagacctggttgtgttattctaactatttaccttcacctccctaattggatgtgggatgagtttaatgatgacccagcttcatggatagaaaatcttattagcttatccaatgatggattctggagaacaggatggttgtatgctagggtagtcttatgtttgcatctccctggcaaccggtaattggtgacaagcatcagagactgtgtgtaactccaattgcagttgattgttcttcgtcagtaaaattctctgtgaaaggtttcaatatagttcagccaaccacaaaattactttgtgtgtttgatgaaaaatatttaattcaagaagagacacaaatgctacttgaagattcaactatgcagcaaggccctcaatgcctgaccttctcttgttcctttccttgtacaagtggaagaggattcatagagattgaagactatgatcaaagcagcctttctgttccctttgttgtcacggacaaagatgtatgttctgagattcggatgttggagcatggattggatttagtttcatttgatcaaacctccaaaagaatagatgatctgatgatttatcgcagtcgagcattacattttttgcatgaaatcggatggcttcttcaaaggagccatgtgcgagctacgtctgagcagcgacaatattgtcctgaccgcttccctgttgcaagatttagatggctgctatcctttgcagttgatcaggaatggtgtgctgttctaaggaagcttctgaacaccatgttccagggtgatattgatgtattgtcaccaattgaatttgccttgggagaaaatctattgcatactgcggtcaaaaaacgctcaaagcctttagttgaatttctattaagatacaccacaacaaatattgctccagtgggcggtggagatggtgctccagttcagttcttgttcactcctgcgatgactgaactgtcaaatatcacacctcttcatattgcagccacaatcagtgatgctattggtgttttagatgctttaactgatgatcctcagcagttgggaatcaaagcgtggaagaatgctcgtgacgccactggcttcactcctgaggaatatgctgcaaagagaggcaacatatcctatattcaaatggtacaggacaaaattgacagaagggtgaccagagctcatgtctcggttaccatccccagcacaattgatactgtcggaaagcatggtagccgaatgaagcctgccgatcaaatcacatttggtgttgagaaaaaacaactaagcatcaaccaaacattgagctgcagacagtgtgtccagcaggcccagcagcttgcattccatccccggacaaataggtttctgtctaataggactgcgatgctttccttggtctccattgctgccgtctgcgtctgtgtgggattgatcatgaagagcctgccacaagttggttgtatgaagcctttcctctgggacaatatacgttggggccccaattgatagactgcagaagagccagcccgattgtatcagtgtatgatgaagatgtttgcgccgagcgaagctagtttcttgtaatgtacatgtttcttatactaaatgtctaacttatttctgtttatagtaaaacctgtgaacttgcctagcttgtaactccattgcatttgcatcctgactgaagtaaagcttttacttgttttggttgagaggaagaaaaccttttacttctaaa

SEQ ID NO: 75194 - DNA, 3142 bp, Zea Mays
ccaaccggcccttggtcgtggcgtcgctgtccgagcgccagacaagagacaggggagatgaaaaagaggcggtggtggttcgagtgtgaatatgccggtggggagggctctgcctccccaggatacttcgccccccgttccaccgcgagcccttccggcttccgcctctgttccgccgctccagcctccaggatccgtgagaggaaaagtagtagccccatccccaaccggtcctaacccacggtacccaatacttgactcggctctctccatgagctactgttccatctccatttcttcaatcatttctcgcctttcatgttcaagggcgttgcttgccaaccacggtatcgttctagccgccggggccgaacgaagtcggggatgtaattgaatccagcgatctttggatgctcgtcatacgtgccaacagcagggtcaatttccctcgaaagagaaggccgaggaaatggaagccggtttcctgtggaaagagatcggtgaccaagccggtgcggcgagaatgtccggtgggaacaagaacaggagcctcgactgggatttgaacgactggaggtgggacgccaacctgttcctggccacaccagcggccgccgcgccatccgagtccatcagcagggagctgagccgaggtcagggggagatcgatttcggcgtcgtcgttgacaagaggcggcggctctcaccagaggaggacggcagcggtgggtgcagcaattctgcggtagcagatggagacaacagtcacgtggtgtgtgttcagagagggcggaacactgaggagacgagacccaggaaaggtgccaattcgagcaccactccttcttgccaggttgacggctgccaagctgatcttagtggtgccagggactaccataagaggcacaaggtgtgtgaagcgcataccaggacaacagtggtctgcatcaataatgtagagcatcggttctgtcagcagtgcagcaggtttcaccttcttcacgaatttgatgatggtaagaagagctgccgatcacgtctggcacaacataatggaaggagaaggaaagttcaaccgcaacctgctgtgaacgggaattccatgaatgaagatcagtctctaagtagcaccttattccttctgttaaaacaactttccgggctcgagtctggtagctcttctgagcaaatcaaccatcctaattctttggttaaccttttgaagaaccttgctgctattgctagcacacatgcatatcaagatgttctaaagaatgcaacttcaatatcatcaaatgatggtaataatgctgcaaatggctctataatgcatgagcaaaccatacggtcaattcctgtcaggagagaatcattagcaggtaaagcactttatcgtttacttgattctatttagcatgtcaaatatcaaaggtataaataaaatgatttgaataacttgtgttctcagaagagcctgcggtgaaaagacgagtacaggactttgatttgaacgattcatgcattgaagaagccgagagccgaacagataaaattgtgttcaaactctttggaaaagagccaaaagattttcctgtagatctacgggaacagatcctaaactggttgtcgcattatccaactgatatggaaagttatattagacctggttgtgttattctaactatttaccttcacctccctaattggatgtgggatgagtttaatgatgacccagcttcatggatagaaaatcttattagcttatccaatgatggattctggagaacaggatggttgtatgctagggtacaggactgcctaacactgagttgcaatggtagtcttatgtttgcatctccctggcaaccggtaattggtgacaagcatcagagactgtgtgtaactccaattgcagttgattgttcttcgtcagtaaaattctctgtgaaaggtttcaatatagttcagccaaccacaaaattactttgtgtgtttgatgaaaaatatttaattcaagaagagacacaaatgctacttgaagattcaactatgcagcaaggccctcaatgcctgaccttctcttgttcctttccttgtacaagtggaagaggattcatagagattgaagactatgatcaaagcagcctttctgttccctttgttgtcacggacaaagatggtgatattgatgtattgtcaccaattgaatttgccttgggagaaaatctattgcatactgcggtcaaaaaacgctcaaagcctttagttgaatttctattaagatacaccacaacaaatattgctccagtgggcggtggagatggtgctccagttcagttcttgttcactcctgcgatgactgaactgtcaaatatcacacctcttcatattgcagccacaatcagtgatgctattggtgttttagatgctttaactgatgatcctcagcagttgggaatcaaagcgtggaagaatgctcgtgacgccactggcttcactcctgaggaatatgctgcaaagagaggcaacatatcctatattcaaatggtacaggacaaaattgacagaagggtgaccagagctcatgtctcggttaccatccccagcacaattgatactgtcggaaagcatggtagccgaatgaagcctgccgatcaaatcacatttggtgttgagaaaaaacaactaagcatcaaccaaacattgagctgcagacagtgtgtccagcaggcccagcagcttgcattccatccccggacaaataggtttctgtctaataggactgcgatgctttccttggtctccattgctgccgtctgcgtctgtgtgggattgatcatgaagagcctgccacaagttggttgtatgaagcctttcctctgggacaatatacgttggggccccaattgatagactgcagaagagccagcccgattgtatcagtgtatgatgaagatgtttgcgccgagcgaagctagtttcttgtaatgtacatgtttcttatactaaatgtctaacttatttctgtttatagtaaaacctgtgaacttgcctagcttgtaactccattgcatttgcatcctgactgaagtaaagcttttacttgttttggttgagaggaagaaaaccttttacttctaaa

SEQ ID NO: 75195 - DNA, 3287 bp, Zea Mays
ccaaccggcccttggtcgtggcgtcgctgtccgagcgccagacaagagacaggggagatgaaaaagaggcggtggtggttcgagtgtgaatatgccggtggggagggctctgcctccccaggatacttcgccccccgttccaccgcgagcccttccggcttccgcctctgttccgccgctccagcctccaggatccgtgagaggaaaagtagtagccccatccccaaccggtcctaacccacggtacccaatacttgactcggctctctccatgagctactgttccatctccatttcttcaatcatttctcgcctttcatgttcaagggcgttgcttgccaaccacggtatcgttctagccgccggggccgaacgaagtcggggatgtaattgaatccagcgatctttggatgctcgtcatacgtgccaacagcagggtcaatttccctcgaaagagaaggccgaggaaatggaagccggtttcctgtggaaagagatcggtgaccaagccggtgcggcgagaatgtccggtgggaacaagaacaggagcctcgactgggatttgaacgactggaggtgggacgccaacctgttcctggccacaccagcggccgccgcgccatccgagtccatcagcagggagctgagccgaggtcagggggagatcgatttcggcgtcgtcgttgacaagaggcggcggctctcaccagaggaggacggcagcggtgggtgcagcaattctgcggtagcagatggagacaacagtcacgtggtgtgtgttcagagagggcggaacactgaggagacgagacccaggaaagggactaccataagaggcacaaggtgtgtgaagcgcataccaggacaacagtggtctgcatcaataatgtagagcatcggttctgtcagcagtgcagcaggtttcaccttcttcacgaatttgatgatggtaagaagagctgccgatcacgtctggcacaacataatggaaggagaaggaaagttcaaccgcaacctgctgtgaacgggaattccatgaatgaagatcagtctctaagtagcaccttattccttctgttaaaacaactttccgggctcgagtctggtagctcttctgagcaaatcaaccatcctaattctttggttaaccttttgaagaaccttgctgctattgctagcacacatgcatatcaagatgttctaaagaatgcaacttcaatatcatcaaatgatggtaataatgctgcaaatggctctataatgcatgagcaaaccatacggtcaattcctgtcaggagagaatcattagcaggtaaagcactttatcgtttacttgattctatttagcatgtcaaatatcaaaggtataaataaaatgatttgaataacttgtgttctcagaagagcctgcggtgaaaagacgagtacaggactttgatttgaacgattcatgcattgaagaagccgagagccgaacagataaaattgtgttcaaactctttggaaaagagccaaaagattttcctgtagatctacgggaacagatcctaaactggttgtcgcattatccaactgatatggaaagttatattagacctggttgtgttattctaactatttaccttcacctccctaattggatgtgggatgaggatggttgtatgctagggtacaggactgcctaacactgagttgcaatggtagtcttatgtttgcatctccctggcaaccggtaattggtgacaagcatcagagactgtgtgtaactccaattgcagttgattgttcttcgtcagtaaaattctctgtgaaaggtttcaatatagttcagccaaccacaaaattactttgtgtgtttgatgaaaaatatttaattcaagaagagacacaaatgctacttgaagattcaactatgcagcaaggccctcaatgcctgaccttctcttgttcctttccttgtacaagtggaagaggattcatagagattgaagactatgatcaaagcagcctttctgttccctttgttgtcacggacaaagatgtatgttctgagattcggatgttggagcatggattggatttagtttcatttgatcaaacctccaaaagaatagatgatctgatgatttatcgcagtcgagcattacattttttgcatgaaatcggatggcttcttcaaaggagccatgtgcgagctacgtctgagcagcgacaatattgtcctgaccgcttccctgttgcaagatttagatggctgctatcctttgcagttgatcaggaatggtgtgctgttctaaggaagcttctgaacaccatgttccagggtgatattgatgtattgtcaccaattgaatttgccttgggagaaaatctattgcatactgcggtcaaaaaacgctcaaagcctttagttgaatttctattaagatacaccacaacaaatattgctccagtgggcggtggagatggtgctccagttcagttcttgttcactcctgcgatgactgaactgtcaaatatcacacctcttcatattgcagccacaatcagtgatgctattggtgttttagatgctttaactgatgatcctcagcagttgggaatcaaagcgtggaagaatgctcgtgacgccactggcttcactcctgaggaatatgctgcaaagagaggcaacatatcctatattcaaatggtacaggacaaaattgacagaagggtgaccagagctcatgtctcggttaccatccccagcacaattgatactgtcggaaagcatggtagccgaatgaagcctgccgatcaaatcacatttggtgttgagaaaaaacaactaagcatcaaccaaacattgagctgcagacagtgtgtccagcaggcccagcagcttgcattccatccccggacaaataggtttctgtctaataggactgcgatgctttccttggtctccattgctgccgtctgcgtctgtgtgggattgatcatgaagagcctgccacaagttggttgtatgaagcctttcctctgggacaatatacgttggggccccaattgatagactgcagaagagccagcccgattgtatcagtgtatgatgaagatgtttgcgccgagcgaagctagtttcttgtaatgtacatgtttcttatactaaatgtctaacttatttctgtttatagtaaaacctgtgaacttgcctagcttgtaactccattgcatttgcatcctgactgaagtaaagcttttacttgttttggttgagaggaagaaaaccttttacttctaaa

SEQ ID NO: 75196 - DNA, 1571 bp, Zea Mays
gagaagtgagaatctcctaggaaagagaaacaacgaagactcgaaacgagtacaccaacctttctttctctcctctcgcttctgcggcgaattttcttgtcccgtgccggccgccgtgtctaccctgcgccaccgccccttccaacgcctgccgtgaagacaaaagtttacgaacataccgtcggctctaggaaatgttttagagcgaaagtgaagtgaggagaaggttacactcaacaattgcttggccctccaaaaaggtcttggttaagtttgaagatgtcgtgcttggcatgctgtggcggcgaagatactcaaagaacacctgataatggaggtccataccctggtggctacccaccaagggatgatgcttatcgcacagctgatccaactccgaggggtgctcaacctttgaaaatgcagccaatcactgtccccactattcctgtagaagaaattagggaggtcacagtggcttttggtgatgaagctttgattggtgaggggtcttttggcagagtatattttggtgtactaaaaaatggtaggagtgcagcgataaaaaagttagattcaagcaagcagccagagcaagagtttttggcacaggtatccatggtgtcaaggcttaagcatggcaatgtcgtagagttgcttggttactgtgttgatggaaacacccgcatccttgcatatgaatttgctactatgggttctcttcacgatatgcttcatggacgcaaaggtgtgaaaggagctcagcctggtccagtcctgtcctggacacaacgagtgaagattgctgttggagcagcaaaaggccttgagtatcttcatgagaaagcgcagcctcatattatacacagggacatcaagtccagtaatgttcttctatttgatgacgacgtatctaaaatagctgattttgatttgtcaaaccaagctccggatatggcagctcgacttcattcgaccagagttcttggaacatttggctatcatgcacctgagtatgcaatgactggacaacttagctctaagagtgacgtttacagttttggagttgttcttctggagctcctgactggaagaaagcctgtggatcatacattaccaagaggacagcaaagtcttgtgacatgggcaactccacggctttgtgaagataaagttaggcaatgcgttgattcaagacttggagtagaatatcctcctaaatccgttgcaaagtttgcagctgttgctgcactgtgtgtgcaatatgaagctgactttcgacccaacatgagcatcgtggtgaaggcgcttcagcccctgctgaatgcacgtgcatccaacaaccctggatgaatgaatgaatgactgccgttgcttttccctgacgagagtatctgaatcagacaacatgtagcattgaattcagataaatatagtgtttggcttaatacacttggccctagatgttcatcaggagataacctcttgcagtttctggatgttacctagtctttgtatccctaaactgtaacctattgttcggttgcgttccatctggtgttgtttacatc

SEQ ID NO: 75197 - DNA, 1257 bp, Zea Mays
atgccctcaagcttatgcccacgcgagtgagaagtgagaatctcctaggaaagagaaacaacgaagactcgaaacgagtacaccaacctttctttctctcctctcgcttctgcggcgaattttcttgtcccgtgccggccgccgtgtctaccctgcgccaccgccccttccaacgcctgccgtgaagacaaaaggtcttggttaagtttgaagatgtcgtgcttggcatgctgtggcggcgaagatactcaaagaacacctgataatggaggtccataccctggtggctacccaccaagtatccatggtgtcaaggcttaagcatggcaatgtcgtagagttgcttggttactgtgttgatggaaacacccgcatccttgcatatgaatttgctactatgggttctcttcacgatatgcttcatggacgcaaaggtgtgaaaggagctcagcctggtccagtcctgtcctggacacaacgagtgaagattgctgttggagcagcaaaaggccttgagtatcttcatgagaaagcgcagcctcatattatacacagggacatcaagtccagtaatgttcttctatttgatgacgacgtatctaaaatagctgattttgatttgtcaaaccaagctccggatatggcagctcgacttcattcgaccagagttcttggaacatttggctatcatgcacctgagtatgcaatgactggacaacttagctctaagagtgacgtttacagttttggagttgttcttctggagctcctgactggaagaaagcctgtggatcatacattaccaagaggacagcaaagtcttgtgacatgggcaactccacggctttgtgaagataaagttaggcaatgcgttgattcaagacttggagtagaatatcctcctaaatccgttgcaaagtttgcagctgttgctgcactgtgtgtgcaatatgaagctgactttcgacccaacatgagcatcgtggtgaaggcgcttcagcccctgctgaatgcacgtgcatccaacaaccctggatgaatgaatgaatgactgccgttgcttttccctgacgagagtatctgaatcagacaacatgtagcattgaattcagataaatatagtgtttggcttaatacacttggccctagatgttcatcaggagataacctcttgcagtttctggatgttacctagtctttgtatccctaaactgtaacctattgttcggttgcgttccatctggtgttgtttacatc

SEQ ID NO: 75198 - DNA, 4058 bp, Zea Mays
accgtggctccgcccccgagattgtcgcgcccacagcctcgcctcccatggatcctctcgcctctgcatctcgccattgttgccgccattctcgcgcccgtgcccctccattctcgcctccgcccccggatcctctcgcccccgcgaccttcgatggaagcccgcaatctgcgcccttccatcgccgcaatgcatcgatcccattccattttgcgagaagggcgggcgcgtgcagggcttcgcaatggctgacggttcaattggaagatcaaccacagggagtaggactcctaaatgagccgccaactgttcttctccttcccaatcatcggcaatcccacacgctctggtggctaaggctgcgggattcccaggtgcagcgtgctggggtcgcccaggcacggagtcggccaccacgcagcagccgtcgcccctccacctcgttgtcgtccgtccatgatcttgttgtggttcatgagcactgagctatacttcaacttaactgattcagcccttggctttctgggcatgtttgacaaagttgaatagctatgaaaccgaaaacaactgccaaatgtacatgttctgaatcaagttatgatgctaatgtctcagcgaatgtacatgttctgaatcaagcaatggcgaattttgaagcccactttagattaatcggtatatatggatacagtagcatgtgttcaaatgatgcttatttctcaacgaatagtagcaatcattggtcaggacatgtagcttaatgctatcttgttgttattacatgggtgtcgtaacaccttgccgactgttcataaacgcaggacctgagatctagaaggacacaacaggcaaggtggatgtattcgtagctggttcaggcacagaaggcatagtttattgtttcttttacattcagtttactgcttcttaaggaattattcaactaggaacatgtactgaatatgggattcaggttgaaataaagcgtatattttctgtttgttggtgaatgtaaatgaagataaatatgacctttgctcttagcctttctgtcattctttttttaatatgatcatgagaatgtgagtgaattatggcaacatgacctgcaagtcatcataacaaggaataatatttataatgttttaattggagctacacacaagagtgtttcaaataacctatcttggtctgtatctacatgcattttattaaagtttcttgtattggttcgctttaactgctatttgttttagttttttctattgctgcaatatgtgaaattgcaaacatgtgggatgtgtttgactgctacgaatacgacattgctaatagtggcaagaatccaacagagcgtctagctcactaaaagcaaaacctttggcgccatttaggttagttttttctttatatttgtgaggaaaatctcaattttaatattttgaacatgttccatattttttagaatctcaggcttacatgttgctgctgcttcacaaattgactaccttttgtccatttatagtggttgaacaatttacccttatgtattagagtttctattacaacattcttaccggagtcagctgttaaagagaaggttggcaaaactataaacctataacacctttagaaggggtataaagtggcaaaacatatttaatgtatctagatttttataggagctctcccggtggtagcatctttgaggaaggtggtgatgaaaactgaaatcttgtctcctaactccttaattcctgaacagggtcgttttgagatactctctgtctgggtcgtttcttcaataagataacggtggccatcatagtcgaattggtgggcctgctagcgtccccaatggtcgtgtcctggcctgtgtggtagtgttgccggacttctgatagttgcttcgccagtacagatcatagtggaaccatcatggatgtttaatattgcagtccaaggtaagaaagtattgcagaaccaagcacaaaagcatccaggaagaaaaatagaagggacaagctgaatgagagaggtatgtgccctggtgagacaaatcattttagttcttagatataatacttgcatcattgtctaagctggtagcatcgtagatatattttttatccaaataatgattgtgctcatgtaaaccatgccaaatattattctacaatgaatagcccatcgctgaaaaatgcagaaatcaagaagagcttttaccattgcattgcaaagtccacatgttcgacgattcggtcttatgatttgtttagaattttgtttcacttattaacaacttattacatgtatgggttattggttatgaacctatctaaaagttgaattttaaattaattgtaccttttgtcatggacaaaatttggttatccttgaaatgttaacctggtacctagcataataagatgttttgctggttttaaccaaagtggtcaagtttgttagtataagcatgccacgggcagccaaccatacttcatgttaaacattataaaaatgatactgtattgattagcattatcttttcatttttacatgaaaaatcttgttgcattttttctggtggtttttttctaagcttctacccaggcttacttcatgtgtgtcaccatttaaaaagctaatacattttgtttgtggtgccacaggaattaggtcagcaattttgaagttgggttaaggtttttgacacttccatcattccctccatctccctgtttacatatttgtcatatcactccctaattatttagttgggatctcggtaattgctacttgtaatagagctctacacgccaatcttgttacacttttttacctcatagtgatctttgtgtattgcgcacaacattatgtaccttactacgttttctcagtaattgctacttgtaatagagctctacacgccaatcttgttacacttttttacctcatagtgatctttgtgcattgcccacaacatcatgtaccttactacgttttcctgcttattgaaatcctgtgagccctactcagtttttacctatcttttgattttacccatggagaaatattggctgggtgactgccatgaaggcatgaaccttaaaaaaagtttgttttttcaattctaaatatcttgtgacttatttatattgagcatgtgtttacaaataatgttctcatcagctcatgtggtattttaagctcgcctctacatggacgccggcctcgcttccgcagtcaccatgctccggacctgcaccgatgtcgtgcacctcgcgcacgttctcgagcagtttcgccttgcctggtgcggcaagctcgttcgggacacccgcgccgtcgctccgtcaagggcctctgcttcgacctcttcatcattaggggtggaaacagagctttcaatgtatgctggaggtgagcgatgtgatcgatattatccatgcttgataaattatgacaatggtgatggccatgatatatggtcaggttctatccggacatccggagaactgggcaccggtgatcggatggcggcctccggcgctaagatctggcggtcacaacctagccgcgccgtcgacgaggttttcgcctgtgattccataattcgaggaagagccgtgctgctcgcagcaccggtaccgcccccgttggcgcggacgcctgccatcggccgcgagctgttgatgggggaaacaaaaataggaagggacatcggagacaatccctgccgcgttcatcctttattaacgagcagaaaccatggttcgggacttcagaacccaaagcttatgggaaaccttaatggattcaatgtcgcacctgagaagtagaacaactctctataactaggagagaggtctaaatggttcaaccatctcttgagcacttttatttccctcatttaatttgtaatcctcccctttctctttagctaggagatccttagatattttgaaccacgtcgtctaagctcttggattttttaagaaagtatgattgtaaccacactcagccatcgtggcgtttcatcttgttcaaaatctgat

SEQ ID NO: 75199 - DNA, 3169 bp, Zea Mays
cgcctctgcatctcgccattgttgccgccattctcgcgcccgtgcccctccattctcgcctccgcccccggatcctctcgcccccgcgaccttcgatggaagcccgcaatctgcgcccttccatcgccgcaatgcatcgatcccattccattttgcgagaagggcgggcgcgtgcagggcttcgcaatggctgacggttcaattggaagatcaaccacagggagtaggactcctaaatgagccgccaactgttcttctccttcccaatcatcggcaatcccacacgctctggtggctaaggctgcgggattcccaggtgcagcgtgctggggtcgcccaggcacggagtcggccaccacgcagcagccgtcgcccctccacctcgttgtcgtccgtccatgatcttgttgtggttcatgagcactgagctatacttcaacttaactgattcagcccttggctttctgggcatgtttgacaaagttgaatagctatgaaaccgaaaacaactgccaaatgtacatgttctgaatcaagacctgagatctagaaggacacaacaggcaaggtggatgtattcgtagctggttcaggcacagaagggtcgttttgagatactctctgtctgggtcgtttcttcaataagataacggtggccatcatagtcgaattggtgggcctgctagcgtccccaatggtcgtgtcctggcctgtgtggtagtgttgccggacttctgatagttgcttcgccagtacagatcatagtggaaccatcatggatgtttaatattgcagtccaaggtaagaaagtattgcagaaccaagcacaaaagcatccaggaagaaaaatagaagggacaagctgaatgagagaggtatgtgccctggtgagacaaatcattttagttcttagatataatacttgcatcattgtctaagctggtagcatcgtagatatattttttatccaaataatgattgtgctcatgtaaaccatgccaaatattattctacaatgaatagcccatcgctgaaaaatgcagaaatcaagaagagcttttaccattgcattgcaaagtccacatgttcgacgattcggtcttatgatttgtttagaattttgtttcacttattaacaacttattacatgtatgggttattggttatgaacctatctaaaagttgaattttaaattaattgtaccttttgtcatggacaaaatttggttatccttgaaatgttaacctggtacctagcataataagatgttttgctggttttaaccaaagtggtcaagtttgttagtataagcatgccacgggcagccaaccatacttcatgttaaacattataaaaatgatactgtattgattagcattatcttttcatttttacatgaaaaatcttgttgcattttttctggtggtttttttctaagcttctacccaggcttacttcatgtgtgtcaccatttaaaaagctaatacattttgtttgtggtgccacaggaattaggtcagcaattttgaagttgggttaaggtttttgacacttccatcattccctccatctccctgtttacatatttgtcatatcactccctaattatttagttgggatctcggtaattgctacttgtaatagagctctacacgccaatcttgttacacttttttacctcatagtgatctttgtgtattgcgcacaacattatgtaccttactacgttttctcagtaattgctacttgtaatagagctctacacgccaatcttgttacacttttttacctcatagtgatctttgtgcattgcccacaacatcatgtaccttactacgttttcctgcttattgaaatcctgtgagccctactcagtttttacctatcttttgattttacccatggagaaatattggctgggtgactgccatgaaggcatgaaccttaaaaaaagtttgttttttcaattctaaatatcttgtgacttatttatattgagcatgtgtttacaaataatgttctcatcagctcatgtggtattttaagctcgcctctacatggacgccggcctcgcttccgcagtcaccatgctccggacctgcaccgatgtcgtgcacctcgcgcacgttctcgagcagtttcgccttgcctggtgcggcaagctcgttcgggacacccgcgccgtcgctccgtcaagggcctctgcttcgacctcttcatcattaggggtggaaacagagctttcaatgtatgctggaggtgagcgatgtgatcgatattatccatgcttgataaattatgacaatggtgatggccatgatatatggtcaggttctatccggacatccggagaactgggcaccggtgatcggatggcggcctccggcgctaagatctggcggtcacaacctagccgcgccgtcgacgaggttttcgcctgtgattccataattcgaggaagagccgtgctgctcgcagcaccggtaccgcccccgttggcgcggacgcctgccatcggccgcgagctgttgatgggggaaacaaaaataggaagggacatcggagacaatccctgccgcgttcatcctttattaacgagcagaaaccatggttcgggacttcaggtgcagatgggggacggaggccgggcaacgcaactaactaacccaacaaaggcaaccaaccactactcgcccgttcctcctgctgctcagctcatgctcctgagtcctgcctggatggtctctttcctttgaaactgggcaatgtttggaccaaccaaccaacaaccgagatggtacgtaccatgcaatgcatgttgcatgcggcactgcactggtatgtaactgtaacgttgtactctccctgactgacacgacttgcatgctctagcccaggttattcgtcccggaggataggacgcttgggcttacatcagcctccgagtcgatcggccggtggtcaactaatgaaacccgtttcatttttgaactaatgaaagagagtatatattagtgaaaaaggtacataaacggaatattatttatttcttcacgtaacaaaaaagtgcataacatgctacgaaaagacaaagtaaaaatatatgtatgtatgaaaccccatgcatgtgctaattattgcaagttttataaaattagtgggtgtgca

SEQ ID NO: 75200 - DNA, 4332 bp, Zea Mays
accgtggctccgcccccgagattgtcgcgcccacagcctcgcctcccatggatcctctcgcctctgcatctcgccattgttgccgccattctcgcgcccgtgcccctccattctcgcctccgcccccggatcctctcgcccccgcgaccttcgatggaagcccgcaatctgcgcccttccatcgccgcaatgcatcgatcccattccattttgcgagaagggcgggcgcgtgcagggcttcgcaatggctgacggttcaattggaagatcaaccacagggagtaggactcctaaatgagccgccaactgttcttctccttcccaatcatcggcaatcccacacgctctggtggctaaggctgcgggattcccaggtgcagcgtgctggggtcgcccaggcacggagtcggccaccacgcagcagccgtcgcccctccacctcgttgtcgtccgtccatgatcttgttgtggttcatgagcactgagctatacttcaacttaactgattcagcccttggctttctgggcatgtttgacaaagttgaatagctatgaaaccgaaaacaactgccaaatgtacatgttctgaatcaagttatgatgctaatgtctcagcgaatgtacatgttctgaatcaagcaatggcgaattttgaagcccactttagattaatcggtatatatggatacagtagcatgtgttcaaatgatgcttatttctcaacgaatagtagcaatcattggtcaggacatgtagcttaatgctatcttgttgttattacatgggtgtcgtaacaccttgccgactgttcataaacgcaggacctgagatctagaaggacacaacaggcaaggtggatgtattcgtagctggttcaggcacagaaggcatagtttattgtttcttttacattcagtttactgcttcttaaggaattattcaactaggaacatgtactgaatatgggattcaggttgaaataaagcgtatattttctgtttgttggtgaatgtaaatgaagataaatatgacctttgctcttagcctttctgtcattctttttttaatatgatcatgagaatgtgagtgaattatggcaacatgacctgcaagtcatcataacaaggaataatatttataatgttttaattggagctacacacaagagtgtttcaaataacctatcttggtctgtatctacatgcattttattaaagtttcttgtattggttcgctttaactgctatttgttttagttttttctattgctgcaatatgtgaaattgcaaacatgtgggatgtgtttgactgctacgaatacgacattgctaatagtggcaagaatccaacagagcgtctagctcactaaaagcaaaacctttggcgccatttaggttagttttttctttatatttgtgaggaaaatctcaattttaatattttgaacatgttccatattttttagaatctcaggcttacatgttgctgctgcttcacaaattgactaccttttgtccatttatagtggttgaacaatttacccttatgtattagagtttctattacaacattcttaccggagtcagctgttaaagagaaggttggcaaaactataaacctataacacctttagaaggggtataaagtggcaaaacatatttaatgtatctagatttttataggagctctcccggtggtagcatctttgaggaaggtggtgatgaaaactgaaatcttgtctcctaactccttaattcctgaacagggtcgttttgagatactctctgtctgggtcgtttcttcaataagataacggtggccatcatagtcgaattggtgggcctgctagcgtccccaatggtcgtgtcctggcctgtgtggtagtgttgccggacttctgatagttgcttcgccagtacagatcatagtggaaccatcatggatgtttaatattgcagtccaaggtaagaaagtattgcagaaccaagcacaaaagcatccaggaagaaaaatagaagggacaagctgaatgagagaggtatgtgccctggtgagacaaatcattttagttcttagatataatacttgcatcattgtctaagctggtagcatcgtagatatattttttatccaaataatgattgtgctcatgtaaaccatgccaaatattattctacaatgaatagcccatcgctgaaaaatgcagaaatcaagaagagcttttaccattgcattgcaaagtccacatgttcgacgattcggtcttatgatttgtttagaattttgtttcacttattaacaacttattacatgtatgggttattggttatgaacctatctaaaagttgaattttaaattaattgtaccttttgtcatggacaaaatttggttatccttgaaatgttaacctggtacctagcataataagatgttttgctggttttaaccaaagtggtcaagtttgttagtataagcatgccacgggcagccaaccatacttcatgttaaacattataaaaatgatactgtattgattagcattatcttttcatttttacatgaaaaatcttgttgcattttttctggtggtttttttctaagcttctacccaggcttacttcatgtgtgtcaccatttaaaaagctaatacattttgtttgtggtgccacaggaattaggtcagcaattttgaagttgggttaaggtttttgacacttccatcattccctccatctccctgtttacatatttgtcatatcactccctaattatttagttgggatctcggtaattgctacttgtaatagagctctacacgccaatcttgttacacttttttacctcatagtgatctttgtgtattgcgcacaacattatgtaccttactacgttttctcagtaattgctacttgtaatagagctctacacgccaatcttgttacacttttttacctcatagtgatctttgtgcattgcccacaacatcatgtaccttactacgttttcctgcttattgaaatcctgtgagccctactcagtttttacctatcttttgattttacccatggagaaatattggctgggtgactgccatgaaggcatgaaccttaaaaaaagtttgttttttcaattctaaatatcttgtgacttatttatattgagcatgtgtttacaaataatgttctcatcagctcatgtggtattttaagctcgcctctacatggacgccggcctcgcttccgcagtcaccatgctccggacctgcaccgatgtcgtgcacctcgcgcacgttctcgagcagtttcgccttgcctggtgcggcaagctcgttcgggacacccgcgccgtcgctccgtcaagggcctctgcttcgacctcttcatcattaggggtggaaacagagctttcaatgtatgctggaggtgagcgatgtgatcgatattatccatgcttgataaattatgacaatggtgatggccatgatatatggtcaggttctatccggacatccggagaactgggcaccggtgatcggatggcggcctccggcgctaagatctggcggtcacaacctagccgcgccgtcgacgaggttttcgcctgtgattccataattcgaggaagagccgtgctgctcgcagcaccggtaccgcccccgttggcgcggacgcctgccatcggccgcgagctgttgatgggggaaacaaaaataggaagggacatcggagacaatccctgccgcgttcatcctttattaacgagcagaaaccatggttcgggacttcaggtgcagatgggggacggaggccgggcaacgcaactaactaacccaacaaaggcaaccaaccactactcgcccgttcctcctgctgctcagctcatgctcctgagtcctgcctggatggtctctttcctttgaaactgggcaatgtttggaccaaccaaccaacaaccgagatggtacgtaccatgcaatgcatgttgcatgcggcactgcactggtatgtaactgtaacgttgtactctccctgactgacacgacttgcatgctctagcccaggttattcgtcccggaggataggacgcttgggcttacatcagcctccgagtcgatcggccggtggtcaactaatgaaacccgtttcatttttgaactaatgaaagagagtatatattagtgaaaaaggtacataaacggaatattatttatttcttcacgtaacaaaaaagtgcataacatgctacgaaaagacaaagtaaaaatatatgtatgtatgaaaccccatgcatgtgctaattattgcaagttttataaaattagtgggtgtgca

SEQ ID NO: 75201 - DNA, 3399 bp, Zea Mays
accgtggctccgcccccgagattgtcgcgcccacagcctcgcctcccatggatcctctcgcctctgcatctcgccattgttgccgccattctcgcgcccgtgcccctccattctcgcctccgcccccggatcctctcgcccccgcgaccttcgatggaagcccgcaatctgcgcccttccatcgccgcaatgcatcgatcccattccattttgcgagaagggcgggcgcgtgcagggcttcgcaatggctgacggttcaattggaagatcaaccacagggagtaggactcctaaatgagccgccaactgttcttctccttcccaatcatcggcaatcccacacgctctggtggctaaggctgcgggattcccaggtgcagcgtgctggggtcgcccaggcacggagtcggccaccacgcagcagccgtcgcccctccacctcgttgtcgtccgtccatgatgcagaggagaggggttggccctctttgctatttagagaggttacaggctcattgcagttatgccgactaaatactcgcttgtcatgcagatcttgttgtggttcatgagcactgagctatacttcaacttaactgattcagcccttggctttctgggcatgtttgacaaagttgaatagctatgaaaccgaaaacaactgccaaatgtacatgttctgaatcaagttatgatgctaatgtctcagcgaatgtacatgttctgaatcaagcaatggcgaattttgaagcccactttagattaatcggacctgagatctagaaggacacaacaggcaaggtggatgtattcgtagctggttcaggcacagaagggtcgttttgagatactctctgtctgggtcgtttcttcaataagataacggtggccatcatagtcgaattggtgggcctgctagcgtccccaatggtcgtgtcctggcctgtgtggtagtgttgccggacttctgatagttgcttcgccagtacagatcatagtggaaccatcatggatgtttaatattgcagtccaaggtaagaaagtattgcagaaccaagcacaaaagcatccaggaagaaaaatagaagggacaagctgaatgagagaggtatgtgccctggtgagacaaatcattttagttcttagatataatacttgcatcattgtctaagctggtagcatcgtagatatattttttatccaaataatgattgtgctcatgtaaaccatgccaaatattattctacaatgaatagcccatcgctgaaaaatgcagaaatcaagaagagcttttaccattgcattgcaaagtccacatgttcgacgattcggtcttatgatttgtttagaattttgtttcacttattaacaacttattacatgtatgggttattggttatgaacctatctaaaagttgaattttaaattaattgtaccttttgtcatggacaaaatttggttatccttgaaatgttaacctggtacctagcataataagatgttttgctggttttaaccaaagtggtcaagtttgttagtataagcatgccacgggcagccaaccatacttcatgttaaacattataaaaatgatactgtattgattagcattatcttttcatttttacatgaaaaatcttgttgcattttttctggtggtttttttctaagcttctacccaggcttacttcatgtgtgtcaccatttaaaaagctaatacattttgtttgtggtgccacaggaattaggtcagcaattttgaagttgggttaaggtttttgacacttccatcattccctccatctccctgtttacatatttgtcatatcactccctaattatttagttgggatctcggtaattgctacttgtaatagagctctacacgccaatcttgttacacttttttacctcatagtgatctttgtgtattgcgcacaacattatgtaccttactacgttttctcagtaattgctacttgtaatagagctctacacgccaatcttgttacacttttttacctcatagtgatctttgtgcattgcccacaacatcatgtaccttactacgttttcctgcttattgaaatcctgtgagccctactcagtttttacctatcttttgattttacccatggagaaatattggctgggtgactgccatgaaggcatgaaccttaaaaaaagtttgttttttcaattctaaatatcttgtgacttatttatattgagcatgtgtttacaaataatgttctcatcagctcatgtggtattttaagctcgcctctacatggacgccggcctcgcttccgcagtcaccatgctccggacctgcaccgatgtcgtgcacctcgcgcacgttctcgagcagtttcgccttgcctggtgcggcaagctcgttcgggacacccgcgccgtcgctccgtcaagggcctctgcttcgacctcttcatcattaggggtggaaacagagctttcaatgtatgctggaggtgagcgatgtgatcgatattatccatgcttgataaattatgacaatggtgatggccatgatatatggtcaggttctatccggacatccggagaactgggcaccggtgatcggatggcggcctccggcgctaagatctggcggtcacaacctagccgcgccgtcgacgaggttttcgcctgtgattccataattcgaggaagagccgtgctgctcgcagcaccggtaccgcccccgttggcgcggacgcctgccatcggccgcgagctgttgatgggggaaacaaaaataggaagggacatcggagacaatccctgccgcgttcatcctttattaacgagcagaaaccatggttcgggacttcaggtgcagatgggggacggaggccgggcaacgcaactaactaacccaacaaaggcaaccaaccactactcgcccgttcctcctgctgctcagctcatgctcctgagtcctgcctggatggtctctttcctttgaaactgggcaatgtttggaccaaccaaccaacaaccgagatggtacgtaccatgcaatgcatgttgcatgcggcactgcactggtatgtaactgtaacgttgtactctccctgactgacacgacttgcatgctctagcccaggttattcgtcccggaggataggacgcttgggcttacatcagcctccgagtcgatcggccggtggtcaactaatgaaacccgtttcatttttgaactaatgaaagagagtatatattagtgaaaaaggtacataaacggaatattatttatttcttcacgtaacaaaaaagtgcataacatgctacgaaaagacaaagtaaaaatatatgtatgtatgaaaccccatgcatgtgctaattattgcaagttttataaaattagtgggtgtgca

SEQ ID NO: 75202 - DNA, 3308 bp, Zea Mays
accgtggctccgcccccgagattgtcgcgcccacagcctcgcctcccatggatcctctcgcctctgcatctcgccattgttgccgccattctcgcgcccgtgcccctccattctcgcctccgcccccggatcctctcgcccccgcgaccttcgatggaagcccgcaatctgcgcccttccatcgccgcaatgcatcgatcccattccattttgcgagaagggcgggcgcgtgcagggcttcgcaatggctgacggttcaattggaagatcaaccacagggagtaggactcctaaatgagccgccaactgttcttctccttcccaatcatcggcaatcccacacgctctggtggctaaggctgcgggattcccaggtgcagcgtgctggggtcgcccaggcacggagtcggccaccacgcagcagccgtcgcccctccacctcgttgtcgtccgtccatgatcttgttgtggttcatgagcactgagctatacttcaacttaactgattcagcccttggctttctgggcatgtttgacaaagttgaatagctatgaaaccgaaaacaactgccaaatgtacatgttctgaatcaagttatgatgctaatgtctcagcgaatgtacatgttctgaatcaagcaatggcgaattttgaagcccactttagattaatcggacctgagatctagaaggacacaacaggcaaggtggatgtattcgtagctggttcaggcacagaagggtcgttttgagatactctctgtctgggtcgtttcttcaataagataacggtggccatcatagtcgaattggtgggcctgctagcgtccccaatggtcgtgtcctggcctgtgtggtagtgttgccggacttctgatagttgcttcgccagtacagatcatagtggaaccatcatggatgtttaatattgcagtccaaggtaagaaagtattgcagaaccaagcacaaaagcatccaggaagaaaaatagaagggacaagctgaatgagagaggtatgtgccctggtgagacaaatcattttagttcttagatataatacttgcatcattgtctaagctggtagcatcgtagatatattttttatccaaataatgattgtgctcatgtaaaccatgccaaatattattctacaatgaatagcccatcgctgaaaaatgcagaaatcaagaagagcttttaccattgcattgcaaagtccacatgttcgacgattcggtcttatgatttgtttagaattttgtttcacttattaacaacttattacatgtatgggttattggttatgaacctatctaaaagttgaattttaaattaattgtaccttttgtcatggacaaaatttggttatccttgaaatgttaacctggtacctagcataataagatgttttgctggttttaaccaaagtggtcaagtttgttagtataagcatgccacgggcagccaaccatacttcatgttaaacattataaaaatgatactgtattgattagcattatcttttcatttttacatgaaaaatcttgttgcattttttctggtggtttttttctaagcttctacccaggcttacttcatgtgtgtcaccatttaaaaagctaatacattttgtttgtggtgccacaggaattaggtcagcaattttgaagttgggttaaggtttttgacacttccatcattccctccatctccctgtttacatatttgtcatatcactccctaattatttagttgggatctcggtaattgctacttgtaatagagctctacacgccaatcttgttacacttttttacctcatagtgatctttgtgtattgcgcacaacattatgtaccttactacgttttctcagtaattgctacttgtaatagagctctacacgccaatcttgttacacttttttacctcatagtgatctttgtgcattgcccacaacatcatgtaccttactacgttttcctgcttattgaaatcctgtgagccctactcagtttttacctatcttttgattttacccatggagaaatattggctgggtgactgccatgaaggcatgaaccttaaaaaaagtttgttttttcaattctaaatatcttgtgacttatttatattgagcatgtgtttacaaataatgttctcatcagctcatgtggtattttaagctcgcctctacatggacgccggcctcgcttccgcagtcaccatgctccggacctgcaccgatgtcgtgcacctcgcgcacgttctcgagcagtttcgccttgcctggtgcggcaagctcgttcgggacacccgcgccgtcgctccgtcaagggcctctgcttcgacctcttcatcattaggggtggaaacagagctttcaatgtatgctggaggtgagcgatgtgatcgatattatccatgcttgataaattatgacaatggtgatggccatgatatatggtcaggttctatccggacatccggagaactgggcaccggtgatcggatggcggcctccggcgctaagatctggcggtcacaacctagccgcgccgtcgacgaggttttcgcctgtgattccataattcgaggaagagccgtgctgctcgcagcaccggtaccgcccccgttggcgcggacgcctgccatcggccgcgagctgttgatgggggaaacaaaaataggaagggacatcggagacaatccctgccgcgttcatcctttattaacgagcagaaaccatggttcgggacttcaggtgcagatgggggacggaggccgggcaacgcaactaactaacccaacaaaggcaaccaaccactactcgcccgttcctcctgctgctcagctcatgctcctgagtcctgcctggatggtctctttcctttgaaactgggcaatgtttggaccaaccaaccaacaaccgagatggtacgtaccatgcaatgcatgttgcatgcggcactgcactggtatgtaactgtaacgttgtactctccctgactgacacgacttgcatgctctagcccaggttattcgtcccggaggataggacgcttgggcttacatcagcctccgagtcgatcggccggtggtcaactaatgaaacccgtttcatttttgaactaatgaaagagagtatatattagtgaaaaaggtacataaacggaatattatttatttcttcacgtaacaaaaaagtgcataacatgctacgaaaagacaaagtaaaaatatatgtatgtatgaaaccccatgcatgtgctaattattgcaagttttataaaattagtgggtgtgca

SEQ ID NO: 75203 - DNA, 3410 bp, Zea Mays
accgtggctccgcccccgagattgtcgcgcccacagcctcgcctcccatggatcctctcgcctctgcatctcgccattgttgccgccattctcgcgcccgtgcccctccattctcgcctccgcccccggatcctctcgcccccgcgaccttcgatggaagcccgcaatctgcgcccttccatcgccgcaatgcatcgatcccattccattttgcgagaagggcgggcgcgtgcagggcttcgcaatggctgacggttcaattggaagatcaaccacagggagtaggactcctaaatgagccgccaactgttcttctccttcccaatcatcggcaatcccacacgctctggtggctaaggctgcgggattcccaggtgcagcgtgctggggtcgcccaggcacggagtcggccaccacgcagcagccgtcgcccctccacctcgttgtcgtccgtccatgggtgatagaagatgcagaggagaggggttggccctctttgctatttagagaggttacaggctcattgcagttatgccgactaaatactcgcttgtcatgcagatcttgttgtggttcatgagcactgagctatacttcaacttaactgattcagcccttggctttctgggcatgtttgacaaagttgaatagctatgaaaccgaaaacaactgccaaatgtacatgttctgaatcaagttatgatgctaatgtctcagcgaatgtacatgttctgaatcaagcaatggcgaattttgaagcccactttagattaatcggacctgagatctagaaggacacaacaggcaaggtggatgtattcgtagctggttcaggcacagaagggtcgttttgagatactctctgtctgggtcgtttcttcaataagataacggtggccatcatagtcgaattggtgggcctgctagcgtccccaatggtcgtgtcctggcctgtgtggtagtgttgccggacttctgatagttgcttcgccagtacagatcatagtggaaccatcatggatgtttaatattgcagtccaaggtaagaaagtattgcagaaccaagcacaaaagcatccaggaagaaaaatagaagggacaagctgaatgagagaggtatgtgccctggtgagacaaatcattttagttcttagatataatacttgcatcattgtctaagctggtagcatcgtagatatattttttatccaaataatgattgtgctcatgtaaaccatgccaaatattattctacaatgaatagcccatcgctgaaaaatgcagaaatcaagaagagcttttaccattgcattgcaaagtccacatgttcgacgattcggtcttatgatttgtttagaattttgtttcacttattaacaacttattacatgtatgggttattggttatgaacctatctaaaagttgaattttaaattaattgtaccttttgtcatggacaaaatttggttatccttgaaatgttaacctggtacctagcataataagatgttttgctggttttaaccaaagtggtcaagtttgttagtataagcatgccacgggcagccaaccatacttcatgttaaacattataaaaatgatactgtattgattagcattatcttttcatttttacatgaaaaatcttgttgcattttttctggtggtttttttctaagcttctacccaggcttacttcatgtgtgtcaccatttaaaaagctaatacattttgtttgtggtgccacaggaattaggtcagcaattttgaagttgggttaaggtttttgacacttccatcattccctccatctccctgtttacatatttgtcatatcactccctaattatttagttgggatctcggtaattgctacttgtaatagagctctacacgccaatcttgttacacttttttacctcatagtgatctttgtgtattgcgcacaacattatgtaccttactacgttttctcagtaattgctacttgtaatagagctctacacgccaatcttgttacacttttttacctcatagtgatctttgtgcattgcccacaacatcatgtaccttactacgttttcctgcttattgaaatcctgtgagccctactcagtttttacctatcttttgattttacccatggagaaatattggctgggtgactgccatgaaggcatgaaccttaaaaaaagtttgttttttcaattctaaatatcttgtgacttatttatattgagcatgtgtttacaaataatgttctcatcagctcatgtggtattttaagctcgcctctacatggacgccggcctcgcttccgcagtcaccatgctccggacctgcaccgatgtcgtgcacctcgcgcacgttctcgagcagtttcgccttgcctggtgcggcaagctcgttcgggacacccgcgccgtcgctccgtcaagggcctctgcttcgacctcttcatcattaggggtggaaacagagctttcaatgtatgctggaggtgagcgatgtgatcgatattatccatgcttgataaattatgacaatggtgatggccatgatatatggtcaggttctatccggacatccggagaactgggcaccggtgatcggatggcggcctccggcgctaagatctggcggtcacaacctagccgcgccgtcgacgaggttttcgcctgtgattccataattcgaggaagagccgtgctgctcgcagcaccggtaccgcccccgttggcgcggacgcctgccatcggccgcgagctgttgatgggggaaacaaaaataggaagggacatcggagacaatccctgccgcgttcatcctttattaacgagcagaaaccatggttcgggacttcaggtgcagatgggggacggaggccgggcaacgcaactaactaacccaacaaaggcaaccaaccactactcgcccgttcctcctgctgctcagctcatgctcctgagtcctgcctggatggtctctttcctttgaaactgggcaatgtttggaccaaccaaccaacaaccgagatggtacgtaccatgcaatgcatgttgcatgcggcactgcactggtatgtaactgtaacgttgtactctccctgactgacacgacttgcatgctctagcccaggttattcgtcccggaggataggacgcttgggcttacatcagcctccgagtcgatcggccggtggtcaactaatgaaacccgtttcatttttgaactaatgaaagagagtatatattagtgaaaaaggtacataaacggaatattatttatttcttcacgtaacaaaaaagtgcataacatgctacgaaaagacaaagtaaaaatatatgtatgtatgaaaccccatgcatgtgctaattattgcaagttttataaaattagtgggtgtgca

SEQ ID NO: 75204 - DNA, 4607 bp, Zea Mays
accgtggctccgcccccgagattgtcgcgcccacagcctcgcctcccatggatcctctcgcctctgcatctcgccattgttgccgccattctcgcgcccgtgcccctccattctcgcctccgcccccggatcctctcgcccccgcgaccttcgatggaagcccgcaatctgcgcccttccatcgccgcaatgcatcgatcccattccattttgcgagaagggcgggcgcgtgcagggcttcgcaatggctgacggttcaattggaagatcaaccacagggagtaggactcctaaatgagccgccaactgttcttctccttcccaatcatcggcaatcccacacgctctggtggctaaggctgcgggattcccaggtgcagcgtgctggggtcgcccaggcacggagtcggccaccacgcagcagccgtcgcccctccacctcgttgtcgtccgtccatggtacacctcgcccgcggccatcatccctacactagtaccagcgcgtgtatcgagttacagttctctctgttttcttctgaagagtgagcaaaggatgcacacgctggtactgtggtatgtgctgatcgattaactgtaatgagcctgtgttgatccattttcttcctacgaagggtgatagaagatgcagaggagaggggttggccctctttgctatttagagaggttacaggctcattgcagttatgccgactaaatactcgcttgtcatgcagatcttgttgtggttcatgagcactgagctatacttcaacttaactgattcagcccttggctttctgggcatgtttgacaaagttgaatagctatgaaaccgaaaacaactgccaaatgtacatgttctgaatcaagttatgatgctaatgtctcagcgaatgtacatgttctgaatcaagcaatggcgaattttgaagcccactttagattaatcggtatatatggatacagtagcatgtgttcaaatgatgcttatttctcaacgaatagtagcaatcattggtcaggacatgtagcttaatgctatcttgttgttattacatgggtgtcgtaacaccttgccgactgttcataaacgcaggacctgagatctagaaggacacaacaggcaaggtggatgtattcgtagctggttcaggcacagaaggcatagtttattgtttcttttacattcagtttactgcttcttaaggaattattcaactaggaacatgtactgaatatgggattcaggttgaaataaagcgtatattttctgtttgttggtgaatgtaaatgaagataaatatgacctttgctcttagcctttctgtcattctttttttaatatgatcatgagaatgtgagtgaattatggcaacatgacctgcaagtcatcataacaaggaataatatttataatgttttaattggagctacacacaagagtgtttcaaataacctatcttggtctgtatctacatgcattttattaaagtttcttgtattggttcgctttaactgctatttgttttagttttttctattgctgcaatatgtgaaattgcaaacatgtgggatgtgtttgactgctacgaatacgacattgctaatagtggcaagaatccaacagagcgtctagctcactaaaagcaaaacctttggcgccatttaggttagttttttctttatatttgtgaggaaaatctcaattttaatattttgaacatgttccatattttttagaatctcaggcttacatgttgctgctgcttcacaaattgactaccttttgtccatttatagtggttgaacaatttacccttatgtattagagtttctattacaacattcttaccggagtcagctgttaaagagaaggttggcaaaactataaacctataacacctttagaaggggtataaagtggcaaaacatatttaatgtatctagatttttataggagctctcccggtggtagcatctttgaggaaggtggtgatgaaaactgaaatcttgtctcctaactccttaattcctgaacagggtcgttttgagatactctctgtctgggtcgtttcttcaataagataacggtggccatcatagtcgaattggtgggcctgctagcgtccccaatggtcgtgtcctggcctgtgtggtagtgttgccggacttctgatagttgcttcgccagtacagatcatagtggaaccatcatggatgtttaatattgcagtccaaggtaagaaagtattgcagaaccaagcacaaaagcatccaggaagaaaaatagaagggacaagctgaatgagagaggtatgtgccctggtgagacaaatcattttagttcttagatataatacttgcatcattgtctaagctggtagcatcgtagatatattttttatccaaataatgattgtgctcatgtaaaccatgccaaatattattctacaatgaatagcccatcgctgaaaaatgcagaaatcaagaagagcttttaccattgcattgcaaagtccacatgttcgacgattcggtcttatgatttgtttagaattttgtttcacttattaacaacttattacatgtatgggttattggttatgaacctatctaaaagttgaattttaaattaattgtaccttttgtcatggacaaaatttggttatccttgaaatgttaacctggtacctagcataataagatgttttgctggttttaaccaaagtggtcaagtttgttagtataagcatgccacgggcagccaaccatacttcatgttaaacattataaaaatgatactgtattgattagcattatcttttcatttttacatgaaaaatcttgttgcattttttctggtggtttttttctaagcttctacccaggcttacttcatgtgtgtcaccatttaaaaagctaatacattttgtttgtggtgccacaggaattaggtcagcaattttgaagttgggttaaggtttttgacacttccatcattccctccatctccctgtttacatatttgtcatatcactccctaattatttagttgggatctcggtaattgctacttgtaatagagctctacacgccaatcttgttacacttttttacctcatagtgatctttgtgtattgcgcacaacattatgtaccttactacgttttctcagtaattgctacttgtaatagagctctacacgccaatcttgttacacttttttacctcatagtgatctttgtgcattgcccacaacatcatgtaccttactacgttttcctgcttattgaaatcctgtgagccctactcagtttttacctatcttttgattttacccatggagaaatattggctgggtgactgccatgaaggcatgaaccttaaaaaaagtttgttttttcaattctaaatatcttgtgacttatttatattgagcatgtgtttacaaataatgttctcatcagctcatgtggtattttaagctcgcctctacatggacgccggcctcgcttccgcagtcaccatgctccggacctgcaccgatgtcgtgcacctcgcgcacgttctcgagcagtttcgccttgcctggtgcggcaagctcgttcgggacacccgcgccgtcgctccgtcaagggcctctgcttcgacctcttcatcattaggggtggaaacagagctttcaatgtatgctggaggtgagcgatgtgatcgatattatccatgcttgataaattatgacaatggtgatggccatgatatatggtcaggttctatccggacatccggagaactgggcaccggtgatcggatggcggcctccggcgctaagatctggcggtcacaacctagccgcgccgtcgacgaggttttcgcctgtgattccataattcgaggaagagccgtgctgctcgcagcaccggtaccgcccccgttggcgcggacgcctgccatcggccgcgagctgttgatgggggaaacaaaaataggaagggacatcggagacaatccctgccgcgttcatcctttattaacgagcagaaaccatggttcgggacttcaggtgcagatgggggacggaggccgggcaacgcaactaactaacccaacaaaggcaaccaaccactactcgcccgttcctcctgctgctcagctcatgctcctgagtcctgcctggatggtctctttcctttgaaactgggcaatgtttggaccaaccaaccaacaaccgagatggtacgtaccatgcaatgcatgttgcatgcggcactgcactggtatgtaactgtaacgttgtactctccctgactgacacgacttgcatgctctagcccaggttattcgtcccggaggataggacgcttgggcttacatcagcctccgagtcgatcggccggtggtcaactaatgaaacccgtttcatttttgaactaatgaaagagagtatatattagtgaaaaaggtacataaacggaatattatttatttcttcacgtaacaaaaaagtgcataacatgctacgaaaagacaaagtaaaaatatatgtatgtatgaaaccccatgcatgtgctaattattgcaagttttataaaattagtgggtgtgca

SEQ ID NO: 75205 - DNA, 3624 bp, Zea Mays
accgtggctccgcccccgagattgtcgcgcccacagcctcgcctcccatggatcctctcgcctctgcatctcgccattgttgccgccattctcgcgcccgtgcccctccattctcgcctccgcccccggatcctctcgcccccgcgaccttcgatggaagcccgcaatctgcgcccttccatcgccgcaatgcatcgatcccattccattttgcgagaagggcgggcgcgtgcagggcttcgcaatggctgacggttcaattggaagatcaaccacagggagtaggactcctaaatgagccgccaactgttcttctccttcccaatcatcggcaatcccacacgctctggtggctaaggctgcgggattcccaggtgcagcgtgctggggtcgcccaggcacggagtcggccaccacgcagcagccgtcgcccctccacctcgttgtcgtccgtccatgatcttgttgtggttcatgagcactgagctatacttcaacttaactgattcagcccttggctttctgggcatgtttgacaaagttgaatagctatgaaaccgaaaacaactgccaaatgtacatgttctgaatcaagttatgatgctaatgtctcagcgaatgtacatgttctgaatcaagcaatggcgaattttgaagcccactttagattaatcggtatatatggatacagtagcatgtgttcaaatgatgcttatttctcaacgaatagtagcaatcattggtcaggacatgtagcttaatgctatcttgttgttattacatgggtgtcgtaacaccttgccgactgttcataaacgcaggacctgagatctagaaggacacaacaggcaaggtggatgtattcgtagctggttcaggcacagaagggtcgttttgagatactctctgtctgggtcgtttcttcaataagataacggtggccatcatagtcgaattggtgggcctgctagcgtccccaatggtcgtgtcctggcctgtgtggtagtgttgccggacttctgatagttgcttcgccagtacagatcatagtggaaccatcatggatgtttaatattgcagtccaaggtaagaaagtattgcagaaccaagcacaaaagcatccaggaagaaaaatagaagggacaagctgaatgagagaggtatgtgccctggtgagacaaatcattttagttcttagatataatacttgcatcattgtctaagctggtagcatcgtagatatattttttatccaaataatgattgtgctcatgtaaaccatgccaaatattattctacaatgaatagcccatcgctgaaaaatgcagaaatcaagaagagcttttaccattgcattgcaaagtccacatgttcgacgattcggtcttatgatttgtttagaattttgtttcacttattaacaacttattacatgtatgggttattggttatgaacctatctaaaagttgaattttaaattaattgtaccttttgtcatggacaaaatttggttatccttgaaatgttaacctggtacctagcataataagatgttttgctggttttaaccaaagtggtcaagtttgttagtataagcatgccacgggcagccaaccatacttcatgttaaacattataaaaatgatactgtattgattagcattatcttttcatttttacatgaaaaatcttgttgcattttttctggtggtttttttctaagcttctacccaggcttacttcatgtgtgtcaccatttaaaaagctaatacattttgtttgtggtgccacaggaattaggtcagcaattttgaagttgggttaaggtttttgacacttccatcattccctccatctccctgtttacatatttgtcatatcactccctaattatttagttgggatctcggtaattgctacttgtaatagagctctacacgccaatcttgttacacttttttacctcatagtgatctttgtgtattgcgcacaacattatgtaccttactacgttttctcagtaattgctacttgtaatagagctctacacgccaatcttgttacacttttttacctcatagtgatctttgtgcattgcccacaacatcatgtaccttactacgttttcctgcttattgaaatcctgtgagccctactcagtttttacctatcttttgattttacccatggagaaatattggctgggtgactgccatgaaggcatgaaccttaaaaaaagtttgttttttcaattctaaatatcttgtgacttatttatattgagcatgtgtttacaaataatgttctcatcagctcatgtggtattttaagctcgcctctacatggacgccggcctcgcttccgcagtcaccatgctccggacctgcaccgatgtcgtgcacctcgcgcacgttctcgagcagtttcgccttgcctggtgcggcaagctcgttcgggacacccgcgccgtcgctccgtcaagggcctctgcttcgacctcttcatcattaggggtggaaacagagctttcaatgtatgctggaggaaacaaaggcgccatcgccggttgcaactccaacccaccgaatccgtttccacaaaagtcaaaacaactccgccatctcgatcaaacaaggcggacaatgtcaacgcccctcggcaccagcacaaatttctcccctccgaactccatctatctatgcccgttgtgcacgggagagggagacagagatccgcgaaacgccgcgcgctgttcttcttcaggtcaggttctatccggacatccggagaactgggcaccggtgatcggatggcggcctccggcgctaagatctggcggtcacaacctagccgcgccgtcgacgaggttttcgcctgtgattccataattcgaggaagagccgtgctgctcgcagcaccggtaccgcccccgttggcgcggacgcctgccatcggccgcgagctgttgatgggggaaacaaaaataggaagggacatcggagacaatccctgccgcgttcatcctttattaacgagcagaaaccatggttcgggacttcaggtttcagtaaatcttgccagaaattaactcatgtgctcgctcttttgcaagagcagaaacacgtgtgtacagtttggttgtcagcgtgaaaaaaaaaatattgtacacttccccgtcaggcctggttcagtttgaaggggattacaggaattgcaacagaggattaaatctctttttagttaaaattaaatcggaagggatttaatccttctctaatccatgcgcaaccgaacgagccccgtcagccaaatggaaatcacttggattactagttacttcgtttcagagtcagttgatcaggatgcccgccccttcagttgaggtttttttttacaaaatagaacttgtgtttccgtttagtatgcccttttcacattaaaaacatactgttttggccagaccttagaagttgcaacctgatagcctttgccatgaaatttatgcttccgcagaagccattcttcagcatttcatctcagtttttccagccatatggttatcattaaacgtttgggagctgccctttctttcctgagcagggttatcattacttgcatataag

SEQ ID NO: 75206 - DNA, 3999 bp, Zea Mays
accgtggctccgcccccgagattgtcgcgcccacagcctcgcctcccatggatcctctcgcctctgcatctcgccattgttgccgccattctcgcgcccgtgcccctccattctcgcctccgcccccggatcctctcgcccccgcgaccttcgatggaagcccgcaatctgcgcccttccatcgccgcaatgcatcgatcccattccattttgcgagaagggcgggcgcgtgcagggcttcgcaatggctgacggttcaattggaagatcaaccacagggagtaggactcctaaatgagccgccaactgttcttctccttcccaatcatcggcaatcccacacgctctggtggctaaggctgcgggattcccaggtgcagcgtgctggggtcgcccaggcacggagtcggccaccacgcagcagccgtcgcccctccacctcgttgtcgtccgtccatggtacacctcgcccgcggccatcatccctacactagtaccagcgcgtgtatcgagttacagttctctctgttttcttctgaagagtgagcaaaggatgcacacgctggtactgtggtatgtgctgatcgattaactgtaatgagcctgtgttgatccattttcttcctacgaagggtgatagaagatgcagaggagaggggttggccctctttgctatttagagaggttacaggctcattgcagttatgccgactaaatactcgcttgtcatgcagatcttgttgtggttcatgagcactgagctatacttcaacttaactggtatgattagttgaaagaaaggtacaacatcaccttacgtgttgaattgccttgattaagaaatttatgggtagccttccgtgtgtgtatgtgtgtgcagattcagcccttggctttctgggcatgtttgacaaagttgaatagctatgaaaccgaaaacaactgccaaatgtacatgttctgaatcaagttatgatgctaatgtctcagcgaatgtacatgttctgaatcaagcaatggcgaattttgaagcccactttagattaatcggtatatatggatacagtagcatgtgttcaaatgatgcttatttctcaacgaatagtagcaatcattggtcaggacatgtagcttaatgctatcttgttgttattacatgggtgtcgtaacaccttgccgactgttcataaacgcaggacctgagatctagaaggacacaacaggcaaggtggatgtattcgtagctggttcaggcacagaagggtcgttttgagatactctctgtctgggtcgtttcttcaataagataacggtggccatcatagtcgaattggtgggcctgctagcgtccccaatggtcgtgtcctggcctgtgtggtagtgttgccggacttctgatagttgcttcgccagtacagatcatagtggaaccatcatggatgtttaatattgcagtccaaggtaagaaagtattgcagaaccaagcacaaaagcatccaggaagaaaaatagaagggacaagctgaatgagagaggtatgtgccctggtgagacaaatcattttagttcttagatataatacttgcatcattgtctaagctggtagcatcgtagatatattttttatccaaataatgattgtgctcatgtaaaccatgccaaatattattctacaatgaatagcccatcgctgaaaaatgcagaaatcaagaagagcttttaccattgcattgcaaagtccacatgttcgacgattcggtcttatgatttgtttagaattttgtttcacttattaacaacttattacatgtatgggttattggttatgaacctatctaaaagttgaattttaaattaattgtaccttttgtcatggacaaaatttggttatccttgaaatgttaacctggtacctagcataataagatgttttgctggttttaaccaaagtggtcaagtttgttagtataagcatgccacgggcagccaaccatacttcatgttaaacattataaaaatgatactgtattgattagcattatcttttcatttttacatgaaaaatcttgttgcattttttctggtggtttttttctaagcttctacccaggcttacttcatgtgtgtcaccatttaaaaagctaatacattttgtttgtggtgccacaggaattaggtcagcaattttgaagttgggttaaggtttttgacacttccatcattccctccatctccctgtttacatatttgtcatatcactccctaattatttagttgggatctcggtaattgctacttgtaatagagctctacacgccaatcttgttacacttttttacctcatagtgatctttgtgtattgcgcacaacattatgtaccttactacgttttctcagtaattgctacttgtaatagagctctacacgccaatcttgttacacttttttacctcatagtgatctttgtgcattgcccacaacatcatgtaccttactacgttttcctgcttattgaaatcctgtgagccctactcagtttttacctatcttttgattttacccatggagaaatattggctgggtgactgccatgaaggcatgaaccttaaaaaaagtttgttttttcaattctaaatatcttgtgacttatttatattgagcatgtgtttacaaataatgttctcatcagctcatgtggtattttaagctcgcctctacatggacgccggcctcgcttccgcagtcaccatgctccggacctgcaccgatgtcgtgcacctcgcgcacgttctcgagcagtttcgccttgcctggtgcggcaagctcgttcgggacacccgcgccgtcgctccgtcaagggcctctgcttcgacctcttcatcattaggggtggaaacagagctttcaatgtatgctggaggaaacaaaggcgccatcgccggttgcaactccaacccaccgaatccgtttccacaaaagtcaaaacaactccgccatctcgatcaaacaaggcggacaatgtcaacgcccctcggcaccagcacaaatttctcccctccgaactccatctatctatgcccgttgtgcacgggagagggagacagagatccgcgaaacgccgcgcgctgttcttcttcaggtcaggttctatccggacatccggagaactgggcaccggtgatcggatggcggcctccggcgctaagatctggcggtcacaacctagccgcgccgtcgacgaggttttcgcctgtgattccataattcgaggaagagccgtgctgctcgcagcaccggtaccgcccccgttggcgcggacgcctgccatcggccgcgagctgttgatgggggaaacaaaaataggaagggacatcggagacaatccctgccgcgttcatcctttattaacgagcagaaaccatggttcgggacttcaggtttcagtaaatcttgccagaaattaactcatgtgctcgctcttttgcaagagcagaaacacgtgtgtacagtttggttgtcagcgtgaaaaaaaaaatattgtacacttccccgtcaggcctggttcagtttgaaggggattacaggaattgcaacagaggattaaatctctttttagttaaaattaaatcggaagggatttaatccttctctaatccatgcgcaaccgaacgagccccgtcagccaaatggaaatcacttggattactagttacttcgtttcagagtcagttgatcaggatgcccgccccttcagttgaggtttttttttacaaaatagaacttgtgtttccgtttagtatgcccttttcacattaaaaacatactgttttggccagaccttagaagttgcaacctgatagcctttgccatgaaatttatgcttccgcagaagccattcttcagcatttcatctcagtttttccagccatatggttatcattaaacgtttgggagctgccctttctttcctgagcagggttatcattacttgcatataag

SEQ ID NO: 75207 - DNA, 1255 bp, Zea Mays
attcgttaaaccaacaagatgttgttcgaggcgttcccctcctccacgcaaccttctcccctccagatccaggattgccgggctccttgactcgttacctcgcgcgccctcggttctagagctagcgaaatcgcaaggctattagggttcctttcggagcgcgtctgaagcgatgatggctgaagtcggcggtgggatcgggatcttctctgccctgctccactcgggatgatgaatctgctgcgctgataattattggatgaatttcgataattattagatctaagagatgcgccgacttgaagaggcgaggtaaggtgcaacatgtataagacgtgacatgctatagaggcctttgccatggtgggtgcgctcgcatggcaggccacggtaataaaagaagatatttttgtgtcctgggggtggagatcgcacgggggattgttttttggccccgggttctcctccctcgtggtgttccgtgtccctatgtgcattggtctttgcgtggtttgcgatctcagctcacctacacgcttcggatttctgcatctaacacggagatctacaacaaaaacaaacatggagctacaacgagattcttaaggtacaatcgttaatttactgtaacaattaagtttcttttctcatctctgacgccacacttgtatccttatgttctctctctgcacattcaaagaaaccgttaaacccccatgaataatgacattcgacgtccactttgcccagctgtgttgaatttaatagttcaacaatttcagactcccatgaactcagtgaaacaagcgttactgatgtcctaagtgaaattttatgtcgcacttaagatggcgctgcgtctttatttcgttgtatattttattttcaacaactccaatctgattatgtcgtggcatttcatttgtatttatcatgtcaattgggatatttggtccttgtaagcttttggcatgtttgttagttaagccattgcaattgttggacttgtggagggttgcaaaatcgcagtgattctactattcatcatgtcatcatgtgaaatcttctaccacggagcacgtcaatcgtggctgggctgatggacgactgtgctgatggaactgattcgttacgtgggttgaagattttgtgccaaatatgcgatctggttggttactccgccctgctgacgttgttttagcccagagatactcatgttgttcttggcctttgaggttggacaccatagaagaag

SEQ ID NO: 75208 - DNA, 1614 bp, Zea Mays
aaaccaacaagatgttgttcgaggcgttcccctcctccacgcaaccttctcccctccagatccaggattgccgggctccttgactcgttacctcgcgcgccctcggtgagctactttgtttcgatttagcgacaaatcagtttgcttcatgttgcgcaggcttagatctgaatgccggattcttcgtcttacggcttgaatcgagctgggaggctgtggatctgagcacgggaggtacaacaaatccgcgtgttctagagctagcgaaatcgcaaggctattagggttcctttcggagcgcgtctgaagcgatgatggctgaagtcggcggtgggatcgggatcttctctgccctgctccactcgggatgatgaatctgctgcgctgataattattggatgaatttcgataattattagatctaagagatgcgccgacttgaagaggcgaggtaaggtgcaacatgtataagacgtgacatgctatagaggcctttgccatggtgggtgcgctcgcatggcaggccacggtaataaaagaagatatttttgtgtcctgggggtggagatcgcacgggggattgttttttggccccgggttctcctccctcgtggtgttccgtgtccctatgtgcattggtctttgcgtggtttgcgatctcagctcacctacacgcttcggatttctgcatctaacacggagatctacaacaaaaacaaacatggagctacaacgagattcttaaggtacaatcgttaatttactgtaacaattaagtttcttttctcatctctgacgccacacttgtatccttatgttctctctctgcacattcaaagaaaccgttaaacccccatgaataatgacattcgacgtccactttgcccagctgtgttgaatttaatagttcaacaatttcagactcccatgaactcagtgaaacaagcgttactgatgtcctaagtgaaattttatgtcgcacttaagatggcgctgcgtctttatttcgttgtatattttattttcaacaactccaatctgattatgtcgtggcatttcatttgtatttatcatgtcaattgggatatttggtccttgtaagcttttggcatgtttgttagttaagccattgcaattgttggacttgtggagggttgcaaaatcgcagtgattctactattcatcatgtcatcatgtgaaatcttctaccacggagcacgtcaatcgtggctgggctgatggacgactgtgctgatggaactgattcgttacgtgggttgaagattttgtgccaaatatgcgatctggttggttactccgccctgctgacgttgttttagcccaggtgtttctgctgctcattccttgcattttttatggcactgtacatacaattggacaacctaatttttggcagttcaactcatttagaagttagaagggtttgagaaacattctcccctagaaatacatggaggtgtatctgatgattgttttttttgttacaaagtttcctagtttaatttgtatgatattctggaaattcattgtgctgtagggaggattttcagtaagcgctagtttgggttagatatatagatggattatgataag

SEQ ID NO: 75209 - DNA, 1597 bp, Zea Mays
aaaccaacaagatgttgttcgaggcgttcccctcctccacgcaaccttctcccctccagatccaggattgccgggctccttgactcgttacctcgcgcgccctcggtgagctactttgtttcgatttagcgacaaatcagtttgcttcatgttgcgcaggcttagatctgaatgccggattcttcgtcttacggcttgaatcgagctgggaggctgtggatctgagcacgggaggttctagagctagcgaaatcgcaaggctattagggttcctttcggagcgcgtctgaagcgatgatggctgaagtcggcggtgggatcgggatcttctctgccctgctccactcgggatgatgaatctgctgcgctgataattattggatgaatttcgataattattagatctaagagatgcgccgacttgaagaggcgaggtaaggtgcaacatgtataagacgtgacatgctatagaggcctttgccatggtgggtgcgctcgcatggcaggccacggtaataaaagaagatatttttgtgtcctgggggtggagatcgcacgggggattgttttttggccccgggttctcctccctcgtggtgttccgtgtccctatgtgcattggtctttgcgtggtttgcgatctcagctcacctacacgcttcggatttctgcatctaacacggagatctacaacaaaaacaaacatggagctacaacgagattcttaaggtacaatcgttaatttactgtaacaattaagtttcttttctcatctctgacgccacacttgtatccttatgttctctctctgcacattcaaagaaaccgttaaacccccatgaataatgacattcgacgtccactttgcccagctgtgttgaatttaatagttcaacaatttcagactcccatgaactcagtgaaacaagcgttactgatgtcctaagtgaaattttatgtcgcacttaagatggcgctgcgtctttatttcgttgtatattttattttcaacaactccaatctgattatgtcgtggcatttcatttgtatttatcatgtcaattgggatatttggtccttgtaagcttttggcatgtttgttagttaagccattgcaattgttggacttgtggagggttgcaaaatcgcagtgattctactattcatcatgtcatcatgtgaaatcttctaccacggagcacgtcaatcgtggctgggctgatggacgactgtgctgatggaactgattcgttacgtgggttgaagattttgtgccaaatatgcgatctggttggttactccgccctgctgacgttgttttagcccaggtgtttctgctgctcattccttgcattttttatggcactgtacatacaattggacaacctaatttttggcagttcaactcatttagaagttagaagggtttgagaaacattctcccctagaaatacatggaggtgtatctgatgattgttttttttgttacaaagtttcctagtttaatttgtatgatattctggaaattcattgtgctgtagggaggattttcagtaagcgctagtttgggttagatatatagatggattatgataag

SEQ ID NO: 75210 - DNA, 1406 bp, Zea Mays
ctaaacttcatggagctcgaggacgtgtggatcctcggcacctcgcacctctccgcgtcctccacaccgtcaaaggaaaagatcatcgtggccccctcattgaagagcctccatctctgcctgtgccattacgtcactaatcaaggttttgcagaggcagttaattgcttccctcagctcgaggagctagacattacattctgctcattgtatggcatcgtgtgtgagactgctgggagagcctgcccgacaacgtcgtcgtctagctctgccggagcagagccctcacttcggagctggaatcatgtactcgtccagtgccaacgagccgcttttgaagtccaacatgttctctctcggtggctccaagttcttaggcgcaatcaacagaagcatcaacttgggtcagatcaaccgatcgctgcctcgtgcttaccacttctcattacccatgggactcacaaagacctgctgattttgttggtttctttggactggcacaggtgggcagagcgctcttgctctccgtctgctccgcgttgtttttccttctaaaatttctaccagtgcgaactatccgtttggaggagagttccgagcaactaggagagtttctgaagatattggaagtacaacacaaaaagaatgtgccgcttctggtcttgaaggtttccaacatggttcgtcaatggaaaggtagtatcggcttgcgaaatatattcctaagcctacagaatgtaagctaaaatcacgtgctcactgtgtacatttttttctggtaacaacaactttttctgaaaagaatgaacatcctaaatccttactctctgtagataagaagcatctagaataaaagatatccaatgcctttactgtttgtacggtagatttttctttgtcatatatcatagttacctcttgaagtacatttcatcaagttgtagttagcccttgatgtacatttcagctttgatgtatactagcacaaaacagaaagaatcattatggtcgaactactactataatgagaatttcacatgctactgctagattatcttgtatgcatggttcttgagcatagtcacattatttctaaaactaattctggagagtatgtttatgtggagttagaaaaagtaatatacaaatacatattattctatagcagctttataggtataaaaaattccgtatgttacttctggtacagacattttttctatataattgaacaagcacacctgtaactgaatccgttttgcaactccaaactaaaactggaatgcataataattgcatatacaacaacaaatatgttatgatatataggaatccagattccctgtgcaatgtaataacatcattaaggccttgtaacagtcaggatagcatctgagtagtttaag

SEQ ID NO: 75211 - DNA, 1898 bp, Zea Mays
cttgaccctaattgacacaagtaaccataaatcccagcccttctccgtcctttccatggagacgaagccggagcggcaccaccgccacgaggaagcccgtgacggggaggacgacgcagtagccatggaacacggcgctctctcgctgcaacgcggcggagccaccttgtttggctggcggcaggacgaggaggccggccgccgccgccgagtagagatccgggaggtggacttcttctcgagggactccagagcccgcagccatgacgacgccggcgacggacgtgacgacgtcaacatcgggctacacctgctaaccacgacaagccccgacgaggaaatgacggcggcggcggccaagaatcaaaagatagaggcctcatcagctgttgaagcagagctcaggcgggtggtggaggataacaggcggctgcgtggcatgatgaacgagctcacacggaactatggcgcgatgtaccagcagcttctccaggtcacacaacaccacccacatcgacagcatcccgttgatctcatgatcaacagatcatcattggctcatacccgcctgaccaccgcggcctcgtacaacgacgacacgtccgctcagcagctgttgagggttgaggacgaggcggctagcgacggagctggagaggcgtcgccttcgctgagcaatggaggaaaccataacgacggcggcgacggcaagcagcggaggacgtcttcgaatgtgacagcaccgccggcgagagagaacggcggcggcgagcgggcggagttgccagcccacaagacaagggtgtctgtgcgtgcgcgatctgaggcaccaatgatcagcgacgggtgtcaatggagaaagtacgggcagaagatggccaaaggtaacccatgcccaagagcatactaccggtgcacaatggctgtggcatgccccgtgagaaagcaggtgcagcggtgcgccgaggacaagacaatcctggtcaccacatacgagggccaccacaaccacccgctgccgccggcagccgccaccatggcgagcaccacgtccgccgcggctaccatgctgctctccggcccggccaccagccgcgacggcgcggccgcgctcctcggccacccggcggcgctgttccaattccaccactccagcagcatcccctacgcgtccactatggccacgctctccgcctccgcgccgttccccaccatcaccctcgacctcacgcagacgcccggcggcgttgtcggtagcggcggcggtctgctgctgcctcatcacgggctcgggctccatcgcccgcccagtggaatccaccccgtggcggctccggcgatgccgttatcgccgctggccacgttgctccagcagctaccgcccacggggtcgatgtcgctggctggcctcgtcgcgcgtcatgagcagcagcagtcagtgatggagacggtgaccgcggccatcgccgccaaccccaacttcaccacggcgcttgcggcggccatctcgtcggttatggcaggggcagcgcatcaggctcagcctactccacgtgcaggtaacatcggcagcgccggggaggccaacggcagtgcgggtggtgccgcagcaggtcccacggcagccggagcatatggagcgtctggcgggtcgccgcggttcgcgacgcagtctgcttgcaccacgtccacaacttgagctaattgatctgtgcagagtttgactgtcagagatcatccatctgcagttctgcactacaactatatgtaaaattgagtgtattatactatttattataatagcatatataaatgagatataccatacttgcactgtgtgtgtgtgtacaaatgaaaatttgaaatacggagtatacagtaatttcagctgaattagg

SEQ ID NO: 75212 - DNA, 957 bp, Zea Mays
gacacaagtaaccataaatcccagcccttctccgtcctttccatggagacgaagccggagcggcaccaccgccacgaggaagcccgtgacggggaggacgacgcagtagccatggaacacggcgctctctcgctgcaacgcggcggagccaccttgtttggctggcggcaggacgaggaggccggccgccgccgccgagtagagatccgggaggtggacttcttctcgagggactccagagcccgcagccatgacgacgccggcgacggacgtgacgacgtcaacatcgggctacacctgctaaccacgacaagccccgacgaggaaatgacggcggcggcggccaagaatcaaaagatagaggcctcatcagctgttgaagcagagctcaggcgggtggtggaggataacaggcggctgcgtggcatgatgaacgagctcacacggaactatggcgcgatgtaccagcagcttctccaggtcacacaacaccacccacatcgacagcatcccgttgatctcatgatcaacagatcatcattggctcatacccgcctgaccaccgcggcctcgtacaacgacgacacgtccgctcagcagctgttgagggttgaggacgaggcggctagcgacggagctggagaggcgtcgccttcgctgagcaatggaggaaaccataacgacggcggcgacggcaagcagcggaggacgtcttcgaatgtgacagcaccgccggcgagagagaacggcggcggcgagcgggcggagttgccagcccacaagacaagggtgtctgtgcgtgcgcgatctgaggcaccaatgatcagcgacgggtgtcaatggagaaagtacgggcagaagatggccaaaggtaacccatgcccaagagcatactaccggtgcacaatggctgtggcatgccccgtgagaaagcagaaagggataccatgccattaa

SEQ ID NO: 75213 - DNA, 1313 bp, Zea Mays
atgactcctagggtctggaaacaaaccacggagctgtgaccgctccgtgaccgaggggagcggcggcggcggcgcaaggagtcttcctctccgacgccggcaacgtcgacaccgctgattatcccttctccagtaagagtaggcgaggacgagcctcccccatcttgggtgttggtgtctgacccattttctcaagatatgatgttcacaagaggttctcccaaaattttgatgttatctaaagctgctcaaaagaaggtttctcctaaagcttctacatcaaagaagtgtggaggtggtgttcatagagcagcatgaaattctgaattggagaagagcctcgttgatttgttgtttgagcacaatgtacctccatatagggctcaaaatggctggagtctagatgcttggaacaaaattgttactaaattcaacaagaagcatgagtatgtcacattcaacaagattcaaattcaggagaaggagagggaattgaaaagggattacaagatgttgaaagaggctagaaagcaaagtggtgtttcctggaatgagaaacgatgcatggttgttgctgatccaccaatatgggaaaacatcaaaaaatcatttcctagggccaagaaatttcaaaagaagtctttccctctctttgatgctcttggggaactatatgatggacacattgctcaagggacctggaacataacatctacacagctaccacaagaatggaacacaatttcaaatgaagaagaacaagtgaacaccacaataatggatgaggaaggcattattcaacaacaaccacaagaagaggattcaatattggaacaagatgaagatcctataattggaaggattgaacagaggtctactgcaacgagaaggtctactgcatcaacaatcaatcaggataaggaagcaaagaggatgaagaaggattctttggaaggacttgttgggagatatctagatctgaaatcaaaacaagttgaggatgaggttacacaaatggcgaaaggaaaagaatctgctcaaggtaatgacttctccatcatgagatgcatttctgttcttagatccatgaatgtgactgcagatgagaagataaaagcagctgaggtgttcgacataccaaacaacagagagacatttatcagttttagtgttgatgaaccagaaactgccctcctatggttaagacggaagattgataagctctaaggaaatattggtcatatggagacagttctgcacggcgttctgagtctgcatgtgccggtatgagctatatatatgttgcatttctc

SEQ ID NO: 75214 - DNA, 1328 bp, Zea Mays
atgactcctagggtctggaaacaaaccacggagctgtgaccgctccgtgaccgaggggagcggcggcggcggcgcaaggagtcttcctctccgacgccggcaacgtcgacaccgctggcaagcttctctccgattatcccttctccagtaagagtaggcgaggacgagcctcccccatcttgggtgttggtgtctgacccattttctcaagatatgatgttcacaagaggttctcccaaaattttgatgttatctaaagctgctcaaaagaaggtttctcctaaagcttctacatcaaagaagtgtggaggtggtgttcatagagcagcatgaaattctgaattggagaagagcctcgttgatttgttgtttgagcacaatgtacctccatatagggctcaaaatggctggagtctagatgcttggaacaaaattgttactaaattcaacaagaagcatgagtatgtcacattcaacaagattcaaattcaggagaaggagagggaattgaaaagggattacaagatgttgaaagaggctagaaagcaaagtggtgtttcctggaatgagaaacgatgcatggttgttgctgatccaccaatatgggaaaacatcaaaaaatcatttcctagggccaagaaatttcaaaagaagtctttccctctctttgatgctcttggggaactatatgatggacacattgctcaagggacctggaacataacatctacacagctaccacaagaatggaacacaatttcaaatgaagaagaacaagtgaacaccacaataatggatgaggaaggcattattcaacaacaaccacaagaagaggattcaatattggaacaagatgaagatcctataattggaaggattgaacagaggtctactgcaacgagaaggtctactgcatcaacaatcaatcaggataaggaagcaaagaggatgaagaaggattctttggaaggacttgttgggagatatctagatctgaaatcaaaacaagttgaggatgaggttacacaaatggcgaaaggaaaagaatctgctcaaggtaatgacttctccatcatgagatgcatttctgttcttagatccatgaatgtgactgcagatgagaagataaaagcagctgaggtgttcgacataccaaacaacagagagacatttatcagttttagtgttgatgaaccagaaactgccctcctatggttaagacggaagattgataagctctaaggaaatattggtcatatggagacagttctgcacggcgttctgagtctgcatgtgccggtatgagctatatatatgttgcatttctc

SEQ ID NO: 75215 - DNA, 2546 bp, Zea Mays
gtgagatcttgtcgatctttggttcatcactgttgacccccaacgccaacggtactgcaacatcaagattatcccttctccagtaagagtaggcgaggacgagcctcccccatcttgggtgttggtgtctgacccattttctcaagttttgctatggatatgagcaatagagatcaccttaggaggagggaggaggatgatgatgacctcttccttttgattcccccttccctacatctcttgggctatcttggacgtagtaaaaagaaattgaggcatacatcagcgctgaccggggaggaaaaggttcgagagctacttgaaggccatatcaagaactgcagggtatcatttagaatggaaccttacattttcaaatccttggacaactatcttagaatggaaggattggttaaagatacaagaatcaaagttgaggaaaaacttggcttcttcctatacatgattagccacaatgcgacatttgaaggtctccaagtcttttttggtcatagcaatgatacatttcaccgtgtcatcaaacatttcttcaacattgttatccctggccttagcatgtggttcctaaagcctccttccaatcaagttcatcctaaaattcatggagacaaccgattttatccatacttcaagaattgcataggttcaatagatggaacccatgttccagtatcaatgtcacactatcaagccgcaccattcaggaatagaaaagggacccttagccaaaacgtgatggttgtgtgtgattttaaccttaacataacttatgtgtcagtcggatgggaaggatcagcaacagattcaatggttcttagatctgcaatgaacaatgttgtaggaaagtttgaagtaccttctgggaagtactacatagtagatggtggttatgccaatacgacttcctttattgcaccatattgtggggttagatatcacttgaaagagtttggccatggtcatcgaaggcctcaaaatcacaaagagttattgaaccatcgccatgttgttttaagaaatcatgtatagagggctttgggtgtcataaagaagagatttccaatcctcaaagttgctacccttcacaaaacggaaaatcaagcaaaaatacctattgctgctacagtcctccataacttaattcggtcacataatggtgatgagagatggctagaaaatgatcaaggaaatatcaacccacaaagttttgtcaacctacctacccaatagtgaccatggaaatgatgaagggaatatggaaaggaataacttaagagatatggtagcttatcatatgtgggcagattatgagcaacgtagaaatcagtgaatcatttctgtaatggatattgtgtaatcaataaatgtcatttttgtaatggatattttgtaatggatattttgtgatcaaggaattattgtgttttttactatggccataaaagtagaaatgatgttcatagtttcttttttgctggtgattctctataatagatatgatgttcacaagaggttctcccaaaattttgatgttatctaaagctgctcaaaagaaggtttctcctaaagcttctacatcaaagaagtgtggaggtggtgttcatagagcagcatgaaattctgaattggagaagagcctcgttgatttgttgtttgagcacaatgtacctccatatagggctcaaaatggctggagtctagatgcttggaacaaaattgttactaaattcaacaagaagcatgagtatgtcacattcaacaagattcaaattcaggagaaggagagggaattgaaaagggattacaagatgttgaaagaggctagaaagcaaagtggtgtttcctggaatgagaaacgatgcatggttgttgctgatccaccaatatgggaaaacatcaaaaaatcatttcctagggccaagaaatttcaaaagaagtctttccctctctttgatgctcttggggaactatatgatggacacattgctcaagggacctggaacataacatctacacagctaccacaagaatggaacacaatttcaaatgaagaagaacaagtgaacaccacaataatggatgaggaaggcattattcaacaacaaccacaagaagaggattcaatattggaacaagatgaagatcctataattggaaggattgaacagaggtctactgcaacgagaaggtctactgcatcaacaatcaatcaggataaggaagcaaagaggatgaagaaggattctttggaaggacttgttgggagatatctagatctgaaatcaaaacaagttgaggatgaggttacacaaatggcgaaaggaaaagaatctgctcaaggtaatgacttctccatcatgagatgcatttctgttcttagatccatgaatgtgactgcagatgagaagataaaagcagctgaggtgttcgacataccaaacaacagagagacatttatcagttttagtgttgatgaaccagaaactgccctcctatggttaagacggaagattgataagctctaa

SEQ ID NO: 75216 - DNA, 2611 bp, Zea Mays
atgactcctagggtctggaaacaaaccacggagctgtgaccgctccgtgaccgaggggagcggcggcggcggcgcaaggagtcttcctctccgacgccggcaacgtcgacaccgctggcaagcttctctccgattatcccttctccagtaagagtaggcgaggacgagcctcccccatcttgggtgttggtgtctgacccattttctcaagttttgctatggatatgagcaatagagatcaccttaggaggagggaggaggatgatgatgacctcttccttttgattcccccttccctacatctcttgggctatcttggacgtagtaaaaagaaattgaggcatacatcagcgctgaccggggaggaaaaggttcgagagctacttgaaggccatatcaagaactgcagggtatcatttagaatggaaccttacattttcaaatccttggacaactatcttagaatggaaggattggttaaagatacaagaatcaaagttgaggaaaaacttggcttcttcctatacatgattagccacaatgcgacatttgaaggtctccaagtcttttttggtcatagcaatgatacatttcaccgtgtcatcaaacatttcttcaacattgttatccctggccttagcatgtggttcctaaagcctccttccaatcaagttcatcctaaaattcatggagacaaccgattttatccatacttcaagaattgcataggttcaatagatggaacccatgttccagtatcaatgtcacactatcaagccgcaccattcaggaatagaaaagggacccttagccaaaacgtgatggttgtgtgtgattttaaccttaacataacttatgtgtcagtcggatgggaaggatcagcaacagattcaatggttcttagatctgcaatgaacaatgttgtaggaaagtttgaagtaccttctgggaagtactacatagtagatggtggttatgccaatacgacttcctttattgcaccatattgtggggttagatatcacttgaaagagtttggccatggtcatcgaaggcctcaaaatcacaaagagttattgaaccatcgccatgttgttttaagaaatcatgtatagagggctttgggtgtcataaagaagagatttccaatcctcaaagttgctacccttcacaaaacggaaaatcaagcaaaaatacctattgctgctacagtcctccataacttaattcggtcacataatggtgatgagagatggctagaaaatgatcaaggaaatatcaacccacaaagttttgtcaacctacctacccaatagtgaccatggaaatgatgaagggaatatggaaaggaataacttaagagatatggtagcttatcatatgtgggcagattatgagcaacgtagaaatcagtgaatcatttctgtaatggatattgtgtaatcaataaatgtcatttttgtaatggatattttgtaatggatattttgtgatcaaggaattattgtgttttttactatggccataaaagtagaaatgatgttcatagtttcttttttgctggtgattctctataatagatatgatgttcacaagaggttctcccaaaattttgatgttatctaaagctgctcaaaagaaggtttctcctaaagcttctacatcaaagaagtgtggaggtggtgttcatagagcagcatgaaattctgaattggagaagagcctcgttgatttgttgtttgagcacaatgtacctccatatagggctcaaaatggctggagtctagatgcttggaacaaaattgttactaaattcaacaagaagcatgagtatgtcacattcaacaagattcaaattcaggagaaggagagggaattgaaaagggattacaagatgttgaaagaggctagaaagcaaagtggtgtttcctggaatgagaaacgatgcatggttgttgctgatccaccaatatgggaaaacatcaaaaaatcatttcctagggccaagaaatttcaaaagaagtctttccctctctttgatgctcttggggaactatatgatggacacattgctcaagggacctggaacataacatctacacagctaccacaagaatggaacacaatttcaaatgaagaagaacaagtgaacaccacaataatggatgaggaaggcattattcaacaacaaccacaagaagaggattcaatattggaacaagatgaagatcctataattggaaggattgaacagaggtctactgcaacgagaaggtctactgcatcaacaatcaatcaggataaggaagcaaagaggatgaagaaggattctttggaaggacttgttgggagatatctagatctgaaatcaaaacaagttgaggatgaggttacacaaatggcgaaaggaaaagaatctgctcaaggtaatgacttctccatcatgagatgcatttctgttcttagatccatgaatgtgactgcagatgagaagataaaagcagctgaggtgttcgacataccaaacaacagagagacatttatcagttttagtgttgatgaaccagaaactgccctcctatggttaagacggaagattgataagctctaa

SEQ ID NO: 75217 - DNA, 1276 bp, Zea Mays
ctcatacctctcatgtacgaatgaattgagaaagagtgtttctgtctctgtccatcacgcggcataagcatgtacatctaagatctcagatttgtctacttttctgtttccatatgcatgcctataactacagatctttgattatatttattattagggaacgatagtaattggagtacgtacagtttcacacagttacttttaattagtagtggttcctaattaaagagaagccatgatttgaattctgacatgcaagtgaaacaaactgtcttgagcttagtgtggtttatttattttttatgttgcaacgttatttttcctctattttcttaatggcatataagcttcccaacaaacttacaagtaaaagagagtcaggtaggagaattaagaaaaaaaaaagaagtcaacgaacttgattacatggccctagctacgtacgtacaaacaaaggagagatatttttcctcgattttcttaatgaccgttgatgtcttcacaacatgtttcatatttgttttttgtcgttatcatatcgctaaaatatacagcacccccaattaatagtactctctctccatatatccaatcggttcccttgtgcgcgtcgtctacatttatttattaacaacagtttttcaacacgaattgaacggatgatgcatgaggcagcaggaccacccaagactggcccccgatcaaaccattcctgagaagcgccttgacagcctcggcacgccgacgccggacactgttggtgaaggtgtacatggaaggcgttgcgatcggccggaagctggacttgctcttgctggatggttgctgatgctatggagtaccatcaacgagttcctcacgagaagcctgcacatgttctcacctatgaagaccgggatggagactggatgatggttggggatgtaccgtgggagctcttccttggaagtgtgaagaaactgaggatttgcaagaacagataaatgctagtacgttagcaaagcttattattcgtgcgctgcatggactctatttctttcttctttttatttatatcggttcatacagcagaaagattttgctggccacagagtggacatgcatgtgataccgaggctatatatactgatcgtgtacagtatactgaagaaaagtcaatcttgataccttccctagaaattaaattttggtattttttatgtttccttttctgttttctctgagtgccttgtaaataccatggctatttgttaaagaagaggcaatttgcgtgaag

SEQ ID NO: 75218 - DNA, 321 bp, Zea Mays
ggtacaaaagccaaccccaacgaccaccgggcctcaattgttgacagtagcgtggacgcatcgtcatcattcgagcagaggggagagagagagagagagagagagagatgaaggagggcacggcgaactgcatcgacatcctcatcgccatcatcctcccgcctctcggcgtcttcctcaagttcggctgcaaggtcgaattctggctctgcctcctgctcaccttcctcgcctatctccccgggatcatctacgcgatatacgttatcaccaaggactagccagctagcgccgtaaaccgggacaagcggtgaggtcacg

SEQ ID NO: 75219 - DNA, 957 bp, Zea Mays
ttgattctatatatatcttctcgttctctaacaacttctttatattttacccgtcacttaaaaaacactagctccaatctctatctttaatggtccagaaactaataatagagaaagagaatatctagatctaatttttttaaacatgaaaggctcaagaacattgcatgattcctaagaaacctcgtgagcacgaagcaataatagtctctactagttgtcgtacaatgactattattccctataaaattcaaggcaaatctctctcattttttttgggtatcatagaaaagtgtatcccaactagtttcccgcgcgttgcaaatgtcgtgtagccggttctccctttttgcttcacaaggatcagtcctcccgttcgtggctttttttgcgtgtgaattatgaactagtaactgatgcgcgcccgcgcgcgttgaaagcattatgtgtttcttctttgatgccaagggttcttacttcaacatgttgatgaatcacaaaaaaatagtgagctatatgttattacctttggagtattggtatttgtatcctttttatgaacagaggtagtaccataatccctgtaataaagtacaattacagagaataatcacacatatgtgaaaatcctcgatgtaaaggaaaactataaatgtatgagttagtcgactaagttccaaaatttgttaatgacaactgtcatgcaaatattaatttgtagtagaacatactgtcacagtgcacatttttttcataaggcataacagatgatttaactacaactaaaccttgatagagtactgtaaaactggaacaccagtcaagtagaacataaaaaaatcaggcacatgtcatagattgataacgtgcttaatcgaatattttatggcattggaggaagcctcattcttgttattttttttccaatattttgtcgagggatgccttaaaatcaag

SEQ ID NO: 75220 - DNA, 966 bp, Zea Mays
aacttcttgataccctatcatattaacatttaatcagaaaatgaccagtcagggagcgatgctgcagatgctctatcaagattctattatccaccggttgctgctgtaactgtttcgtatccaaaggaagcaattagaaaagaatgcttaattgatggggaactccagggctttggccagttgcatccacgtagtcaaggagttgagacattaggaacaatatacagttcctcactctttccaaatcgtgctcctgacggtagggtgttacttctaaactacataggaggtgctacaaacacaggaattgtttccaagactgaaagtgagctggtcgaagcagttgaccgtgacctccgaaaaatgcttataaattctacagcagtggaccctttagtccttggtgttcgagtttggccacaagccatacctcagttcctggtaggacatcttgatcttctggaagccgcaaaagctgccctggaccgaggtggctacgatgggctgttcctaggagggaactatgttgcaggagttgccctgggcagatgcgttgagggcgcgtatgaaagtgcctcgcaaatatctgacttcttgaccaagtatgcctacaagtgatgaaagaagtggagcgctacttgttaatcgtttatgttgcatagatgaggtgcctccggggaaaaaaagcttgaatagtattttttattcttattttgtaaattgcatttctgttcttttttctatcagtaattagttatattttagttctgtaggagattgttctgttcactgcccttcaaaagaaattttatttttcattcttttatgagagctgtgctacttagattgccttggatgattattttgcttctgcgtttttctggaagtacaaacaaattcaaatattccctctgtcccaaaataatagtcgttttagctctagtcttttaacagaatctgccactt

SEQ ID NO: 75221 - DNA, 2355 bp, Zea Mays
ccaaggccaggttctagagcgaacaaggcccacgtcacccgtggcccgtcaggcgaagcaggtcttgtgtagactttgagagggattggatattaacggaaccaatcacgcacgggaatgcgattcccagcccacctgtaacgttccagtgggccatccttaactccaagcccaacggccctaccccatctcgtcgtgtcatccactccgccgcacaggcgctcagctccgcaacgccgccggaaatggtcgccgccaccgccaccgccaccgccatggccaccgctgcatcgccgctactcaacgggacccgaatacctgcgcggctccgccatcgaggactcagcgtgcgctgcgctgctgtggcgggcggcgcggccgaggcaccggcttccaccggcgcgcggctgtccgcggactgcgtcgtggtgggcggaggcatcagtggcctctgcaccgcgcaggcgctggccacgcggcacggcgtcggggacgtgcttgtcacggaggcccgcgcccgccccggcggcaacattaccaccgtcgagcgccccgaggaagggtacctctgggaggagggtcccaacagcttccagccctccgaccccgttctcaccatggccgtggacagcggactgaaggatgacttggtttttggggacccaaacgcgccgcgtttcgtgctgtgggaggggaagctgaggcccgtgccatccaagcccgccgacctcccgttcttcgatctcatgagcatcccagggaagctcagggccggtctaggcgcgcttggcatccgcccgcctcctccaggccgcgaagagtcagtggaggagttcgtgcgccgcaacctcggtgctgaggtctttgagcgcctcattgagcctttctgctcaggtgtctatgctggtgatccttctaagctcagcatgaaggctgcatttgggaaggtttggcggttggaagaaactggaggtagtattattggtggaaccatcaagacaattcaggagaggagcaagaatccaaaaccaccgagggatgcgtaagagattgatgcattttctttttgttccgttaattggctgttctgccatattgatctgttttaacctcttttagccgccttccgaagccaaaagggcagacagttgcatctttcaggaagggtcttgccatgcttccaaatgccattacatccagatatttatttatgcagtgaaccagctatggacatggggcatgtggactgttcagatagatggatgcctaagcttgggtagtaaagtcaaactatcatggaaactcacgagcattacaaaatcagatgacaagggatatgttttggagtatgaaacgccagaaggggttgtttcggtgcaggctaaaagtgttatcatgactattccatcatatgttgctagcaacattttgcgtccactttcaagcgatgctgcagatgctctatcaagattctattatccaccggttgctgctgtaactgtttcgtatccaaaggaagcaattagaaaagaatgcttaattgatggggaactccagggctttggccagttgcatccacgtagtcaaggagttgagacattaggaacaatatacagttcctcactctttccaaatcgtgctcctgacggtagggtgttacttctaaactacataggaggtgctacaaacacaggaattgtttccaagactgaaagtgagctggtcgaagcagttgaccgtgacctccgaaaaatgcttataaattctacagcagtggaccctttagtccttggtgttcgagtttggccacaagccatacctcagttcctggtaggacatcttgatcttctggaagccgcaaaagctgccctggaccgaggtggctacgatgggctgttcctaggagggaactatgttgcaggagttgccctgggcagatgcgttgagggcgcgtatgaaagtgcctcgcaaatatctgacttcttgaccaagtatgcctacaagtgatgaaagaagtggagcgctacttgttaatcgtttatgttgcatagatgaggtgcctccggggaaaaaaagcttgaatagtattttttattcttattttgtaaattgcatttctgttcttttttctatcagtaattagttatattttagttctgtaggagattgttctgttcactgcccttcaaaagaaattttatttttcattcttttatgagagctgtgctacttagattgccttggatgattattttgcttctgcgtttttctggaagtacaaacaaattcaaatattccctctgtcccaaaataatagtcgttttagctctagtcttttaacagaatctgccactt

SEQ ID NO: 75222 - DNA, 2253 bp, Zea Mays
ccaaggccaggttctagagcgaacaaggcccacgtcacccgtggcccgtcaggcgaagcaggtcttgtgtagactttgagagggattggatattaacggaaccaatcacgcacgggaatgcgattcccagcccacctgtaacgttccagtgggccatccttaactccaagcccaacggccctaccccatctcgtcgtgtcatccactccgccgcacaggcgctcagctccgcaacgccgccggaaatggtcgccgccaccgccaccgccaccgccatggccaccgctgcatcgccgctactcaacgggacccgaatacctgcgcggctccgccatcgaggactcagcgtgcgctgcgctgctgtggcgggcggcgcggccgaggcaccggcttccaccggcgcgcggctgtccgcggactgcgtcgtggtgggcggaggcatcagtggcctctgcaccgcgcaggcgctggccacgcggcacggcgtcggggacgtgcttgtcacggaggcccgcgcccgccccggcggcaacattaccaccgtcgagcgccccgaggaagggtacctctgggaggagggtcccaacagcttccagccctccgaccccgttctcaccatggccgtggacagcggactgaaggatgacttggtttttggggacccaaacgcgccgcgtttcgtgctgtgggaggggaagctgaggcccgtgccatccaagcccgccgacctcccgttcttcgatctcatgagcatcccagggaagctcagggccggtctaggcgcgcttggcatccgcccgcctcctccaggccgcgaagagtcagtggaggagttcgtgcgccgcaacctcggtgctgaggtctttgagcgcctcattgagcctttctgctcagcatgaaggctgcatttgggaaggtttggcggttggaagaaactggaggtagtattattggtggaaccatcaagacaattcaggagaggagcaagaatccaaaaccaccgagggatgcgtaagagattgatgcattttctttttgttccgttaattggctgttctgccatattgatctgttttaacctcttttagccgccttccgaagccaaaagggcagacagttgcatctttcaggaagggtcttgccatgcttccaaatgccattacatccagcttgggtagtaaagtcaaactatcatggaaactcacgagcattacaaaatcagatgacaagggatatgttttggagtatgaaacgccagaaggggttgtttcggtgcaggctaaaagtgttatcatgactattccatcatatgttgctagcaacattttgcgtccactttcaagcgatgctgcagatgctctatcaagattctattatccaccggttgctgctgtaactgtttcgtatccaaaggaagcaattagaaaagaatgcttaattgatggggaactccagggctttggccagttgcatccacgtagtcaaggagttgagacattaggaacaatatacagttcctcactctttccaaatcgtgctcctgacggtagggtgttacttctaaactacataggaggtgctacaaacacaggaattgtttccaagactgaaagtgagctggtcgaagcagttgaccgtgacctccgaaaaatgcttataaattctacagcagtggaccctttagtccttggtgttcgagtttggccacaagccatacctcagttcctggtaggacatcttgatcttctggaagccgcaaaagctgccctggaccgaggtggctacgatgggctgttcctaggagggaactatgttgcaggagttgccctgggcagatgcgttgagggcgcgtatgaaagtgcctcgcaaatatctgacttcttgaccaagtatgcctacaagtgatgaaagaagtggagcgctacttgttaatcgtttatgttgcatagatgaggtgcctccggggaaaaaaagcttgaatagtattttttattcttattttgtaaattgcatttctgttcttttttctatcagtaattagttatattttagttctgtaggagattgttctgttcactgcccttcaaaagaaattttatttttcattcttttatgagagctgtgctacttagattgccttggatgattattttgcttctgcgtttttctggaagtacaaacaaattcaaatattccctctgtcccaaaataatagtcgttttagctctagtcttttaacagaatctgccactt

SEQ ID NO: 75223 - DNA, 2291 bp, Zea Mays
ccaaggccaggttctagagcgaacaaggcccacgtcacccgtggcccgtcaggcgaagcaggtcttgtgtagactttgagagggattggatattaacggaaccaatcacgcacgggaatgcgattcccagcccacctgtaacgttccagtgggccatccttaactccaagcccaacggccctaccccatctcgtcgtgtcatccactccgccgcacaggcgctcagctccgcaacgccgccggaaatggtcgccgccaccgccaccgccaccgccatggccaccgctgcatcgccgctactcaacgggacccgaatacctgcgcggctccgccatcgaggactcagcgtgcgctgcgctgctgtggcgggcggcgcggccgaggcaccggcttccaccggcgcgcggctgtccgcggactgcgtcgtggtgggcggaggcatcagtggcctctgcaccgcgcaggcgctggccacgcggcacggcgtcggggacgtgcttgtcacggaggcccgcgcccgccccggcggcaacattaccaccgtcgagcgccccgaggaagggtacctctgggaggagggtcccaacagcttccagccctccgaccccgttctcaccatggccgtggacagcggactgaaggatgacttggtttttggggacccaaacgcgccgcgtttcgtgctgtgggaggggaagctgaggcccgtgccatccaagcccgccgacctcccgttcttcgatctcatgagcatcccagggaagctcagggccggtctaggcgcgcttggcatccgcccgcctcctccagtttcagggccgcgaagagtcagtggaggagttcgtgcgccgcaacctcggtgctgaggtctttgagcgcctcattgagcctttctgctcaggtgtctatgctggtgatccttctaagctcagcatgaaggctgcatttgggaaggtttggcggttggaagaaactggaggtagtattattggtggaaccatcaagacaattcaggagaggagcaagaatccaaaaccaccgagggatgcgtaagagattgatgcattttctttttgttccgttaattggctgttctgccatattgatctgttttaacctcttttagccgccttccgaagccaaaagggcagacagttgcatctttcaggaagggtcttgccatgcttccaaatgccattacatccagcttgggtagtaaagtcaaactatcatggaaactcacgagcattacaaaatcagatgacaagggatatgttttggagtatgaaacgccagaaggggttgtttcggtgcaggctaaaagtgttatcatgactattccatcatatgttgctagcaacattttgcgtccactttcaagcgatgctgcagatgctctatcaagattctattatccaccggttgctgctgtaactgtttcgtatccaaaggaagcaattagaaaagaatgcttaattgatggggaactccagggctttggccagttgcatccacgtagtcaaggagttgagacattaggaacaatatacagttcctcactctttccaaatcgtgctcctgacggtagggtgttacttctaaactacataggaggtgctacaaacacaggaattgtttccaagactgaaagtgagctggtcgaagcagttgaccgtgacctccgaaaaatgcttataaattctacagcagtggaccctttagtccttggtgttcgagtttggccacaagccatacctcagttcctggtaggacatcttgatcttctggaagccgcaaaagctgccctggaccgaggtggctacgatgggctgttcctaggagggaactatgttgcaggagttgccctgggcagatgcgttgagggcgcgtatgaaagtgcctcgcaaatatctgacttcttgaccaagtatgcctacaagtgatgaaagaagtggagcgctacttgttaatcgtttatgttgcatagatgaggtgcctccggggaaaaaaagcttgaatagtattttttattcttattttgtaaattgcatttctgttcttttttctatcagtaattagttatattttagttctgtaggagattgttctgttcactgcccttcaaaagaaattttatttttcattcttttatgagagctgtgctacttagattgccttggatgattattttgcttctgcgtttttctggaagtacaaacaaattcaaatattccctctgtcccaaaataatagtcgttttagctctagtcttttaacagaatctgccactt

SEQ ID NO: 75224 - DNA, 2353 bp, Zea Mays
caaattcagcctgcaaccaaggccaggttctagagcgaacaaggcccacgtcacccgtggcccgtcaggcgaagcaggtcttgtgtagactttgagagggattggatattaacggaaccaatcacgcacgggaatgcgattcccagcccacctgtaacgttccagtgggccatccttaactccaagcccaacggccctaccccatctcgtcgtgtcatccactccgccgcacaggcgctcagctccgcaacgccgccggaaatggtcgccgccaccgccaccgccaccgccatggccaccgctgcatcgccgctactcaacgggacccgaatacctgcgcggctccgccatcgaggactcagcgtgcgctgcgctgctgtggcgggcggcgcggccgaggcaccggcttccaccggcgcgcggctgtccgcggactgcgtcgtggtgggcggaggcatcagtggcctctgcaccgcgcaggcgctggccacgcggcacggcgtcggggacgtgcttgtcacggaggcccgcgcccgccccggcggcaacattaccaccgtcgagcgccccgaggaagggtacctctgggaggagggtcccaacagcttccagccctccgaccccgttctcaccatggccgtggacagcggactgaaggatgacttggtttttggggacccaaacgcgccgcgtttcgtgctgtgggaggggaagctgaggcccgtgccatccaagcccgccgacctcccgttcttcgatctcatgagcatcccagggaagctcagggccggtctaggcgcgcttggcatccgcccgcctcctccaggccgcgaagagtcagtggaggagttcgtgcgccgcaacctcggtgctgaggtctttgagcgcctcattgagcctttctgctcaggtgtctatgctggtgatccttctaagctcagcatgaaggctgcatttgggaaggtttggcggttggaagaaactggaggtagtattattggtggaaccatcaagacaattcaggagaggagcaagaatccaaaaccaccgagggatgcgtaagagattgatgcattttctttttgttccgttaattggctgttctgccatattgatctgttttaacctcttttagccgccttccgaagccaaaagggcagacagttgcatctttcaggaagggtcttgccatgcttccaaatgccattacatccagcttgggtagtaaagtcaaactatcatggaaactcacgagcattacaaaatcagatgacaagggatatgttttggagtatgaaacgccagaaggggttgtttcggtgcaggctaaaagtgttatcatgactattccatcatatgttgctagcaacattttgcgtccactttcaagccactcccgggaaaggagacgttccattccaactggctccgaaaccaaacgagcgatgctgcagatgctctatcaagattctattatccaccggttgctgctgtaactgtttcgtatccaaaggaagcaattagaaaagaatgcttaattgatggggaactccagggctttggccagttgcatccacgtagtcaaggagttgagacattaggaacaatatacagttcctcactctttccaaatcgtgctcctgacggtagggtgttacttctaaactacataggaggtgctacaaacacaggaattgtttccaagactgaaagtgagctggtcgaagcagttgaccgtgacctccgaaaaatgcttataaattctacagcagtggaccctttagtccttggtgttcgagtttggccacaagccatacctcagttcctggtaggacatcttgatcttctggaagccgcaaaagctgccctggaccgaggtggctacgatgggctgttcctaggagggaactatgttgcaggagttgccctgggcagatgcgttgagggcgcgtatgaaagtgcctcgcaaatatctgacttcttgaccaagtatgcctacaagtgatgaaagaagtggagcgctacttgttaatcgtttatgttgcatagatgaggtgcctccggggaaaaaaagcttgaatagtattttttattcttattttgtaaattgcatttctgttcttttttctatcagtaattagttatattttagttctgtaggagattgttctgttcactgcccttcaaaagaaattttatttttcattcttttatgagagctgtgctacttagattgccttggatgattattttgcttctgcgtttttctggaagtacaaacaaattcaaatattccctctgtcccaaaataatagtcgttttagctctagtcttttaacagaatctgccactt

SEQ ID NO: 75225 - DNA, 1318 bp, Zea Mays
ccaaggccaggttctagagcgaacaaggcccacgtcacccgtggcccgtcaggcgaagcaggtcttgtgtagactttgagagggattggatattaacggaaccaatcacgcacgggaatgcgattcccagcccacctgtaacgttccagtgggccatccttaactccaagcccaacggccctaccccatctcgtcgtgtcatccactccgccgcacaggcgctcagctccgcaacgccgccggaaatggtcgccgccaccgccaccgccaccgccatggccaccgctgcatcgccgctactcaacgggacccgaatacctgcgcggctccgccatcgaggactcagcgtgcgctgcgctgctgtggcgggcggcgcggccgaggcaccggcttccaccggcgcgcggctgtccgcggactgcgtcgtggtgggcggaggcatcagtggcctctgcaccgcgcaggcgctggccacgcggcacggcgtcggggacgtgcttgtcacggaggcccgcgcccgccccggcggcaacattaccaccgtcgagcgccccgaggaagggtacctctgggaggagggtcccaacagcttccagccctccgaccccgttctcaccatggccgtggacagcggactgaaggatgacttggtttttggggacccaaacgcgccgcgtttcgtgctgtgggaggggaagctgaggcccgtgccatccaagcccgccgacctcccgttcttcgatctcatgagcatcccagggaagctcagggccggtctaggcgcgcttggcatccgcccgcctcctccaggccgcgaagagtcagtggaggagttcgtgcgccgcaacctcggtgctgaggtctttgagcgcctcattgagcctttctgctcaggtgtctatgctggtgatccttctaagctcagcatgaaggctgcatttgggaaggtttggcggttggaagaaactggaggtagtattattggtggaaccatcaagacaattcaggagaggagcaagaatccaaaaccaccgagggatgcccgccttccgaagccaaaagggcagacagttgcatctttcaggaagggtcttgccatgcttccaaatgccattacatccagcttgggtagtaaagtcaaactatcatggaaactcacgagcattacaaaatcagatgacaagggatatgttttggagtatgaaacgccagaaggggttgtttcggtgcaggctaaaagtgttatcatgactattccatcatatgttgctagcaacattttgcgtccactttcagaccatgttgcacagaatatctc

SEQ ID NO: 75226 - DNA, 1111 bp, Zea Mays
cggcaaccaaacaatataccgtcgtttttgctccgcaagtcttctctgcgcagcttggctctcttgcctgcttcttgcccagcctgccgtctagctagtttcattcatctatcagacaggtcccgctgctgctccggccgctcggaatggcctcgccgtcgacagaagccccacctctcccgaccctccgagacgtcatcgcccacgatgacgacgacgaccacttcatcgcagaagaggaggaggatgaggagtgggacgacatgagcaagcgcatgtcgcgcctgtccatggaaggttccgaggcgggcgacgccgacgacgaggacgacggcggagaagatgagggggaggaggacgacgacgagttcgacgacgtgcggtcggacgtgaacgccgccgccacgtaccgcgcgtggcctccgcgcgacgagccgcagcaggccccgtcggcggcgtcgctcccgggcacgccggaccgcggcgcgcaggcgccgtggtggcccgggccgagcgccaaggggtacgcgagcgagacggaggcgcggtggccgcccggcgcggacgggcgcggcgggaggcggcagcggcagcggatggcggcgcgggaggtgtggctggagcgcgcgtggcggacgcgcaagcagcggcgccagctgcaggaggaggttcccgtgcccgtggtggtcctcggcggcggcgggggcgactcaccggcgagccgcggcgtggcgatggacatggaggaggtccgcgcgtgccgggacctgggcctcgaccttccctgtgactggaccgtggagatcccatcctgcgcgctctccgtctccggcgtcgacaccgccagcagcggcggcaactcgccggcctccggcagctggcgcatctccagccccgtaggcgcaaccatctgttttgtcaacgagtgctccggccgatcggcttgtccgtacgcacgcgagtcgcgtcggtccggccgagccgatgaggtcgctcctcgctcgccccgcgtcaccaaccaggtcaattcgtcgccgcgcgcacgtccatttggcatcaagccgacggggacgggggggcatttgcacgcacagcacctcgcgcggcgcgg

SEQ ID NO: 75227 - DNA, 414 bp, Zea Mays
cccatctacctaacctagcagccgccgctccctggcttctctccccgccacagccgtcgccgcctcccttccctcttctctctcccctcaactctcctcattctccacaggctgagcagcagccgccccattctgcggttcaatcaccgcccacgcagaacccctccgccctccgctccttccagctcgctctctacctgcaccagcctcgctcgccctttgctcgccgccgccatggggaggggaaagttcaagggaaagcccaccggccgccgcaacttctccacactagaggagatcgctgctggtacttcaggtcgccctcgcacctttatgaagacaggcaaggctaagagaattgatctttttatgggcgaagtgtgaagatggcttgggacgaattctctagatcgc

SEQ ID NO: 75228 - DNA, 577 bp, Zea Mays
cccatctacctaacctagcagccgccgctccctggcttctctccccgccacagccgtcgccgcctcccttccctcttctctctcccctcaactctcctcattctccacaggctgagcagcagccgccccattctgcggttcaatcaccgcccacgcagaacccctccgccctccgctccttccagctcgctctctacctgcaccagcctcgctcgccctttgctcgccgccgccatggggaggggaaagttcaagggaaagcccaccggccgccgcaacttctccacactagaggagatcgctgctggtacttcaggtcgccctcgcacctttatgaagccaacagctttctccaattcatattcatactgccccaaggaagatcactttctagaatgactacatcgattcaataattttatggagtaattatgtttggcgtcacccgtggaagattcaattcatatcatgttacttattgcaattatcacttgtcttgcagacaggcaaggctaagagaattgatctttttatgggcgaagtgtgaagatggcttgggacgaattctctagatcgc

SEQ ID NO: 75229 - DNA, 2213 bp, Zea Mays
gtcagcagcaatgtatttatgaaattggaaggctgcattctcatatgcaccacattacatttacggatcttgcaaagggcagattgctatcaccatgaagatgcagtgatccatccattaacatggccgtgacactattgacttcttaaggagatgatgagttaaagtgtttttccagtttggacggttatggaaaaaaagcaagttaccatgttcattcagaaaagtttagtttcttacctgtgcagtttaagtaaggaactgtaagaacaggatatcatcgtcaaaatgtctagtctattagttaagctgtttaagggattggtttgttttattgtggccttttcgctattgttattttataagggatgccctgtgtctatagaaagtgaggctttctccagcaaatcgtgcatatagccgtgcaaaacactgttttgcactgtagatagcactatttgcagagtggagttgaaataggtggtgggataggtaatgagatatgagagctgctggagatagcctaactagaagaactgcacaactctagtctgagcagcttataaaatagcaatagatagcaatcagtaccgatcggtttagctccgatgtcggtcggttcgaccggccagtactgatccatgcactggagaatcagttggtaccgacccttaccggtgagtaccgaccacatgttgcacgtgccatatcctgattgtttcacacctttttgactgtttgaagttcgaaacatttcaaaaaatatatataaattttctaaaaacaactggctcacttgatgtgattggcttccaagagggcacatataccattttcattagcatagatatggaagtcttcgcagtcatgctcagatcggagcaggtgaagacggtaggcaagacaggctccaaatatgccatggcaccctatgtgagcttctacactccaggtactggcattgtgctcatctttaacctttacatcttatatatagatgtttgtgttgtctgtgatctgcaaaatttagtgaaacaaagggtaagtaagattttacttatacaggaatatgaatcatggtatctgtgcataggagtcagcagcaatgtatttatgaaattagaagtctgcattctcatatgcaccacattacttgtacggttacgggtatttaaccctagtatgtgcaacacagttttgcatctgactatatgtttttcgttgtgatttatgtgtcatactataagagttagcaaaactagattgggatgtatgaacttatagttttttgtggttgttctcactagcttaatcttggtctggctctagatattaagaaacattcatgaaattagctagttgtttatggaacttgatgatctattgttcttttacttactttatttatgcttcaatgacctatctgattcctgatgcatgatccaaatccatgtacatgtctcaaatatgtgtaactgttacatggttgaaagttctctgcattgtatcttttcagatcgtgcaaagggatttctatcaccatgaagatgcagtgatccatccattaacgtgaccgtggtactattgactttttaaaggaggtgatgagttaaggccctccgcactcatactaatataaatttctaccctaaaaagaatattctgtcctagtcagcaaaattctttaatctataccacaattctccgcacacatgtttactctatatctcaaccctatactaattatcatatataattttatttcttcccaattctctttctctttgcactcaactattgaaagacacaggttgtccgcccgtgtacggcgagtaggagggaacaaactctacaaaagtacaaatagagttttccatgctctctcaaattttacagttgcatttacaaagtgtctgcgccatttgtctactgcatatgtataccgtttgctttggcgttcgtcaccgcggccagcctaagtgttttgtttccggtttggacggtttatgggaaaaaaagtaagttactatgttcattcagactatagtttcttacctgtgcggtttaagcaaggaacaggatatcatagtcaaaatgcctagtctgttggttaagctgttcaagggattggttggtttcattgtggcctttttccttcttgttattttataatggatgccttgtgtttaggccacctaaaatttatccataag

SEQ ID NO: 75230 - DNA, 3548 bp, Zea Mays
tttttttatgatgtcacagtgatatagaggaaaaacagaagttttgatgcattttacaaccagggacaaaaacatcattttcattctacgttaaccgctgttaccattaatttagacggcagctttataaatatttaatggtatggaagtaatatcgatctttttcatattatcacatactcctagctaaaaggcttaaacgacgccaattgatggttgcctggcggagaggtggcccgtgggccctcgtcgcttcctacctcttctccctgttcccgttccccaatcggcttaaatgcgcaccaaaaccaaatccaatcctcgatcggccgcgtgcacggcatggcgtctccgccgccggatctactaatcgacgacgccaccgccgagattctccttcgcctcccaccggatgacccagcgtgcctcgtgcgcgcctcccttgtctgcaaggcttggcgggagctcctctctagccccatcttcctccgccgctaccgcagattccacggcgcgccgcccctgcttggcttcctctacaacatctacgacgaacgcccctgtgctcgattcgtcgtcgccgccgacgccgccaccaccttccccttctctgcaccggcgttcgaccaattcgatttgtggttcatcgagtgccgccacgggcgcgcgctgctacaaactttcgagcggcatgcgcccgcgcgcctcgtcgtctgggacctcatcacgggcgaccagcagcacataccaatgcccgtgcccgggtacccttacttctgccgcaccgcagctgttctctgcgccgcggatggctgcgatcatcttgactgccacgggggcccatacctcgtcgtcgtcataggcgcctacgaagaagatactctcaggtgggcgagcgtctactcatcggagactggcgtatggactacgtcatcctccattcaaattgatgcctacgtcgagcaaaggcccagcctccttgccggtgacgcgctctactttagcgcacaggaaggcaaaataattgtcaaatacgacctcaatggacagagcctacatgtgatcaatgcgccggatatgtttgagccaacagagggcattgctgtgaccgtggaggacggtggtttgggactcgccggagtgaaggatggcaacctccacctgtggtcatggcaggctggtcctggcggcattgcggaatgggtgcaaggcagaatcgtaaagttgaggacgctcttccctattcttaaaccgctggactcacttgatgtgattggcttccaagagggcacagataccattttcattagcatagatatggaggtctttgcagtcacgctcagatcggagcaggtgaagaaggtaggcaagacgggctccaaatatgccatggcaccctatatcttgcaaagggcagattgctatcaccatgaagatgcagtgatccatccattaacatggccgtgacactattgacttcttaaggagatgatgagttaaagtgtttttccagtttggacggttatggaaaaaaagcaagttaccatgttcattcagaaaagtttagtttcttacctgtgcagtttaagtaaggaactgtaagaacaggatatcatcgtcaaaatgtctagtctattagttaagctgtttaagggattggtttgttttattgtggccttttcgctattgttattttataagggatgccctgtgtctatagaaagtgaggctttctccagcaaatcgtgcatatagccgtgcaaaacactgttttgcactgtagatagcactatttgcagagtggagttgaaataggtggtgggataggtaatgagatatgagagctgctggagatagcctaactagaagaactgcacaactctagtctgagcagcttataaaatagcaatagatagcaatcagtaccgatcggtttagctccgatgtcggtcggttcgaccggccagtactgatccatgcactggagaatcagttggtaccgacccttaccggtgagtaccgaccacatgttgcacgtgccatatcctgattgtttcacacctttttgactgtttgaagttcgaaacatttcaaaaaatatatataaattttctaaaaacaactggctcacttgatgtgattggcttccaagagggcacatataccattttcattagcatagatatggaagtcttcgcagtcatgctcagatcggagcaggtgaagacggtaggcaagacaggctccaaatatgccatggcaccctatgtgagcttctacactccaggtactggcattgtgctcatctttaacctttacatcttatatatagatgtttgtgttgtctgtgatctgcaaaatttagtgaaacaaagggtaagtaagattttacttatacaggaatatgaatcatggtatctgtgcataggagtcagcagcaatgtatttatgaaattagaagtctgcattctcatatgcaccacattacttgtacggttacgggtatttaaccctagtatgtgcaacacagttttgcatctgactatatgtttttcgttgtgatttatgtgtcatactataagagttagcaaaactagattgggatgtatgaacttatagttttttgtggttgttctcactagcttaatcttggtctggctctagatattaagaaacattcatgaaattagctagttgtttatggaacttgatgatctattgttcttttacttactttatttatgcttcaatgacctatctgattcctgatgcatgatccaaatccatgtacatgtctcaaatatgtgtaactgttacatggttgaaagttctctgcattgtatcttttcagatcgtgcaaagggatttctatcaccatgaagatgcagtgatccatccattaacgtgaccgtggtactattgactttttaaaggaggtgatgagttaaggccctccgcactcatactaatataaatttctaccctaaaaagaatattctgtcctagtcagcaaaattctttaatctataccacaattctccgcacacatgtttactctatatctcaaccctatactaattatcatatataattttatttcttcccaattctctttctctttgcactcaactattgaaagacacaggttgtccgcccgtgtacggcgagtaggagggaacaaactctacaaaagtacaaatagagttttccatgctctctcaaattttacagttgcatttacaaagtgtctgcgccatttgtctactgcatatgtataccgtttgctttggcgttcgtcaccgcggccagcctaagtgttttgtttccggtttggacggtttatgggaaaaaaagtaagttactatgttcattcagactatagtttcttacctgtgcggtttaagcaaggaacaggatatcatagtcaaaatgcctagtctgttggttaagctgttcaagggattggttggtttcattgtggcctttttccttcttgttattttataatggatgccttgtgtttaggccacctaaaatttatccataag

SEQ ID NO: 75231 - DNA, 2145 bp, Zea Mays
aaataacacacagaggaattcactatcgcgacagtgacatccctctgtacgttatttataataatatttggatcaaaatatttataataatattatgtatttatatcgttatgtatctatgtttaatcacggattttgtcgtcatcattataatcatgttccgtgacatcgcacggacaagtacctagtataatgattaagggcacttcgtccaaactgtttgctagagttacttatcaaatatgacggtacaccgaaagagcattgtactataaatatgaagaagaagaaaaatagacaagtgtgaaaaaaaggaaacgagaacgagaccaagcgaattgggggcggcgcggcagccagagtcatctggaaggttcgatcgcctgtcgcctcgccgccatccattccttcccttgcgcccgaagaaagacacggaaattccccccaactgataaaaggaccatggtactcgcaaagcgataggaagccaccgaaggagagaattggatagcagagagtttgcgtgtgactgtggaagcagagatggggtccggcatgagccgcggccggcggcgcggtttcggcgcaggggcgtcgggagggatgctcccactgctggcgcttcaggttctgatcgagtacggccgcgcgggcgcctctcggccgcccgtgacggcggcgttgctcgccggcaacgcgctcatctatctccgtcccggggcgctcgacgggatcctgccctctgtcacacgcgtctccttcaatccgcggctcatcgtcgaggtacccaatcttacctactcatccgtagcgcagttagaaaacgaaattcctgtacacgtatcgaaatcccacccctgtttttctgttgatctgcgagaccgcgacttgcagcagacttgcagttgttgggggtatgtggtagacaagggggaagaataaccgccaccaataataatgagattggtccacttacaaatttgctactacaccatcgcccccaatgattccccatagcaaatcacacatataggcatagcacatagcagtgtattcagttgaccagttctaagttcgcaaactaactaactgtgatttaacacttttgcagaatggcgacttggtgcgcttcttcttgtcaccattctaccacttgagcgaaagccacctgttctacaatatgacatcgctcctatggaagggtattcagcttgaaacatccatgggtagtgtcgagttcgcttccatggttgctgcattgcttgggctgtcacagggcatcgcgctgctcttgtccaaaggcctactcttgcttggtgattatactgcgtactacgaccaatacgcggttgggttctctggtgttctgtttgccatgaaggttgtgctgaacgcctggtcagaagattttgtctatctgcatgggatggtcattccggcgaaatacgctgcctgggctgagttgatcctcatccaggtcttcattcctggcacatcttttcttggccatctcagtggaatacttgctggattggtttacctttggctgaagcgggcgttgaatgggccagatcccctcactcttctggtgtcaagcattaccaaagtcgtgacctggccagtaagatttgcgcagaatcttctatggtctgcccatccacagggacgctttagaggccggggcagggttgggcgccggcaatcagcaagagatactcctcgaggtctatggagatgcccagcctgcacctatgacaactcagtttccacagatatctgtgagatgtgcagcactgcacgagaggaccatgatttttcgctgaggcagtatcatcaggctggaggtactggagaactcacagttgatgagatacgccgaaggaggctgcaaagattcggtagatgatgtaaatccattgttatcagcacactttgtgcggcgctgaacgaagctctatatgagtatgtatgatagctccattcctctgctacatagcgtaggcatatttggttcttctcgtgatggagaatgctttacattattgaattgtttctcatttttgaaggagacagttactgatgtaattttaggtacttcaaagccatagaagtatagtaatacaaattatcaagggcatatataaa

SEQ ID NO: 75232 - DNA, 2226 bp, Zea Mays
tctaaaaatcgcacccgcaggccgcaccgcagtcgtcaccaaacagcgccgcgctccgcattgcgctagggttttagaactcttcctccggtcctccccgttatccctccaaaaggcagcgcccgctagggttttagccgccgcctccttccctctcctcctccacgtctcctcaacagccgctgccacccggagccttcccgcagcgacgccatgtgggctcttcgccgagctggcaaccccctcaggttccgtgcccaaaaagttgcaagtgcccatgtctgtgcgagtcttgaggtgctgctagctgctgatgcaaagaatgtagaagagcaccatgaggcagactgccagaaaatgtgctgctgtcataaaccaaggtcaccagcctttcaattgtcattttcatctggccagtttgcttgcagtaggggtttctcctctcagccaggtgcaaattctggtgacaaagctgatgagttagaggacggattttctgatctcgaggttccaccagcagctgttcaaaacgatgacgggttggcatctgaagatagttctgatgaggatgctgctgacgaatttggcttgcctgatgtggatgctgatgcaaaacctgagaaggagcacactagaagattatctgattctattctcctcaagacattatctgattctattctcctcaagactgtgttggaagctccgaggcatcaagtcacttcagcacttgagaaatgggcaaaggatggcaatgcatttgataggggtgaactctattatgttcttcttaatcttcgaaagcggcattggtactccaaagccttggaggggtgagattgtttatagaacacttttggccaattgtgtttctgcatccaatataaaaaaatcggagcaagtttttaataggatgaaggatcttggatttccggttacacaattttctttcaatcagcttctgttactctacaaaaggctggacaggaagaagattgctgatgttcttgcaatgatggaaaaggaggatgtgaaaccatctctctttacttacaagattcttgtagatgccaagggttcagttggagatatagaagctatggagaaagtgattgaatcaatggagaaagatagcattgagccagatctcacgtttaatgctacaattgccagacactacatattttatggccagcgtgagaaagcagaggcacttctgaaggcaatggagggtgatgatatccagaaaaatcgtgctgcttgcaagactttattacctttacatgcttttctgggcaatagtgatgctgtggaaagaatttggaaggcgtgtgaggataatactcgcgtagctgagtccgtgtctgctatagaggcctttggtaagcttggtgatgttgaaaaggcagagaaggtttttgaggatatgcttgtgcattggaaaacactctcttccaaattctacaacgcgttgctaaaggtgtatgctgatcacaacctcttagacaagggtaaggaactagcaaagcggatggatgagaaccgtgtcaggtttggggccccaactctggatgcacttgtgaagctatacgttgaggctggagaggtggagaaagctgagtccctagtgcacaagctatctatacagaaccacatcaagcctatatacaacacatacatgacgctgcttgacagctactcaaagaaaggagacgtccgcaactcagagaaagtgttcaacaagttgcggcagtccggctacactgggaggatcaggatgtaccaggtgctgctccatgcttatgtacgtgctaaggcccctgcttatggattcagagagaggatgaaggctgacaacattttccccaacagtgttgtgtcaactttgattgccgctaccgatccgtttgtcaagaagaaatcgatatctgacttgctcgattaggttatggagtagtgtgagatccatcatgtttccgtgcaacgcatgtgctgccttttttttttttgcattctgctaaagaatacggcgggataataatgtgtcctagtcttgtaatgaactacaagtgtctttgcatttggactggttcgcttgtgagtcatagagattgctgaactcgtgagtcatggaaattggcaactgtgtgctatttgttcttattttgttgttactcatttcatcaatcaagtagaatcaagatgagccttttgcacatcattccg

SEQ ID NO: 75233 - DNA, 858 bp, Zea Mays
tctaaaaatcgcacccgcaggccgcaccgcagtcgtcaccaaacagcgccgcgctccgcattgcgctagggttttagaactcttcctccggtcctccccgttatccctccaaaaggcagcgcccgctagggttttagccgccgcctccttccctctcctcctccacgtctcctcaacagccgctgccacccggagccttcccgcagcgacgccatgtgggctcttcgccgagctggcaaccccctcaggttccgtgcccaaaaagttgcaagtgcccatgtctgtgcgagtcttgaggtgctgctagctgctgatgcaaagaatgtagaagagcaccatgaggcagactgccagaaaatgtgctgctgtcataaaccaaggtcaccagcctttcaattgtcattttcatctggccagtttgcttgcagtaggggtttctcctctcagccaggtgcaaattctggtgacaaagctgatgagttagaggacggattttctgatctcgaggttccaccagcagctgttcaaaacgatgacgggttggcatctgaagatagttctgatgaggatgctgctgacgaatttggcttgcctgatgtggatgctgatgcaaaacctgagaaggagcacactagaagattatctgattctattctcctcaagacattatctgattctattctcctcaagactgtgttggaagctccgaggcatcaagtcacttcagcacttgagaaatgggcaaaggatggcaatgcatttgataggggtgaactctattatgttcttcttaatcttcgaaagcggcattggtactccaaagccttggagtacatttatcctatgtacgcatcgcag

SEQ ID NO: 75234 - DNA, 1717 bp, Zea Mays
agaccgacatgttactttaccctaaacctttgcagtttgcactgccaccgcgaaggcacacagccgccgtttcttttacttgcgctcggcacgcaggcgacggctgcggcgctcaggttggggttctcatcgacggcgtcagcggcttcccctcccgcctctcgccagtcgcttcgcgccctcgcctccggtcctccgcacactggccggtgaccctgctattatctgattttcctggaggccacattttaaggactgaggttacaatggcagatgccagccctagaacagaaacatcaacagatgatactgacgacaataacgggcttgaaccaggcagaggtggtcttgttgcttctgactccagtgacagatccaaagacaaacatggagatcaaaagacattgcgtcgccttgctcaaaatcgtgaggctgcaaggaagagccgactaaggaagaaggcatatgttcaacagttggagaatagcaggctaaaacttacccaactagagcaagagctgcaaagagctcgtcagcagggcatttttatatctagttcagttgatcagtcacactccatgagtggaaatggggcattggcctttgatatggagtatgcgaggtggttggaagagcacaatcggcaaattagtgaactaagggctggtgtcagtgctcatgcaagtgatactgatcttcgaagtgttgttgataagatcatgtcacactatgatgagatttttaggctcaaaggcaatgcagccaaggcagatgtttttcacgtcttatctggcatgtggaagacaccggcggagaggtgttttttgtggctaggaggtttccgaccatctgaggttttaaagcttctttcgacacaacttgaacctctcaccgaacagcagctgtcagggataagcaaccttcagcaatcttcacagcaggctgaggatgctctttcacaaggaatggaggcccttcagcaatcattggccgaaaccttggctgggtctctttcgtcttctggatcaacaggaaatgtggcaaactacatgggtcaaatggccatggctatgggaaaacttggaacgcttgagaatttccttcgtcaggctgacaacctgcggctgcagactctacaacagatgcaaaggatcctgaccactagacagtcagctcgggcgctacttgtgataagtgattactcttcacgtctccgtgccctaagctctctctggcttgctcggcccaaggaatagcaagaacatgctatttgactgcaatacttttcacaatttggttttcaatggtcaggagatttgacaaggctgcgacagacttgattcggacatatctgcacatactatgacccaaatggaaggggatgttcatgtagcttaggctgcttagctttgtagttaagtgttgttgatgtatcattaccaactgctgtaaaattctcactctgtatgcccctgatttgcagcgaaccattagaatgcacattgatgttcacctgtcgattttttttgttcactcttaggaacacataatgctctgcccagtatcatctaaccagggtatatggctgattcaccgcactaaaacttgcatagttgatcattcagcattgctgccattgtcgttttgtatgttttccctcgtcatgcgtgagggggaaccgcaccatttactttgttaatataatatttgttggttt

SEQ ID NO: 75235 - DNA, 1604 bp, Zea Mays
agaccgacatgttactttaccctaaacctttgcagtttgcactgccaccgcgaaggcacacagccgccgtttcttttacttgcgctcggcacgcaggcgacggctgcggcgctcaggttggggttctcatcgacggcgtcagcggcttcccctcccgcctctcgccagtcgcttcgcgccctcgcctccggtcctccgcacactggccggtgaccctgcatagtattatctgattttcctggaggccacattttaaggactgaggttacaatggcagatgccagccctagaacagaaacatcaacagatgatactgacgacaataacgggcttgaaccaggcagaggtggtcttgttgcttctgactccagtgacagatccaaagacaaacatggagatcaaaagacattgcgtcgccttgctcaaaatcgtgaggctgcaaggaagagccgactaaggaagaaggcatatgttcaacagttggagaatagcaggctaaaacttacccaactagagcaagagctgcaaagagctcgtcagcagggcatttttatatctagttcagttgatcagtcacactccatgagtggaaatggggcattggcctttgatatggagtatgcgaggtggttggaagagcacaatcggcaaattagtgaactaagggctggtgtcagtgctcatgcaagtgatactgatcttcgaagtgttgttgataagatcatgtcacactatgatgagatttttaggctcaaaggcaatgcagccaaggcagatgtttttcacgtcttatctggcatgtggaagacaccggcggagaggtgttttttgtggctaggaggtttccgaccatctgaggttttaaagcttctttcgacacaacttgaacctctcaccgaacagcagctgtcagggataagcaaccttcagcaatcttcacagcaggctgaggatgctctttcacaaggaatggaggcccttcagcaatcattggccgaaaccttggctgggtctctttcgtcttctggatcaacaggaaatgtggcaaactacatgggtcaaatggccatggctatgggaaaacttggaacgcttgagaatttccttcgtcaggctgacaacctgcggctgcagactctacaacagatgcaaaggatcctgaccactagacagtcagctcgggcgctacttgtgataagagatttgacaaggctgcgacagacttgattcggacatatctgcacatactatgacccaaatggaaggggatgttcatgtagcttaggctgcttagctttgtagttaagtgttgttgatgtatcattaccaactgctgtaaaattctcactctgtatgcccctgatttgcagcgaaccattagaatgcacattgatgttcacctgtcgattttttttgttcactcttaggaacacataatgctctgcccagtatcatctaaccagggtatatggctgattcaccgcactaaaacttgcatagttgatcattcagcattgctgccattgtcgttttgtatgttttccctcgtcatgcgtgagggggaaccgcaccatttactttgttaatataatatttgttggttt

SEQ ID NO: 75236 - DNA, 1678 bp, Zea Mays
agaccgacatgttactttaccctaaacctttgcagtttgcactgccaccgcgaaggcacacagccgccgtttcttttacttgcgctcggcacgcaggcgacggctgcggcgctcaggttggggttctcatcgacggcgtcagcggcttcccctcccgcctctcgccagtcgcttcgcgccctcgcctccggtcctccgcacactggccggtgaccctgcatagtattatctgattttcctggaggccacattttaaggactgaggttacaatggcagatgccagccctagaacagaaacatcaacagatgatactgacgacaataacgggcttgaaccaggcagaggtggtcttgttgcttctgactccagtgacagatccaaagacaaacatggagatcaaaagacattgcgtcgccttgctcaaaatcgtgaggctgcaaggaagagccgactaaggaagaaggcatatgttcaacagttggagaatagcaggctaaaacttacccaactagagcaagagctgcaaagagctcgtcagcagttgatcagtcacactccatgagtggaaatggggcattggcctttgatatggagtatgcgaggtggttggaagagcacaatcggcaaattagtgaactaagggctggtgtcagtgctcatgcaagtgatactgatcttcgaagtgttgttgataagatcatgtcacactatgatgagatttttaggctcaaaggcaatgcagccaaggcagatgtttttcacgtcttatctggcatgtggaagacaccggcggagaggtgttttttgtggctaggaggtttccgaccatctgaggttttaaagcttctttcgacacaacttgaacctctcaccgaacagcagctgtcagggataagcaaccttcagcaatcttcacagcaggctgaggatgctctttcacaaggaatggaggcccttcagcaatcattggccgaaaccttggctgggtctctttcgtcttctggatcaacaggaaatgtggcaaactacatgggtcaaatggccatggctatgggaaaacttggaacgcttgagaatttccttcgtcagactctacaacagatgcaaaggatcctgaccactagacagtcagctcgggcgctacttgtgataagtgattactcttcacgtctccgtgccctaagctctctctggcttgctcggcccaaggaatagcaagaacatgctatttgactgcaatacttttcacaatttggttttcaatggtcaggagatttgacaaggctgcgacagacttgattcggacatatctgcacatactatgacccaaatggaaggggatgttcatgtagcttaggctgcttagctttgtagttaagtgttgttgatgtatcattaccaactgctgtaaaattctcactctgtatgcccctgatttgcagcgaaccattagaatgcacattgatgttcacctgtcgattttttttgttcactcttaggaacacataatgctctgcccagtatcatctaaccagggtatatggctgattcaccgcactaaaacttgcatagttgatcattcagcattgctgccattgtcgttttgtatgttttccctcgtcatgcgtgagggggaaccgcaccatttactttgttaatataatatttgttggttt

SEQ ID NO: 75237 - DNA, 1522 bp, Zea Mays
caaacgtacattaatagcaaaacttctaattcagcacaaagatagtattatctgattttcctggaggccacattttaaggactgaggttacaatggcagatgccagccctagaacagaaacatcaacagatgatactgacgacaataacgggcttgaaccaggcagaggtggtcttgttgcttctgactccagtgacagatccaaagacaaacatggagatcaaaagacattgcgtcgccttgctcaaaatcgtgaggctgcaaggaagagccgactaaggaagaaggcatatgttcaacagttggagaatagcaggctaaaacttacccaactagagcaagagctgcaaagagctcgtcagcagggcatttttatatctagttcagttgatcagtcacactccatgagtggaaatggggcattggcctttgatatggagtatgcgaggtggttggaagagcacaatcggcaaattagtgaactaagggctggtgtcagtgctcatgcaagtgatactgatcttcgaagtgttgttgataagatcatgtcacactatgatgagatttttaggctcaaaggcaatgcagccaaggcagatgtttttcacgtcttatctggcatgtggaagacaccggcggagaggtgttttttgtggctaggaggtttccgaccatctgaggttttaaagcttctttcgacacaacttgaacctctcaccgaacagcagctgtcagggataagcaaccttcagcaatcttcacagcaggctgaggatgctctttcacaaggaatggaggcccttcagcaatcattggccgaaaccttggctgggtctctttcgtcttctggatcaacaggaaatgtggcaaactacatgggtcaaatggccatggctatgggaaaacttggaacgcttgagaatttccttcgtcagactctacaacagatgcaaaggatcctgaccactagacagtcagctcgggcgctacttgtgataagtgattactcttcacgtctccgtgccctaagctctctctggcttgctcggcccaaggaatagcaagaacatgctatttgactgcaatacttttcacaatttggttttcaatggtcaggagatttgacaaggctgcgacagacttgattcggacatatctgcacatactatgacccaaatggaaggggatgttcatgtagcttaggctgcttagctttgtagttaagtgttgttgatgtatcattaccaactgctgtaaaattctcactctgtatgcccctgatttgcagcgaaccattagaatgcacattgatgttcacctgtcgattttttttgttcactcttaggaacacataatgctctgcccagtatcatctaaccagggtatatggctgattcaccgcactaaaacttgcatagttgatcattcagcattgctgccattgtcgttttgtatgttttccctcgtcatgcgtgagggggaaccgcaccatttactttgttaatataatatttgttggttt

SEQ ID NO: 75238 - DNA, 2247 bp, Zea Mays
cccggcgtgcgatagccattcgtatccccggccccggggcggccacacccccggccccgctccgaagaatcgcagtcgcagcccgcacggccgcaccgcaccactcccgcacttccgcgcggcgcgaactcggcttatcgacaccaccacggcaccgctacagcctacagctcgagagaggaggggaaaaaaatctcagccaccaccggcagccgcgggagcttcgcgtgcgccgcttgctcactgcccgcacacgtacgccagaacccctctctcccccctccttctgcagccatgctcctccacctgcttccgctctcctgccccgcgccgccgttccacctgcgcaggaccggcggctcgccgcggacgccgcgggtccgggccggcgacaggaccaggacacgggggttccgggggacggacgtggagccggagacagctccgcgaaggcgccgcggccgcgatggcgacgatcctcaagcggctgggagcggtggagacaccggggcgctgctggcgtcggtcaggaggcttctgctctccgaggcgcctgcggcggcggagggagacagtgaggaggaggagcagggacagttccccaagcgttgggccatcgtcttcctctgcttctccgcatttctactctgcaacatggaccgcgtaaatatgagcattgctattctgcctatgtccgcagagtttggttggaacccacagactgttggtctcatccagtcatctttcttctggggctacctcctaactcagatagctggagggatatgggcagatactgttggaggaaagactgtccttggttttggtgtggtttggtggtccatagctacagctcttactcctgttgcagcacatcttggcttgccatttcttcttgttgtgcgggctttcatgggaattggtgagggggttgcaatgcctgcaatgaacaatattctttcgaaatgggttcctgtatcagagaggagcagatcattgtctcttgtgtacagtggaatgtaccttgggtcagttacaggacttgcattttcccccttgctgatacataagttcggttggccatcagtcttcttttcatttggatccctagggcttgtttggttcacgacatgggcaaccaaggcatatagttccccacttgaagatcctggaatcagcgctgcagaaaagaagcttattgctagtcagagcacagcaggcgaacctgttaaaacaattccatggagattaatactatcaaaaccacctgtttgggcacttatagtttctcatttctgccataactggggaactttcattttgctcacatggatgcccacatactacaatcaggttctgaaattcaacctcatggaatctggccttatctgtgttcttccctggttcaccatggcggtttctgcaaatgttggtggttggattgcagacacacttgtcagcagaggagtatctgtgacaactgttcgtaagatcatgcaatcaatcggattcttggggccagcattttttcttactcaactaagccatgttaattcgcctgccatggcggtgttgtgcatggcttgtagccagggaactgatgcattttcgcagtctggtctatactcaaaccatcaagatataggccctcgatatgcaggtgtactgcttggtctttccaacacggctggggtcttagcgggtgtatttggcacagcagcaacaggatacatcttgcagcatggttcttgggacaacgtattcgagttatcagtagtgctttatctggtagggactttggtatggaatgtattctcaactggcgagaagattcttgattgaagggtgtatgtacacagtatgcttacagttcgtagtgacaaactcatttcggatcgacaacttgacccctggacataatacacttcaagataacaaatgtgtcatcgcgcagcacgagaagtatcaaccttaacatcccggatattaaattgcctggttgtgatgttgctctggtagagacgatttgaagcatatggaattatggatgagttgagcgatgcacccgttccgagcatgccactgtatattgtgttgagcataggaaccggtcatggtgcagacagagacagtggccgaagccggtcgtgcaccagtcgccggacacagagaggaagatggaacagagaaaggtgaaaaggcaagccggtccaagcgtcgtcgaccaccggccgaaagagagcggag

SEQ ID NO: 75239 - DNA, 2173 bp, Zea Mays
cccggcgtgcgatagccattcgtatccccggccccggggcggccacacccccggccccgctccgaagaatcgcagtcgcagcccgcacggccgcaccgcaccactcccgcacttccgcgcggcgcgaactcggcttatcgacaccaccacggcaccgctacagcctacagctcgagagaggaggggaaaaaaatctcagccaccaccggcagccgcgggagcttcgcgtgcgccgcttgctcactgcccgcacacgtaaatatgagcattgctattctgcctatgtccgcagagtttggttggaacccacagactgttggtctcatccagtcatctttcttctggggctacctcctaactcagatagctggagggatatgggcagatactgttggaggaaagactgtccttggttttggtgtggtttggtggtccatagctacagctcttactcctgttgcagcacatcttggcttgccatttcttcttgttgtgcgggctttcatgggaattggtgagggggttgcaatgcctgcaatgaacaatattctttcgaaatgggttcctgtatcagagaggagcagatcattgtctcttgtgtacagtggaatgtaccttgggtcagttacaggacttgcattttcccccttgctgatacataagttcggttggccatcagtcttcttttcatttggatccctagggcttgtttggttcacgacatgggcaaccaaggcatatagttccccacttgaagatcctggaatcagcgctgcagaaaagaagcttattgctagtcagagcacagcaggcgaacctgttaaaacaattccatggagattaatactatcaaaaccacctgtttgggcacttatagtttctcatttctgccataactggggaactttcattttgctcacatggatgcccacatactacaatcaggttctgaaattcaacctcatggaatctggccttatctgtgttcttccctggttcaccatggcggtttctgcaaatgttggtggttggattgcagacacacttgtcagcagaggagtatctgtgacaactgttcgtaagatcatgcaatcaatcggattcttggggccagcattttttcttactcaactaagccatgttaattcgcctgccatggcggtgttgtgcatggcttgtagccagggaactgatgcattttcgcagtctggtctatactcaaaccatcaagatataggccctcgatatgcaggtgtactgcttggtctttccaacacggctggggtcttagcgggtgtatttggcacagcagcaacaggatacatcttgcagcatggttcttgggacaacgtattcgagttatcagtagtgctttatctggtagggactttggtatggaatgtattctcaactggcgagaagattcttgattgaagggtgtatgtacacagtatgcttacagttcgtagtgacaaactcatttcggatcgacaacttgacccctggacataatacacttcaagataacaaatgtgtcatcgcgcagcacgagaagtatcaaccttaacatcccggatattaaattgcctggttgtgatgttgctctggtagagacgatttgaagcatatggaattatggatgagttgagcgatgcacccgttccgagcatgccactgtatattgtgttgagcataggtatcatgtacagcatggtagaaagattcgtcatacagagtagttttttttttacttgtacaatttttccctcttgaatagtttgttcctgtaacagcccgacgtagataaaaacaaggaaacctggggatgggggtactactaatgcaaacatttggtgaatatttatccatttgcggactgagtctttaggggtagtttgaaaacttaaatcctatctggattcctgatgattaaggaaaaaaattaagctattttttccctcaatctcaggacatcgcggaggaaatttaagttttcaaactatatgccaaattgttacaatatctgtatcgttgtttggtatttctttaaagatgaagtgaagttcaacctcaaatgtttgagtttgaccgtaggaattgagttgcttaaagatgtagtacagttcacccaataaggggcgtttggttgcttgtatgactgagtcaggcttgt

SEQ ID NO: 75240 - DNA, 2544 bp, Zea Mays
cccggcgtgcgatagccattcgtatccccggccccggggcggccacacccccggccccgctccgaagaatcgcagtcgcagcccgcacggccgcaccgcaccactcccgcacttccgcgcggcgcgaactcggcttatcgacaccaccacggcaccgctacagcctacagctcgagagaggaggggaaaaaaatctcagccaccaccggcagccgcgggagcttcgcgtgcgccgcttgctcactgcccgcacacgtacgccagaacccctctctcccccctccttctgcagccatgctcctccacctgcttccgctctcctgccccgcgccgccgttccacctgcgcaggaccggcggctcgccgcggacgccgcgggtccgggccggcgacaggaccaggacacgggggttccgggggacggacgtggagccggagacagctccgcgaaggcgccgcggccgcgatggcgacgatcctcaagcggctgggagcggtggagacaccggggcgctgctggcgtcggtcaggaggcttctgctctccgaggcgcctgcggcggcggagggagacagtgaggaggaggagcagggacagttccccaagcgttgggccatcgtcttcctctgcttctccgcatttctactctgcaacatggaccgcagtttggttggaacccacagactgttggtctcatccagtcatctttcttctggggctacctcctaactcagatagctggagggatatgggcagatactgttggaggaaagactgtccttggttttggtgtggtttggtggtccatagctacagctcttactcctgttgcagcacatcttggcttgccatttcttcttgttgtgcgggctttcatgggaattggtgagggggttgcaatgcctgcaatgaacaatattctttcgaaatgggttcctgtatcagagaggagcagatcattgtctcttgtgtacagtggaatgtaccttgggtcagttacaggacttgcattttcccccttgctgatacataagttcggttggccatcagtcttcttttcatttggatccctagggcttgtttggttcacgacatgggcaaccaaggcatatagttccccacttgaagatcctggaatcagcgctgcagaaaagaagcttattgctagtcagagcacagcaggcgaacctgttaaaacaattccatggagattaatactatcaaaaccacctgtttgggcacttatagtttctcatttctgccataactggggaactttcattttgctcacatggatgcccacatactacaatcaggttctgaaattcaacctcatggaatctggccttatctgtgttcttccctggttcaccatggcggtttctgcaaatgttggtggttggattgcagacacacttgtcagcagaggagtatctgtgacaactgttcgtaagatcatgcaatcaatcggattcttggggccagcattttttcttactcaactaagccatgttaattcgcctgccatggcggtgttgtgcatggcttgtagccagggaactgatgcattttcgcagtctggtctatactcaaaccatcaagatataggccctcgatatgcaggtgtactgcttggtctttccaacacggctggggtcttagcgggtgtatttggcacagcagcaacaggatacatcttgcagcatggttcttgggacaacgtattcgagttatcagtagtgctttatctggtagggactttggtatggaatgtattctcaactggcgagaagattcttgattgaagggtgtatgtacacagtatgcttacagttcgtagtgacaaactcatttcggatcgacaacttgacccctggacataatacacttcaagataacaaatgtgtcatcgcgcagcacgagaagtatcaaccttaacatcccggatattaaattgcctggttgtgatgttgctctggtagagacgatttgaagcatatggaattatggatgagttgagcgatgcacccgttccgagcatgccactgtatattgtgttgagcataggtatcatgtacagcatggtagaaagattcgtcatacagagtagttttttttttacttgtacaatttttccctcttgaatagtttgttcctgtaacagcccgacgtagataaaaacaaggaaacctggggatgggggtactactaatgcaaacatttggtgaatatttatccatttgcggactgagtctttaggggtagtttgaaaacttaaatcctatctggattcctgatgattaaggaaaaaaattaagctattttttccctcaatctcaggacatcgcggaggaaatttaagttttcaaactatatgccaaattgttacaatatctgtatcgttgtttggtatttctttaaagatgaagtgaagttcaacctcaaatgtttgagtttgaccgtaggaattgagttgcttaaagatgtagtacagttcacccaataaggggcgtttggttgcttgtatgactgagtcaggcttgt

SEQ ID NO: 75241 - DNA, 1047 bp, Zea Mays
cttatccttccgcacgggatccgcacgttcctgggtccgtttcttttcttcgatacgcaggaaaggaccggcgctgccgtcctcgaaccgaagaaacgccgccgtcctcgagcaggggtggccgagtcagttgcttacgggtgaagaagaccctcaaatggaggcagggagccctctcggctctctgtagacaagtgtgggctatgagtttattctcgttcccagccacgacggaggcggaggagaggactgccagcaacgctacccagaaggacacaccagtggctgatcaagagaacatattgcagccagaacacgggcgtcgtggcaggcgcgcgccaaagttcggctagctgggacagaatgggccttgtaatcatgtcacgttgggctgagtctgcctgatgctaaataggagagggtgtcgaaaaaccagaagaatacagctacgctatgctaacaatttggtatcgaagacgccgaccctgtatccactcggcaattgtccccgacgaccccgttcagcggccatggattaccctgacttcgtcgcccgcaagttgctcgatgaaatgcatcttatggaggcgtggttgtcggaggtgatcagcggacgttgtgacatcatccaccgctacgtcgacgagcgttgcgacgccctctacttgcgctgcgagacgatccagcagcaggtcgacgtcgccgctctccgcgccgaggaatgactcatcgcgttggaggccatgaagtcgaagatcgatcactagcggccggatctagtaaagcgcattgaggatatcgcattggaggtgacgcgtgtctacaaattcctcggcacaaacaccgatttctagttgatgaacttactgcttatgaataaagcctagttcctttgcatctccggtgttattggtgaagaaaaagggtcaaagttggcggttctatgtagattaccgctatctaaatgccatgacaaataagagcaagtatctagtgactatttgataagctaatgggcgaattggcctcttttttataaggaaaact

SEQ ID NO: 75242 - DNA, 1655 bp, Zea Mays
agaacagatactatggaaccaggcttatagctacagttcgtggtaaccttatcttctctctcaatggaacacacaccgtgtcgttttagtgttctcatcctccatccgcttgctcctgctctctcaagtcaaagcagttgatacggtggcgcgagcagcaagctcgggaggccaggtagcaaaactagtgtcttgaatcggctgttcgtgagccgagtgcgctgggtgggctgtgccgacggcggcggcggtccggttcacagctacctcttacctagaggagcgcgcgcgcacactacacgcggacggaccagacaccggcgatggccactctggcgacggccgcggcggcgtggacaagggaggaggacaaggcgttcgagaacgcggtcgcggccgccgcggcgcccccggacgacgggccgccggatgatgggtggttcacggcgctcgtggccagtgtgccggcgcggacggcggaggaggtgcggcggcactacgaggcgctggtggaggacgtggccgctatcgaggccggccgcatcccgctcccgcgctatgctggagaggagtcgtccgccgcgacgcccgagggctccggatccgccgcctccgcgcccaaggacgctggaggaggaggaggaggcggtgggcaccgacgcgaagaacggaagagcggcgtcggcgttgacgtggggaagagtagctctaaggctgagcaggagcggcggaagggcatcccgtggacggaagaggagcacaggttgttcttgctgggtctggacaagttcggcaagggcgactggcggagcatctcgcgcaacttcgtcatctcacggacgccgacgcaggtggcgagccacgcgcagaaatacttcatccgtctcaactccatgaaccgggaccggcgccgctccagcatccacgacatcaccagcgtgagcgcgggcgaagtcgccgcggccggcgcacccatcacgggcggcccaaccacggcgggagcgatgccgatgggtcccgcgggcatgaagcaccaccaccaccacccggctccgccgatgggcatgtacgggcacgcgcccatgggccacccggtctcggggcacatggtggcgccggcggccgtcggcacgcccgtcatgttcccgccgggtcatcactcgccctatgtcgtgccagtgggatacccggcgccgccggccaagatgcaccaatgatcgtttacccggcatttgcacatctgcagagctgcatttcgttgcttgttctttcttgattttgttgatcttgtgtagccagagcaatctatccatcctttcctgatctcctggagtgagtgcagggcaggcaggcaggcaggcgatgcgacgaagaataagtatctgctgactgttgcaatagcgctacttgtagtagtcacactgatggaggctccaggaatgttactagtagcagccttccaggttgcggatacttactgatcatttgtgcagagttgcaagttgcacctggggactgatccgattccattgtccgaatgtaaatggattgtctataatattactatctcatctgtttatttaaagaaggaattacacttggcatgttgtaaaaaaaaacttataccatgttatcttagctttaattcatacctg

SEQ ID NO: 75243 - DNA, 896 bp, Zea Mays
agtaccttcgctttggttcataccaaattaaggaatcagttgagttatgataagttgcataaactagtttatgttcactacaacttgaagttgcgcattcaacattttgaaactgatatggaaagtcttgaacaaatgaaaaactctaaagatagaaacatagatccatgtagcatcatgatagatgttgctatgtatgatgaaggcaacccgattatggaatggttgtgcagttctaggagtgaatcagtgccgacacttgatgaaaatgatgagtctgaatcgcctaacagaccaagtggattcgttttagaagagttaggaggattgaatgaagaagagatggttcttttaaattctaggattggttctggtaggaaaaatggtaggaaaaggaatgatgtagaagaagatattggagatgatttcttatcagatagtagtgagggaggaggtagcccaacctacaacgaatcaggtgatagtgactctaatgatggtggtggtgatgacgaagatggtgaacctagtggtccatgttttgcagctaggacacaacctaaattagctacagaccaatataatggtcctggtcaagatgaacaagcagtgcctctccgtccaagatcaaaaaggcagaagaagctctccatcaagggtctgtacatgcttcagaagtgatctaatcttcaagcacaagcacaagaatatggcgtatacatggactgattcaatggcaagattttgaacatgtggctctattgtatcaattgtgtgttttgtttcagtttcagcacaatattgctgtcatatttggttcatgtggcctaacaatatttataactgtgattgatttctatgcattatttgaactattgactaccaaatatttgtga

SEQ ID NO: 75244 - DNA, 892 bp, Zea Mays
ctaccatgatatccattattaattttatgatcttttgcaatggtcgtatgttcttccacaagtcagtaaatgcaactggtctaattcaaaattctgattatatctatggaattatatctgatgtggttgctgatattgggatcaagcatgttgttcagatcatcactgataatggctcaaactataaaaaggcctgccaagacttcacaacaaaatatccacatattacttggcagccatgtgctgcacataccataaatttaatgttgaaggatataggacgatttcctgatgttgcagaagtagtggataggtgcaaagagaatttgtagattcttctataatcataacaggttacatgctatgatgcgagagaaaattggtggtgagctagttcggtggaacgcaactaggtttggtactgtttttatttttctgcatagttttttggatagaaaagataaatttaagttgtggatggcatcagctgattgggagaattgtaagtgggctggtgaagaagatcatgaattcgcatatgattgtttgacaaaaaataaatggtggagtgacatggaaaaggttttgaaagcggtgtccccaatctactctgtacttcgtttagctgatcaatagaagagtgtgtctatgtcgtcttttcttccaaaaatgatgagtgctatggctaaaatacgatccaatttgggtgatgatcctatcaacaaaaatctgtgtgatagattaatgcaagtaatcaatagaagacttgactatatgctcaatgatactcttatgcttgcagctactgcccttaaccctaaagcgctatatacttccaaaatggcaagaaaaccaaagttccaacatgttgtgacaatggccataaagaaac

SEQ ID NO: 75245 - DNA, 1767 bp, Zea Mays
cttgctttgtgcctttgtttcacgctttccccccttcctttgctcccatcgaccgatccaatagctgagattcagcttgtggatccatctgttcatctatttactggtacggtatcgccagattaggagcttctgtgcctgctacctgtggatccatctgtgtggtaaaagatcatcgagctgaatctccgcacagacaattagagtagctgcattggcggggaaagcgcaagaagctcagcagaaatggcggagcaggcaggcgccggaaggtactggtgccacatgtgcgccgcggtcgtgagccccgcggagggcgaggcggaggtgaagtgcccgcattgccacagcggcttccttgaggagatggagaccgtccgcggcacgcccgcggccgatgacggcgacggtgacggcgcggtggctcaagtgtaccccggcgccgaccgcccgagctccatctgggcgcacgctatcctcagcacggtcgacagctccgtccgccgccgccgcaaccggcggcagacggaggccgccggcgacgtctacgacgggaacgaccccgagttcgccctgcgccggcgtcgcgtcaccgcgttcctgcggctcctgcacgagctccgggaccgccagctgcagcggctggaggctgctgccggggtcgccctcgaaggcgaccagctgacccctttcggtcggagcctcttcatcggcgcagctggcggcggcgagcatggcgtggcgctgggcgactacttcctcggccccagcctcgacgctctggtgcagcagctcgccgagaacgacgcgggacggcacgggacgccgccggccaagaaggaggccgtggaggcaatgccgaccgtggaaatcgccggtggcaatggcaacgatgacgacacggccagctgccccgtctgcctggaggactacgcggccggcgagcgcgctcgggagatgccctgcaggcacaggttccactccaattgcatcgttccgtggctcgagatgcacagctcctgccctgtctgccggttccagctgccggccaccgacgacaagggctcatgcagcagcggcgacggtggttttgtcagtgtcgacgcggatggtgaaggcaatgacaacggcggcggcgatggtagggcaagtattccggaaaaaaatttgttgcagccgggctgcaaacggcctggtttgcagcccggctgcaacaaatttttttccagtattccaggcaatgcggagcccgccgaagccgaagagaacggcagccggttgccgccatccttgcagtggctcaacagcctgttctcgccatcggcgcagtcctccggtagcggcagcggcagttcgcatcattgggagaattgaacaataatgcaatataagaatggatgattgttgctgcttgagcccattggtgccaatgtacataggaagagcaggagcatgccggcatgaaaaatttggagcctttttttcagtgtgtcaatttggctcatgtaatgttctctctgatatagttgtcatggctataaaaagaacaaaaattggcaagtatatgaacttgcctcttgcgtgaactgggtgtgaatatatccttggactcgatgaagaaaccgaatcaggacgactacacgtcctaatcggagacccaaacctcatgtaattgtggcctcgagtgcactatataaactaaggtagaacttgttggccacttgttttttattactatgaaccataaaataagacaatatgttaaac

SEQ ID NO: 75246 - DNA, 1211 bp, Zea Mays
cccccttccttgtcggaatcatctatttctgggctggccggaaagcgagcgctcgagagcgaggggaaatcaggtggaggaagcttaaaattagaagtccagcgcaataattgagcaggcaggcggcaggcccctcctaatcactgccctaaacacatgtgtgccgggccgaggtcacaatcgatgcacggaggaggatgccgccgtagctgcggagattgataatataaagcgggcggagaccgccggcccctctggcctcgctgctcctccccccttcctccccccacatgcgctgcccccgcccggccctgccctgccctgctgcgcccaagctgaatctccgcacagacaattagagtagctgcattggcggggaaagcgcaagaagctcagcagaaatggcggagcaggcaggcgccggaaggtactggtgccacatgtgcgccgcggtcgtgagccccgcggagggcgagcgcgctcgggagatgccctgcaggcacaggttccactccaattgcatcgttccgtggctcgagatgcacagctcctgccctgtctgccggttccagctgccggccaccgacgacaagggctcatgcagcagcggcgacggtggttttgtcagtgtcgacgcggatggtgaaggcaatgacaacggcggcggcgatggtagggcaagcaatgcggagcccgccgaagccgaagagaacggcagccggttgccgccatccttgcagtggctcaacagcctgttctcgccatcggcgcagtcctccggtagcggcagcggcagttcgcatcattgggagaattgaacaataatgcaatataagaatggatgattgttgctgcttgagcccattggtgccaatgtacataggaagagcaggagcatgccggcatgaaaaatttggagcctttttttcagtgtgtcaatttggctcatgtaatgttctctctgatatagttgtcatggctataaaaagaacaaaaattggcaagtatatgaacttgcctcttgcgtgaactgggtgtgaatatatccttggactcgatgaagaaaccgaatcaggacgactacacgtcctaatcggagacccaaacctcatgtaattgtggcctcgagtgcactatataaactaaggtagaacttgttggccacttgttttttattactatgaaccataaaataagacaatatgttaaac

SEQ ID NO: 75247 - DNA, 593 bp, Zea Mays
attgtacgtgtcctacagtttcacacgtggagcgcagtgcgacgcgggcgggcggccggcacctgccaccgcgataccgtaccctttctggagatttctcgccgccctttttatcacccacctcgcgccgcactgtgttcatccactgagcactcgcacaagcagggacaaggaagtgcaccggcggcgtcgccatcgatcgagtagatactagatagtgtgtcaggttgctgtcagctagagccatggcgtccatgcagaagagccgcgagcagcgcgcccaggccgcggcgcagaaggcggccgacgagctccacgcgtcgaggcaggacagagtccccgaggaggcgcccgtcagcccccgcggcggcggcggcatcctgggcagcctgcaggaggggaaggcgttcaacgacgtcggtacgatgggggaggagggcaccggcgttccgcggagacgacgttctggctgatggccgctggatcggaactggcctggctggcgctgtgcttctcatgtaaaattagcatgcaacgacaaatgaatgttacataagaaactacaataaataaaagggtgtttggtttgagaa

SEQ ID NO: 75248 - DNA, 1533 bp, Zea Mays
caaacgcccgcgaccaagtccgtccacctctgcctctgcgcggcagcctttctctctgtcgtctctccccgtctcccgtcgctgattccatcatcgtcctccccggcttttccccaccaaaagccggaagccatagcaccttctgccagctagtccccagaaggtgcccacacccctccccacccccatcccacgcagcacagcggcagacaccgcaccgcgagtgacgcggcagcaaaaaaccatggcggctctgccgttctcgacgcggcggcccttctcgtcgccgtgcttcatcctctgcttcctcctcggcttcgtcgccggcctcttccccttcgcgcaccgccacctccacctcgacctcgacctccgccacctcccgctcgcggaccctcctcccgctgcgccgacccagcgggccctagtccggccgccaccgacgacgaccctgatcgtcgtgacgccgacccgcgcgcgcccgctgcaggcgtactacctgcaccgcctcgcgcacaccctccgcctcgtcccgcagccgctgctctggctcgtcgtcgaccgcggcgccgccacgcgcgagaccgccgcgctgctccgcggctgcggcctcatgtaccgccacctgccctcccagtcccaccgcgacgcgcccggtgctcgccggacgaggcccgagcacccggcggcgcgcggcctgcgccagaggaacgcggcgctcgaccacatcgagcaccaccgcatccacggcctcgtctacttcgccgacgaggacaacgtgtactcccttgacctcttcgaccagcttcgcggcataaggagttttggcacctggccagtcgcaatgctgggcgtggggaagagcaagacacttgtggaagggccggtttgtgacaacagccaggtagtgggatggcacacgaacgagaggaccaagaggcaacgaaggtttcatgtcaatacttcgggctttgctttcaatagcagtatgctctgggacgccgacaagagggctcgtcaggcgtggaattacatccggctgctggacacggtcagagatgggtttcaggcaacaacatttatagagcagcttgtagaagatgaaactcatatggagggcataccaactggttgttcaaaaattatgaatgttaatcttcgcctagaagataaacatcttgtatatccgaaggagtggcagatgacagaaaacctggatgtgttaattcctctctgagccagaacagaggcataccgccctgcagcttcagcaatcgagcacatggagacgcggccgagcatgacgtgcgtgtgtggcatatgtcaagctgttgtgggtcagcggaggtttaggttaggtgtacatgaatacatcgtacaagaggatcttacgtccccagtagggccttagcctttgtgggcatttaaggtaaatacatctaactttttttggtttattgaagtggatgcggtgactacttttaccagtatagagactatagataacattggttaattagtttaaattattta

SEQ ID NO: 75249 - DNA, 1317 bp, Zea Mays
attcgatacagccaggaatgacagaaaatccaacgcaaagccaccacaagattcaagacatttttggcaatggtaatgtcatgcggggccaccgcggcggtggtccttctacagtcgggcgcggaccacgccacgccacctgaggcgcctccgccgctccaccaaccctctcctcgtcttccatatagatatagtcagagcctcagaggtgaagcatccgactaaaaagggccagggccagggccttcgcttgcttactactcctgcttaccacactctaccttgtctcttcacgtgcacacgacgcctcccccaatggctgcggtggcggaggaggaggtgatcgtcgtcggcgcggggcagtcggggctagcggtggcggcgtgcctgtccctgcgcggcgtgcgggcgctggtcctggagcgcgacgactgcgtggggtcgctgtggcggaagcgcgcctacgaccgcctccacctccacctcaccaagaagtactgcgcgctgccgcacgcgccgcacccggccgaggcccccgcgtacctgcaccgcgacgacttcgcgcggtacctggacgggtacgccgcgcggttcgccgtccgcccgcgcctccgccgcgaggtccggtcggcgcggtacgaccccgcgagcgcgcggtgggaggtggaggccgtggacctcggcacgggccaggccgagcggtacgcggcgaggttcctggtggtcgcgtccggggagaacgccgagaagttcctgccggaggtgcctgggctggaggcgttccccggccaggtgatgcacgcagtggagtaccggtcggccgaggggatgcgcgggaaggccgtgctcgtcgtggggtcgggcaactccggcatggagatcgcctacgacctcgccgccgccggcgccgtcacctccatcgtcgtccgaggcgagagcgaggacgggctggtcggtgacgacgggatggcggcgcggagctacccggagcactggaagggggaccacgggctgtactgcgcggggatggtgcggaggggcatctacggcagctgcgaggacgcggagctcatcgccgccgacatcagcaagctgctgcaccccaagcaggagcagggcaacggcgtctagctgcagctagcatttcgctttgttggttgcgatggaaacaagctctattgttgttgggttggttgataataatggttgcgtgaataattaaacgtgcttaattgagatggcctggccagcctattcgttcattaccctgtctgtgccagtgtactgatgtgcaccgacgaggctacgacctaccgc

SEQ ID NO: 75250 - DNA, 4178 bp, Zea Mays
gccgccctccagaagtccagagtccagaatcccttggctgtcttggctgctgattccctgtgttaaaactgctaagtataacaacccagcaacccagcaacgaatttaaactgcttagcatcacaacccagcaacgaatttcaattgcaaagtgtgggctggctgtgtggcagtgaattccactgtggctgtgtggctgtgggctgctgatgttcattccattgtgtgttgcactgttgcaggttaaagtgtgggctgtgtggcagtgaatttcaattgcaatggcaacaaatagcgaggctaatgactcctatgacccactcaaatatcagtcacgaaggccaaagtcaaatgatccaggatggaaatatgcttactatgttgaggcgggaaagcgagagctgattcaatgtgctttgtgccccaaacaaataaaaggaggtatcaagagggtgaaacaacatctagctggtggctatggagacattgtcaagtgtcctaacactactagagagattgctaaagagatgaatgaagctttgaatcatgggaagcgggctaggccgttgtacctagatgacgatgtaatggaagatgaagcaggacaagaagatgatgtccaagttatgggaagcaggtcaatgtcagcatcatccaaggcttcctcatgtactgtgccaagttctggaacagctgccaaaagaaacaaagcaatattccaattgaagccccacccaattgcagctccaaagaagtcagttgcatctatggttcgacgtacacctcaagaggttgtagcagagagacatgcaaatggacctgctcaaactaccataagtgctaccatgaagcctaaggaagaaagaaattctgtttgtttggagattgccaagtttttctatgagtgtggtataccattcaatgctgcgaactcaaggcaatttgaggtagctgtggaggctattgctcaatatggatctggtttcaagcctcctactttccatgagctacgtgagcctttacttgctagggctgtcaaagacatagatgatgagaggaagaagcatgaggaagcatggagccaatatggttgcacactcatgtctgatggttggacaaacaaaagaggtcgccatttgatcaatttccttgttaacaaccctcaaggaacatttttcttggagtcagttgatgcatcaaatgagtcacacagtgcagtgatgcttgcagacttgttagaaaagagaattgaagggattggtaaggaaaacgttactcagattgtcactgataatggtgctaattataaggcagcaggtaagattttaatggagaggattcctaccttgttctggactccttgtgcggcacattgcttggaccttatgttggaggacataggaaagttgaaggattttaagaagcctattgctcgtgctcgtcatgtcaccacttttatttataggcatgggaggatacttagtgaaatgagggtgcatacaaatgggatggatcttgtgagacctgctgctactagatttgctactgccttccttaccatgaagagtttgcacaagcacaaaaactcattgaaaggtctattttcaagtgatgttttcactcaatccaaggtatccaaaacagaggcaggtaaaaaagcatatgacatcgttttctctcaagaattttggaattcaattgaggattgtcttagagcttctttaccgcttcttgtcgtgctgagattggttgatggtgatgagaagccagccatggctgaggttgctgcagccatgactatagcaaagaataagattacctcctcattttctactcaaaacaagaaagcatgtctgaaacgtattatgagcattgtggatcgacgttgggcgaaccaaatggataccccattatatggagcagcactatatttgaaccctggaaaattctacaatatcaaagcaggtgttgatgaaggctatgttggagagctaaggggttgctttaatgacgtgcttgtcaaaatggtggtagatgaggatcttagagagaagattgatgctcaagctgttctttatgagaaccaaagagaggcatttgcaaatccaatggctataaaaaatgcacaaacaaggaatccacttgattggtggcttgcatatggtggtcgtactattgaattatataagtttgcaagacggattgttagtctttgtgcttcatcatccggttgtgagcggaattggagtacatttgaatttatgcataccaaaaagaggaataggttggagcacaaaaggttgaatgacttggtatatgtttcatacaacagaaagatggctgataggtttcaaaaaatacgtgaggaaggaaaaaactttgatcctttgattttagaagactttgattgggacaatgaatgggttgatccattagctaattcttctcatgttagcaatgctcttggagatgatttcaatttatcgtgggaccaagttgatgaagctattgcaaatgaagatgacgatgatgaggaatatattcttgatgatcttgatgtggaagatgaaattgaaggaaacaatagtggaaacgatggtgatgatcaaggcgtggatgctcatggtcttaatattgatgagttcgatgatggttactaatcatgcatgaaagttgtaacttgtgttgtgtgtttgaacttgtgttgttgaacttgatctgtttctttttatgctaatgctatttggtttgtgaactcaacttatgtatgaacttaatctatatttgaaattctatgtcaagtctgaaaagacgtttcaacgttcgtttaaacgtttaaactttgaaaagttggttcataacgttttaacgttttaccgttttaataaccatggctggggaactcattaatactattaaaatccacaggaatttggaatacagatatgaatataaattcttagttaaattacttttggttcaagctgcagtttccaaaaaatgcatgtgctacttatcacagccagaatgcaaataacactaaatcatatctgactgacaaaacttggcatctgcaaaacgtatgaagcattttctgcaagactagatcaatggcaatggtcattccactattacaggataatatgatttaggaaaaattccctatataccattggattttatactcattccttgtgtgtcactgaatggcatatagggaattttttgtgtgtataacatgtggagtcagtggcacacaaggaatgagtatattttctgatggtatacaggaaattgccccgatttagctattgtactggcatatgatatgagtcatatgactaaaatctggaaaatatcagatcttgaagaaaatatcagatcttgaaggcttggccacatggatcctatgtaacctatatttcacagcagtgggactagttcacaagaaactgacagatgtggttacaattgacaaaaatgtttgttccaactttcaagttgtgagagcatctccaagagtttgatatagttaatactttacttgctaaacttacagatctagcaagttaacaaaaaaaagcaaccttaaagtttattgttctctagtctgctataatagcctactaaacaattttgcattgggaaacctcaaactatttctaaccaaccaatcatttttaatagtttctttgactcttaccgcttcctcatctggaagcctttattttcaaaatttactcatgcatccaatttattccggtctcctgagaaaaacgctggatggggagccgatacatagttcctcttgactgcacaaacttacaagttggagaggatatttgacaactttttaatttttaaggagctcatctacaaaactgttggagagcaccttttcccctttttactaaaaactaaaaataggaagttgtttaacaaaactcctggagatgctctaatcatgatagaagttagcaatagatgcacaattttgttggaaagaacagaaaactgatactaaagaaattactaaagagaatgtgtattatgacataatcaaaataccattgcaagtcatagtaaatgaaacaagggaccaaatcagaactagattgacttataaagctatcacaaacataaacattattctagttctaacttttaataagattgag

SEQ ID NO: 75251 - DNA, 1060 bp, Zea Mays
tacaacagttttttttccagtgtcacagtatttttgatttggcttttgtttttggcacgagccccagcccaactccgatcgcacgagccccagcccccaaacagcctccaggtctagctagggtttcgtctccgccgcttgctctaatcctctcccggcacgcgacacgcgagaccgaggccgccaagatggacctcctcgaggacgacgacgagttcgaagagttcgagatcgaccaagaatgggatgagaaggaagaaggcaatgaagctgtccagcagtgggaggatgattgggatgacgatgatgtgaatgatgatttctcgctgcagctgaggaaagaactggagggaagcaacgcccagaagagctgaagtattatttctccagtttacaaatgatccttctatgccagctacttctggaaatcggaacctttatgtgatttgtgctgctgggagcaatcgaactctggagtaaaaaagtaaccataccagtgatttctaagtatgaacggcaggaagttgacggacatcagtcggctatttaaaaaatatctcagttgtggttagaatatgccacagttcttatcttatttacaactgtttttcccttctctgccaaaacctccgtgctcccaagaaaacggggattgcatgtatcttttttttttttaatcttcgtacgccgagacgaccaggaggcaaggtgcgctggatggaattgggccgatgatgtcgttgctgccggacgcgttagcgattgctaggcggaggacagcagacctattcgcagtcagcgcctaacgggcgccatcttctcttgatcttataggtcgtgcttggattagtgtagcgagtcagtataaaggcctagacacgatattatcatcagtccgtacctggcagtagcacggtatgccttagacgaagctatgcttcggtcatgttatttttaagtaaaatgtagtagtggtcctcaaagctggtacactatcaccttagggtgcgtttggttgtaatgataaaaaggaatatgatagtatgaagattgtttagtt

SEQ ID NO: 75252 - DNA, 1137 bp, Zea Mays
cacaatcgaaaaaaggtcttccatctgttgtctcgttctctctttccgcacgaccgcaccgtgtgagttcaaaaaacttacccccaaaaactgtcctcccttggttccttcccgctctccagccaaagtcgccgctcccgctcggacacgcgtctagaagcttctggatccgtccctgacgccgatggagcagctcgactacaagttccacgagaagtacactgctctgaagaagcggaagctactggacgaggggctggagcggaagcgggaggcggaactcaatgagctttacgatgccatgaaagattgggtcagcgaactcaggaaagacaatgcggaactcaacgagaagctggtggagaagcaggatgagctcgagaaggcccgtcaggaattccttgaagatattcgtacaagggacgctgaaattctgaagctgaagcagctcttagatgagaaggctgaaaaaaacaattctgcagctactgggtttccttgcctagcgcctgaagctgtcctagaaaattcaactccattgtcacctaaaagaaagacaccattttcccacggcaagcagctagaatgctccagaagacatacacgcatctcaggacaacagagattcggagtgctcatatgctttctttgctgcttcaatctttagttcgcatgaagatctcggttacagtttcatcctcacctggctagaaacatctgatgaatggtcatataagctctcctcgttgggcacactggaaaggatagccgttgattggatgaggcaagacataagattcagcatgaaaatgtgccgcatgttctttgagcggatatcaagcatcataacaaaaggatgacgacatgctcttcgcttcagctagttatatcagtctgcctactgtacatggaagcatcctgatgtaaaaatgatttgatgcactatcttattgcagagctgtctttcatgctcatgccagtggtgtgtttggttgccggacatttagggacagccacgacagggaatccctgtcatcctctctcgttcctttaatttccctttaatttcgaggtataaccgaggacaagacattgaatcaaataatattattaaatcaagccaaaaaggattatcct

SEQ ID NO: 75253 - DNA, 1150 bp, Zea Mays
cgagagtatcacaatcgaaaaaaggtcttccatctgttgtctcgttctctctttccgcacgaccgcaccgtgtgagttcaaaaaacttacccccaaaaactgtcctcccttggttccttcccgctctccagccaaagtcgccgctcccgctcggacacgcgtctagaagcttctggatccgtccctgacgccgatggagcagctcgactacaagttccacgagaagtacactgctctgaagaagcggaagctactggacgaggggctggagcggaagcgggaggcggaactcaatgagctttacgatgccatgaaagattgggtcagcgaactcaggaaagacaatgcggaactcaacgagaagctggtggagaagcaggatgagctcgagaaggcccgtcaggaattccttgaagatattcgtacaagggacgctgaaattctgaagctgaagcagctcttagatgagaaggctgaaaaaaacaattctgcagctactgggtttccttgcctagcgcctgaagctgtcctagaaaattcaactccattgtcacctaaaagaaagacaccattttcccacggcaagctagaatgctccagaagacatacacgcatctcagggaataggacaacagagattcggagtgctcatatgctttctttgctgcttcaatctttagttcgcatgaagatctcggttacagtttcatcctcacctggctagaaacatctgatgaatggtcatataagctctcctcgttgggcacactggaaaggatagccgttgattggatgaggcaagacataagattcagcatgaaaatgtgccgcatgttctttgagcggatatcaagcatcataacaaaaggatgacgacatgctcttcgcttcagctagttatatcagtctgcctactgtacatggaagcatcctgatgtaaaaatgatttgatgcactatcttattgcagagctgtctttcatgctcatgccagtggtgtgtttggttgccggacatttagggacagccacgacagggaatccctgtcatcctctctcgttcctttaatttccctttaatttcgaggtataaccgaggacaagacattgaatcaaataatattattaaatcaagccaaaaaggattatcct

SEQ ID NO: 75254 - DNA, 769 bp, Zea Mays
cacaatcgaaaaaaggtcttccatctgttgtctcgttctctctttccgcacgaccgcaccgtgtgagttcaaaaaacttacccccaaaaactgtcctcccttggttccttcccgctctccagccaaagtcgccgctcccgctcggacacgcgtctagaagcttctggatccgtccctgacgccgatggagcagctcgactacaagttccacgagaagtacactgctctgaagaagcggaagctactggacgaggggctggagcggaagcgggaggcggaactcaatgagctttacgatgccatgaaagattgggtcagcgaactcaggaaagacaatgcggaactcaacgagaagctggtggagaagcaggatgagctcgagaaggcccgtcaggaattccttgaagatattcgtacaagggacgctgaaattctgaagctgaagcagctcttagatgagaaggctgaaaaaaacaattctgcagctactgggtttccttgcctagcgcctgaagctgtcctagaaaattcaactccattgtcacctaaaagaaagacaccattttcccacggcaagcagctagaatgctccagaagacatacacgcatctcagggaataggacaacagagattcggagtgctcatatgctttctttgctgcttcaatctttagttcgcatgaagatctcggtaaatgatggaacagaaatattttcggtttcagtatctcatgaagctagtggatgtatattcatccttatagagttt

SEQ ID NO: 75255 - DNA, 1781 bp, Zea Mays
aactagaatcactcaacacgcacgggccaggcccagctcagaggcaaaaacccacaccacacttcgttccccttgtcccaattgctcctccacttcccccaccgcccaccagtgatctcgccgccgcgacgcgaggcaccacggccggcgccggccgccttcctccagaaagtatcccccgaggatgtggaggcgactgccggttcaccttcgagggcttcagcagtggggacggtgaactggggaacggccaccctcgttggcgtcttcgctgggctgctatacggggggagcagggaggcctccgcttccgtcagtaaggatgccgaggtgatgctgaagatgggaagcacaactgacaagcgtgaacagtatagattgatgagagatgctatggagaaaaggttcattcgggttgccaaaggttcactagtcgggggtgttcggctggggatgtttactgcgactttctttggcatacagaaccttcttatcgatactcgtggagtacatgatgtattcaacattgccgctgctggctctgctactgcagctgcttttggccttatatgtatgtctctcaccatattctgtctccatcataattttgttatgggaagatactagatacctaaagtattgttctggtttaactttgtatgattttgagtaatcttatgaaatatatgaagtactacgaagcacataagagagctagtatggaatgagcagaagcagagcattttggtattttaaatcctttgtaatggtggctatttgttctaggattcttaatgcaggccaagatcaattctgtcagtatgtttcgtttttcttcatctataaggtttcttgctttggtggctttctaatgcctagcatggaatagatgtttcaagatttttctattttaattcttgtgcctatgaagtcaattggaagttttttatgtcagcaactcagtactagttgggcagagtaagaagctcataaaaagatgtctgccgcattacactggttgaacttagtgttcagaaactgtaaataccgttttggttttgttgctcttttaactgttcctgcacagtatgagttatcatcttatcgtattgtttaattttttttttctgatttttctatggaaataatcagcactgacttgtgatggtgtttgcatcctgacttcaacgacatgtttgtatattcagtgccagggtcaatgatgtggcgtgcaaggaatgtattggtgggatctgctcttggtgctggcatctgctatccacttggctgggtacagttaaagctggcagaaaaggccaatcttgagattgcaaattcaaaaccatcatccgatttgacagagggaaaagaaaatcaaagccgtgtgggtgctgctatcgaacgacttgagggtagtctgaagaagtgagtgaagcctacgcatcgatggcatttttctcgttgtcttggttccataaatgtagcagctacaaggactgggctgcactgactattgcttcttttctcgcatgttatggacttttatttcgagtttgcagtaggtatcgccgtaccgcactggtaacttgtatctttcaagtcacaagttattgagttcgcagttgctattctaaaaggactgggaaatgcaaaatgtgtttttttttttactttttttcaaaagctggaaaagatgtctgttgtactgaaacagtagataagtcattgtttgagttttgtttggcacagctttgtccggcgtcgactctagctagtgcgtg

SEQ ID NO: 75256 - DNA, 3094 bp, Zea Mays
caccgctccgccccaccatttgaccccacccgtcattccagaatctatttcagccaatgatggcctcggaccgagtagagagcaccgcacgggctctccgtccgttccattcgcccgtgcgcgccatcaccgccgtcgccatggcgtcgctcaagactgccaagaagcaccacgcgcgcctcaacaaccccttcccgcgcgccgtaccgacggccgccatccacgacggcgacggggccctgcgcctgtcgttcgcgtcgacctccaagctcgcccacgcgcacgacttccccgtggggacccgtttccgcctccgctgggacccgtcccgcggcggcgaggtctcgctgtccagggttcctccgtcgtcgggcggcggcgcgatgtgggagaccgtccccggcgtggcgttcctctccgtggcctccgtggccaccgaggccgacgagtgccgcggctccttcgcgctccgcgacggcggcgcccgcctcgtccccgatcgccagcacgtcgacaagatcagggctttctaccgctgcgacgccgaggcaggcggctccgagcccgacctgctgcgcgccgccgcattccggccgtccgacgcgacgcggttcccggtgctggtggtgaccgggctcgtgtccgccgccaagaaggccggcgcgtcgccgtcgtgcacctgctgcgggttgcgcttgcgcgcggcaggtcgccgcgcccggagcgcggcggcggcggcgaggcccgtgctctcggcgcggtactggatccttctcgaggagaagagcgacacgcaggttaggttcagcgtcaagatcggcgactaccaatggacctgctcgcacgctgaccctgccaagtcgcccccggcgacggcgacgaccacgaccacgaccccgaggctccaccgggccagcctgcggcttcgtctgtcggcgcgcgtccagcgagccaccacgagcaagaggacgaggctggccccggccccgagccgtgagcgtgaggaggcgtcggcgctcctgccagcgcccgagcgggcggaggagcggcggccggaggagttcaaccgtgtgttcctgacgtatgcgagcagccgcgacgagcggttcttcgggttcggcgagcagttcagccacgtggagttcaagcggaagcgggtgccggtgctggtgcaggagcaggggatcggcaggggagaccagcccatcacttttgccgccaacctcgtcagctacaggaggaaactggagcacgacatatgccccctctccgttctacatgacctcaaagatgagatctttgtacctcgaaggatacgagtactccatcttcgacctgacgagacctgacagggtgcaaattcagatttacggcaattcagtccagggacggatacttgacggcgactcaccgacggagctgctcaccagctacacggagtcaaccggacggccgccggttcttcccaggtggatcacgtccggcgccgtcgtcggcatgcagggtggcacagacgccgtccgcagagtttggggccagctcaaggactacgacgtccctgtctctgcgttctggctacaggtctgaggaggaactgacagttcttcgtgtctgacgacgcaccctgaaccggccctgaactgcttgcttgctgcacgttggctgggtctttggctgcaggattgggttggccagaggaagacggcgatcgggtctcagctctggtggaactgggagctcgatgatgcccactacaatgggtggaacgatctagtagacgacctccgcagccacggcatccggacgatggcttactgcaacccttgcctcgtgccgatggacgagaagcccagcgcgaagaggcacctgttcgaggaagccaggaagctgggcatcctggtgagggacgacgccggcgagccgtacatgatgcccaacacggcgttcgacgtcgccatgctcgacctcaccaacccggcagcgcacgcgtggttcaagagcaccgtcctgcgggggatggtggaccgcggcgtcagcggctggatggccgacttcggcgagggcctgccgctggacgcgcggctgcactcgggcgaggactccgtcgccgcgcacaaccggtacccggagctgtgggcgcgcgtcaaccgcgagatcgccgacgagtggagagccagccgccgccgtgccgcggcggagagcgacgacatcgtcgacgacgacgacggcctggtgttcttcgtgcggtcggggttccgggagagctcccgctgggcgatgctgttctgggagggcgaccagatggtgagctggcaggcgaacgacggcatcaagagcagcgtggtgggcctcctcagcggcggcctctcggggttcccgctcaaccacagcgacgccggcggctactgcacggtggacctgccgccgttcctgcgctaccgccggagcgaggagctcctgatgcgctggatggaggtgaacgccttcacggtcgtgctccgcacccacgagggcaacaggccgggctccaactgccagttctactccagcggccgcacgctggcgcacttcgcgcgctgcgccaagatgtacaaggcctgggagttctaccgcgcgcgcctcgtcggggaggccgcgcggacggggctccccgtggcgcgccacctgttcctgcactacccggcggacgagcgcgtgcaggcgctcacgtaccagcagttccttgtcgggacggagatgctcgtcgtgccggtcctggacaaggggcggaccgcggtgaccgcctacttcccggccggcgccggtgcgtggaggcacgtgtggagcggcaacgagtacgggaccggggctggggtgcagggcgggttcgaggcccaggtcgaagcccggatcgggtacccggccgtattcgtcagggccgggtcgtccgtcggggaaagatttgtgagcaacttgagaaatctcacggtgttgtaatttcggtaaatatacgtaactagctatgtgcgactaggctacaaatatattttttgtttatttttaaatattaagatatatgtggtctgatggttagccttaaatttttggagcagag

SEQ ID NO: 75257 - DNA, 368 bp, Zea Mays
cggctctgcacaacccttgccttcagctctaagtatattaagactagatctcctcgaaggatgtcgcggccacagctaggcgcgacgagctatccaaggcggtgactggcatcgagctctccaagatatgacaacctcaaggagacgctgcagcggtccaaggactccgcgtcacgctttgtggagaggatgcagcacacgtggacggcagcacagatgctctggaagtcacttctgtccgtgctctcgtccgccaaccatggagtgttttcatgaagggtataaaagggttacatgatgaaattgctgcccgtgatgggtttcatgcaagcgcagataacatcttcctaacagatggagcaagcccg

SEQ ID NO: 75258 - DNA, 743 bp, Zea Mays
ctggtatctaaattgttgtgcactgcttagcaaaataattctctgcgacggttacttccattggtgtggttggtgcaaggtgattcttccctgcgacggcaacgccaacaacgaactgggaggtgttgcggctctgcacaacccttgatgaagtcaatttgcttactttcagccttcagctctaagtatattaagactagatctcctcgaaggatgtcgcggccacagctaggcgcgacgagctatccaaggcggtgactggcatcgagctctccaagatatgacaacctcaaggagacgctgcagcggtccaaggactccgcgtcacgctttgtggagaggatgcagcacacgtggacggcagcacagatgctctggaagtcacttctgtccgtgctctcgtccgccaaccatggagtgttttcatgaaggtttaagcacagtgggcatgggtctcccattgtgggaaaaggccctttcagtatcaacctttgacaacaaatgacaaatggatcatggtttacacatgatctagccacttagggataccatgtagccaaattgaatctcgcagagaataatggaaggcagatgttaatggattgttgcagcttcaacaaatggacacacatcttacactttccatgttttggggtataaaagggttacatgatgaaattgctgcccgtgatgggtttcatgcaagcgcagataacatcttcctaacagatggagcaagcccg

SEQ ID NO: 75259 - DNA, 777 bp, Zea Mays
caaaaaaggaaggtgcgccacctcctcctcggcccgcgccgtcaatggaagctcgctatattgggttggcaggtcgcgaacttgcagctgaaggtaatcaggtttggcgaactcgcgaacttgcatacgccgcggaaggtgattcttccctgcgacggcaacgccaacaacgaactgggaggtgttgcggctctgcacaacccttgccttcagctctaagtatattaagactagatctcctcgaaggatgtcgcggccacagctaggcgcgacgagctatccaaggcggtgactggcatcgagctctccaagatatgacaacctcaaggagacgctgcagcggtccaaggactccgcgtcacgctttgtggagaggatgcagcacacgtggacggcagcacagatgctctggaagtcacttctgtccgtgctctcgtccgccaaccatggagtgttttcatgaaggtttaagcacagtgggcatgggtctcccattgtgggaaaaggccctttcagtatcaacctttgacaacaaatgacaaatggatcatggtttacacatgatctagccacttagggataccatgtagccaaattgaatctcgcagagaataatggaaggcagatgttaatggattgttgcagcttcaacaaatggacacacatcttacactttccatgttttggggtataaaagggttacatgatgaaattgctgcccgtgatgggtttcatgcaagcgcagataacatcttcctaacagatggagcaagcccg

SEQ ID NO: 75260 - DNA, 1381 bp, Zea Mays
caacattgccgaacaccctggccagagttcagtgaccctctcccctcgagattaccgccatctcctacccgccattgtcgcgctccaccaccagggcccactgtaccgcgcccgcgccgtccaaatctaccgcggatctcctctccccattactgggaggtcctccatccatgttgtctgtaccgcgtcgtggatccgccacctcaaatcctcccagtaccgcgcccgcgccgtctaaatctgccacggatctcctctccccattactgggaggtccgtcatccatggaaggtgcgccccctcctcctctacccaccatccatggaaggtgcgccccctcctcctctgcctgccatccatggaaggtgcaccatctaaaatgcgccacctcatcgaactcctcgacccgcggcaaaaaaggaaggtgcgccacctcctcctcggcccgcgccgtcaatggaagggttggcagctcgctatattgggttggcaggtcgcgaacttgcagctgaaggtaatcaggtttggcgaactcgcgaacttgcatacgccgcggaaggtacatgtttcctggtgctccctggtatctaaattgttgtgcactgcttagcaaaataattctctgcgacggttacttccattggtgtggttggtgcaaggtgattcttccctgcgacggcaacgccaacaacgaactgggaggtgttgcggctctgcacaacccttgccttcagctctaagtatattaagactagatctcctcgaaggatgtcgcggccacagctaggcgcgacgagctatccaaggcggtgactggcatcgagctctccaagatatgacaacctcaaggagacgctgcagcggtccaaggactccgcgtcacgctttgtggagaggatgcagcacacgtggacggcagcacagatgctctggaagtcacttctgtccgtgctctcgtccgccaaccatggagtgttttcatgaaggtttaagcacagtgggcatgggtctcccattgtgggaaaaggccctttcagtatcaacctttgacaacaaatgacaaatggatcatggtttacacatgatctagccacttagggataccatgtagccaaattgaatctcgcagagaataatggaaggcagatgttaatggattgttgcagcttcaacaaatggacacacatcttacactttccatgttttgggtacaaatgtaatcttttagaaaccttttttgttgtggtgcacacatgatgttgactcatgagaactcaaatttctagagcagggtataaaagggttacatgatgaaattgctgcccgtgatgggtttcatgcaagcgcagataacatcttcctaacagatggagcaagcccg

SEQ ID NO: 75261 - DNA, 1016 bp, Zea Mays
gtaggttccatgtctccctgaaagttatcggtgaacttatcttgttggtagttcagttaacctgcatgttttgttcatataaaagaaaaatggaagagagttttgaagctttgaaccccagggcagttgctgttgtgatagaccccatccagagtgtgaaggggaaggtggttattgatgcattccgcctaattaatcctcagaccatgatgcttggccaggagccacgggcagacgacatcaaatgttgggcacctaaataagccatcgattcaggctcttatccatgggctgaacagacactactactcgattgcaatcaattaccgaaaaaatgaacttgaggagaaaatgttgctgaacttgcacaaaaagaaatggacagatgggctaattttgaagaggtttgacactcattcaaaaaccaacgagcagactgtccaggaaatgctaaacctagccatcaagtacaacaaggcggtgcaggaggaggacgaactgccacctgagaaacttgcgatagcaaatgtaggtcggcaagatgcaaaaaagcatttggaagagcatgtgtccaatttgatgtcatcaaacatagttcagaccctaggaaccatgctcgacacggttgtattttagtctctactaatattgttgttccaaactgaaacatagcccactctatcgaagcatgacacatgcaatgagctcgatgccggatacatttttggttctaagatttgtttacgaatggatttgtctacattctgttgttaaactccctaccttttctatcaaagcttcagtatgttctagttatatttaagccaatgtgggtccacattgtcaattgggatgtcattacccctgggagaaattgtgtaatgcgattatatgacttgttgcgtgggccgcgtgtgatggcttattttgtttgttccacatgcgttggcaccaagtttctcatgcaaatatttgagtgatcttgcaaactcatctattcggagcatggccttgag

SEQ ID NO: 75262 - DNA, 1225 bp, Zea Mays
ctctcttccccgtcccttccctgtaaccctagggtcagggactcaggggagggccggcgtgcccatggaggtcatgggtctcatgctcggcgagttcgtcgatgactacaccgtcagggtcgtcgacgtcttcgccatgccgcagagcgggactggggtcagcgtcgaggccgtcgaccacgtcttccagacaaacatgcttgacatgctcaagcagaccggcaggccagaaatggttgtaggctggtatcactcacatcctggcttcggttgctggctatcaggcgttgatatcaatactcagcagagttttgaagctttgaaccccagggcagttgctgttgtgatagaccccatccagagtgtgaaggggaaggtggttattgatgcattccgcctaattaatcctcagaccatgatgcttggccaggagccacgggcagacgacatcaaatgttgggcacctaaataagccatcgattcaggctcttatccatgggctgaacagacactactactcgattgcaatcaattaccgaaaaaatgaacttgaggagaaaatgttgctgaacttgcacaaaaagaaatggacagatgggctaattttgaagaggtttgacactcattcaaaaaccaacgagcagactgtccaggaaatgctaaacctagccatcaagtacaacaaggcggtgcaggaggaggacgaactgccacctgagaaacttgcgatagcaaatgtaggtcggcaagatgcaaaaaagcatttggaagagcatgtgtccaatttgatgtcatcaaacatagttcagaccctaggaaccatgctcgacacggttgtattttagtctctactaatattgttgttccaaactgaaacatagcccactctatcgaagcatgacacatgcaatgagctcgatgccggatacatttttggttctaagatttgtttacgaatggatttgtctacattctgttgttaaactccctaccttttctatcaaagcttcagtatgttctagttatatttaagccaatgtgggtccacattgtcaattgggatgtcattacccctgggagaaattgtgtaatgcgattatatgacttgttgcgtgggccgcgtgtgatggcttattttgtttgttccacatgcgttggcaccaagtttctcatgcaaatatttgagtgatcttgcaaactcatctattcggagcatggccttgag

SEQ ID NO: 75263 - DNA, 1406 bp, Zea Mays
ctcatttaacacctctaccacgtctgtgagaacatagattgctgaaactgcatggtcgatgcactgataatcaaagaagttcccaggctgatcctgcagatgctgattctaaaccaaccagtggttcaaagggaagccatattcgcactgggactaaagttactgaagaagcaggacagcccattccacgtaggcgccaaaataaaggcaacagaaaagcgcacagctcacgtaaacagagattctttgctggtaattttgtgaataatcctgatcagtatggtggtgtgtcagaaagccctccaggcaattcagttggatatttctatggatctactccagaaaatcacagttataaaagttcaaagctgagttcatctcctcatggaattcctactgggagctcgcctgttgggtctgtgcccaaatcttctccacaatctcagcatcttacttttcatcttttagaaaaaaataaactccagccgcaaaggtacaataagttcaaacatcactgccttatggagcgtaagaaattaggcactggccagagtgagcaaatgaactcactgtatcgcttctggtcatactatctgagagataattttaatgaagatatatacaaggattttaagaaactcgcactggaggatgctgcagcgagctacagatatggtctcgagtgtctattcagattttatagttatggtttggagaaaaaattccaacccaatgtatatgaagatttcgagaagcttactttcgaattctaccgtaatggtgatctttatggactcgaaaaatactgggcatttcaccattaccgaaatccagatatcggtcctgtagataaacttccagagctggagaggcttctgagggaggagttccagaccctagaggacttcaaggcaaaggagaaagcccgagcgacgacggagaaaggaactggcatcagtagcagcagtgtggtggtggccgcaagtcatagcaaggctgagactaagcaggtctgagtcccgcatgaaaattttcggtggtcgccccagcaaaaagaggaagtagcgttttctttttctttgcgaagaagtaatgattcgggtagacatgtgcagattttgctatatcccctgccagtgccgtgtgttgtggctgcccagaaattttccctccttttctcattaccttcctggcaccaatgtcaatgtgggagttgtacatagatattttttttcctctcttgttaaatggacatatcatagagaatggagtttaaagcctttgtggtggctcggtgctgttttttagggtgtgggctatgttgatggcatagtcatctttgagaacttgatttttgaataccttctcgaatttaaaatgatgcaacgaatcatatagttaaagcc

SEQ ID NO: 75264 - DNA, 1484 bp, Zea Mays
aacaaaaggggtgatgatgaagatgaggacttctttgttgatgatcaagacgttagtaggctaatgattgttacacaggatactaggttagaaaaggatgacaaaaatcgcacaagtataccacaggcattttcaactgaggaagcttcaagaataagtgatgccttatactgctatgagaaactgcatggtcgatgcactgataatcaaagaagttcccaggctgatcctgcagatgctgattctaaaccaaccagtggttcaaagggaagccatattcgcactgggactaaagttactgaagaagcaggacagcccattccacgtaggcgccaaaataaaggcaacagaaaagcgcacagctcacgtaaacagagattctttgctggtaattttgtgaataatcctgatcagtatggtggtgtgtcagaaagccctccaggcaattcagttggatatttctatggatctactccagaaaatcacagttataaaagttcaaagctgagttcatctcctcatggaattcctactgggagctcgcctgttgggtctgtgcccaaatcttctccacaatctcagcatcttacttttcatcttttagaaaaaaataaactccagccgcaaaggtacaataagttcaaacatcactgccttatggagcgtaagaaattaggcactggccagagtgagatatatacaaggattttaagaaactcgcactggaggatgctgcagcgagctacagatatggtctcgagtgtctattcagattttatagttatggtttggagaaaaaattccaacccaatgtatatgaagatttcgagaagcttactttcgaattctaccgtaatggtgatctttatggactcgaaaaatactgggcatttcaccattaccgaaatccagatatcggtcctgtagataaacttccagagctggagaggcttctgagggaggagttccagaccctagaggacttcaaggcaaaggagaaagcccgagcgacgacggagaaaggaactggcatcagtagcagcagtgtggtggtggccgcaagtcatagcaaggctgagactaagcaggtctgagtcccgcatgaaaattttcggtggtcgccccagcaaaaagaggaagtagcgttttctttttctttgcgaagaagtaatgattcgggtagacatgtgcagattttgctatatcccctgccagtgccgtgtgttgtggctgcccagaaattttccctccttttctcattaccttcctggcaccaatgtcaatgtgggagttgtacatagatattttttttcctctcttgttaaatggacatatcatagagaatggagtttaaagcctttgtggtggctcggtgctgttttttagggtgtgggctatgttgatggcatagtcatctttgagaacttgatttttgaataccttctcgaatttaaaatgatgcaacgaatcatatagttaaagcc

SEQ ID NO: 75265 - DNA, 1719 bp, Zea Mays
ggaggagattgagaagcaagaagggaagaaagtggccacagacctcacggcggcggctccaatcggcgcctgacaggctgacgacaacaggcctcgcggcggcggctccaatcggacactactgggtgacgacgactccaatcggcgaacgacggcggctccaatcaacgaacgacgacggccacagatcaacggggtgatgatgaagatgaggacttctttgttgatgatcaagacgttagtaggctaatgattgttacacaggatactaggttagaaaaggatgacaaaaatcgcacaagtataccacaggcattttcaactgaggaagcttcaagaataagtgatgccttatactgctatgagaaactgcatggtcgatgcactgataatcaaagaagttcccaggctgatcctgcagatgctgattctaaaccaaccagtggttcaaagggaagccatattcgcactgggactaaagttactgaagaagcaggacagcccattccacgtaggcgccaaaataaaggcaacagaaaagcgcacagctcacgtaaacagagattctttgctggtaattttgtgaataatcctgatcagtatggtggtgtgtcagaaagccctccaggcaattcagttggatatttctatggatctactccagaaaatcacagttcaaagctgagttcatctcctcatggaattcctactgggagctcgcctgttgggtctgtgcccaaatcttctccacaatctcagcatcttacttttcatcttttagaaaaaaataaactccagccgcaaaggtacaataagttcaaacatcactgccttatggagcgtaagaaattaggcactggccagagtgagcaaatgaactcactgtatcgcttctggtcatactatctgagagataattttaatgaagatatatacaaggattttaagaaactcgcactggaggatgctgcagcgagctacagatatggtctcgagtgtctattcagattttatagttatggtttggagaaaaaattccaacccaatgtatatgaagatttcgagaagcttactttcgaattctaccgtaatggtgatctttatggactcgaaaaatactgggcatttcaccattaccgaaatccagatatcggtcctgtagataaacttccagagctggagaggcttctgagggaggagttccagaccctagaggacttcaaggcaaaggagaaagcccgagcgacgacggagaaaggaactggcatcagtagcagcagtgtggtggtggccgcaagtcatagcaaggctgagactaagcaggtctgagtcccgcatgaaaattttcggtggtcgccccagcaaaaagaggaagtagcgttttctttttctttgcgaagaagtaatgattcgggtagacatgtgcagattttgctatatcccctgccagtgccgtgtgttgtggctgcccagaaattttccctccttttctcattaccttcctggcaccaatgtcaatgtgggagttgtacatagatattttttttcctctcttgttaaatggacatatcatagagaatggagtttaaagcctttgtggtggctcggtgctgttttttagggtgtgggctatgttgatggcatagtcatctttgagaacttgatttttgaataccttctcgaatttaaaatgatgcaacgaatcatatagttaaagcc

SEQ ID NO: 75266 - DNA, 1686 bp, Zea Mays
ggaggagattgagaagcaagaagggaagaaagtggccacagacctcacggcggcggctccaatcggcgcctgacaggctgacgacaacaggcctcgcggcggcggctccaatcggacactactgggtgacgacgactccaatcggcgaacgacggcggctccaatcaacgaacgacgacggccacagatcaacggggtgatgatgaagatgaggacttctttgttgatgatcaagacgttagtaggctaatgattgttacacaggatactaggttagaaaaggatgacaaaaatcgcacaagtataccacaggcattttcaactgaggaagcttcaagaataagtgatgccttatactgctatgaggctgatcctgcagatgctgattctaaaccaaccagtggttcaaagggaagccatattcgcactgggactaaagttactgaagaagcaggacagcccattccacgtaggcgccaaaataaaggcaacagaaaagcgcacagctcacgtaaacagagattctttgctggtaattttgtgaataatcctgatcagtatggtggtgtgtcagaaagccctccaggcaattcagttggatatttctatggatctactccagaaaatcacagttataaaagttcaaagctgagttcatctcctcatggaattcctactgggagctcgcctgttgggtctgtgcccaaatcttctccacaatctcagcatcttacttttcatcttttagaaaaaaataaactccagccgcaaaggtacaataagttcaaacatcactgccttatggagcgtaagaaattaggcactggccagagtgagcaaatgaactcactgtatcgcttctggtcatactatctgagagataattttaatgaagatatatacaaggattttaagaaactcgcactggaggatgctgcagcgagctacagatatggtctcgagtgtctattcagattttatagttatggtttggagaaaaaattccaacccaatgtatatgaagatttcgagaagcttactttcgaattctaccgtaatggtgatctttatggactcgaaaaatactgggcatttcaccattaccgaaatccagatatcggtcctgtagataaacttccagagctggagaggcttctgagggaggagttccagaccctagaggacttcaaggcaaaggagaaagcccgagcgacgacggagaaaggaactggcatcagtagcagcagtgtggtggtggccgcaagtcatagcaaggctgagactaagcaggtctgagtcccgcatgaaaattttcggtggtcgccccagcaaaaagaggaagtagcgttttctttttctttgcgaagaagtaatgattcgggtagacatgtgcagattttgctatatcccctgccagtgccgtgtgttgtggctgcccagaaattttccctccttttctcattaccttcctggcaccaatgtcaatgtgggagttgtacatagatattttttttcctctcttgttaaatggacatatcatagagaatggagtttaaagcctttgtggtggctcggtgctgttttttagggtgtgggctatgttgatggcatagtcatctttgagaacttgatttttgaataccttctcgaatttaaaatgatgcaacgaatcatatagttaaagcc

SEQ ID NO: 75267 - DNA, 1707 bp, Zea Mays
atttgaactcgtggccatggaatctaacaagaccagacaagtagcagtgagcagattaaggagaaaggaggagattgagaagcaagaagggaagaaagtggccacagacctcacggcggcggctccaatcggcgcctgacaggctgacgacaacaggcctcgcggcggcggctccaatcggacactactgggtgacgacgactccaatcggcgaacgacggcggctccaatcaacgaacgacgacggccacagatcaacggggtgatgatgaagatgaggacttctttgttgatgatcaagacgttagtaggctaatgattgttacacaggatactaggttagaaaaggatgacaaaaatcgcacaagtataccacaggcattttcaactgaggaagcttcaagaataagtgatgccttatactgctatgagaaactgcatggtcgatgcactgataatcaaagaagttcccaggctgatcctgcagatgctgattctaaaccaaccagtggttcaaagggaagccatattcgcactgggactaaagttactgaagaagcaggacagcccattccacgtaggcgccaaaataaagaaagccctccaggcaattcagttggatatttctatggatctactccagaaaatcacagttataaaagttcaaagctgagttcatctcctcatggaattcctactgggagctcgcctgttgggtctgtgcccaaatcttctccacaatctcagcatcttacttttcatcttttagaaaaaaataaactccagccgcaaaggtacaataagttcaaacatcactgccttatggagcgtaagaaattaggcactggccagagtgagcaaatgaactcactgtatcgcttctggtcatactatctgagagataattttaatgaagatatatacaaggattttaagaaactcgcactggaggatgctgcagcgagctacagatatggtctcgagtgtctattcagattttatagttatggtttggagaaaaaattccaacccaatgtatatgaagatttcgagaagcttactttcgaattctaccgtaatggtgatctttatggactcgaaaaatactgggcatttcaccattaccgaaatccagatatcggtcctgtagataaacttccagagctggagaggcttctgagggaggagttccagaccctagaggacttcaaggcaaaggagaaagcccgagcgacgacggagaaaggaactggcatcagtagcagcagtgtggtggtggccgcaagtcatagcaaggctgagactaagcaggtctgagtcccgcatgaaaattttcggtggtcgccccagcaaaaagaggaagtagcgttttctttttctttgcgaagaagtaatgattcgggtagacatgtgcagattttgctatatcccctgccagtgccgtgtgttgtggctgcccagaaattttccctccttttctcattaccttcctggcaccaatgtcaatgtgggagttgtacatagatattttttttcctctcttgttaaatggacatatcatagagaatggagtttaaagcctttgtggtggctcggtgctgttttttagggtgtgggctatgttgatggcatagtcatctttgagaacttgatttttgaataccttctcgaatttaaaatgatgcaacgaatcatatagttaaagcc

SEQ ID NO: 75268 - DNA, 3479 bp, Zea Mays
tccaaaaataccaatccgccttccatgttctcgtcgctgcctccgtctgacggctcgaagctccctccagttccgatctaaacccgccgaaaccctaatccccatggctgccgccatgggcaaccccatcctgaccctccccgcaccggagggcaacggcaccgggggcggcgacgccgaccagcagctgcagcaggcgccgcctaagccgcctcctcccggcgcgaagacggaccccccggcgacggtggccacccacacgcgcaccatcggcatcatccaccctccgcccgacatccgcgtcatcatcgagaagacggctaccttcgtcgccaagaacgggcccgagttcgagcgccgcatcatctccctcaaccagggcaacgccaaattcaacttcctgcagccctcggatccctaccacgcctactaccagcaccgcgtttccgagatagccgctgcgccgcccggcgcggacggcccctcgggcgccgatactggcgcggctcccgacgaatcgccagcgtcggccccggccgacggcgccgccgccgcacccgtagatggcgctgctgcggacgcaaaggccgatcactccgcgcccttccgcgtggggccgccgcccaaggtgctggtgccacccaaggctgagctgtacacggtgcggctgcccgagggtatcacaggggaggagctggacatcatcaagctgaccgcccaatttgtggcgcggaacgggaagaacttcctgacgagcctggcgcaacgcgagagcaacaacatgcagttccacttcatccgacccacgcacagcatgttccccttctttacggccctcacagatgcgtactccagggtgctgaggccggcagagggggtgcctgcattgctaaaagagctgagggaggggtcaaaggacctgactacagtgttggagagatgcttgaaccggttagagtgggatcggtcgcaggagcaggcaaggcagcaggcagaggatgaggttgagcaggaacggatgcagatgtcaatgattgactggcatgattttgttgttgtggagaccattgaatttgcagatgatgagtatgaggggcttcctgtgccacttacactggaggagttgaagcgccagaagaggatggagaacttgggagaggaggaagcgatggatttgactgaaccttctaaggaggttgagatggaaatggatgaagaggagatgcaacttgttgaggaaggaatgcgggcagcacggcttgaggagaatgatggagcagcacaagttagcttgccgggtgatgacgaggcacctatgaggattgtcaagaactacaagaggcctgaggagaggattccggcagagagagacccaactaagtttgttgtctcgccaataactggggaactcattccgatcagcgagatggaggaacacatgcgcatctcactcattgaccctaagtacaaggagcagaaagagaggatgttagccaagatcaaggagactacccttgcacctgatgatgaaatatcacggaacattgttggccttgctcgcactcgccctgatatttttggaaccactgaggaggaggtgtctaacgccgtcaaggcagaaattgagaagaaaaaggatgaacagccaaagcaggttatttgggatggtcattctggtagcattggacgcactgctactcatgcattatctcagcctcagggtggtgaggaacagtttgatgctacgaatgttgatgggaggcctgttcctggtccagctccacttgtccgacctggcatgccgttgcctcgacctcctcagccacttcctcttgttaatgttcctcgttttatcgctccaccagcaccatactctgttccacccccaggttctcatatgcctggagttccacacatgatgcctcacatgcatctgcctccacagcagatacctggccagccgccgatggttaggatgccaggtcaaatggttcatatgccaaccagcattcctccgcctcctggccaaactcagtttatgcctggtccaccacgcacatttgctatgcccccatcatcgcacatgccacccatgatcaatcccattggaatccctcagcctccagcaccgcctctgcctccacagcctcctgctgaagagcaaccacctccacccgatgaaccagaacctaagaggcagagaacagatgatgcttctctcatcccagcagagcagtaccttgttcagcatccgggtcctgctagcatctctgtatctgtacccaaccttgatgaagggaacttgcgaggccaaattttgcagattcctgtccaatcactgtcagacacagttggtagtctgaaggagcaaattgctggagagttgcaactccctgctaataagcagaagttgagtgtgaggactagtttcctcaaagacaaccttactcttgcttactacaatgtgggtcctggagtggtgatcaatctaacactgagggagcgtggtgggagaaagaaatgagtcttttggttctcagttggcagtttaatgcttacaactataattcagcagctatcatggagaaccagttcgtatctttcatattattttcttttgtatgctatatgcaatcatttgtgttatgtgaacatcgtactttcctctatattatgatacagttaaatcttgtgagtggttctgcctagtatgttacttgaggttgctaaatgctaatggatactttcttggccacttaatgttaaatcgtatggcttctctaacttcttttgtttggtctttgcgagatgccttctatataaagagttcggatttctgttttctattcaatgttatgttttttcttgtcttatgggtgtacatgttacatgtagattcttctgtacaatgtcgatgacagtactatttgtttggtggttattttgaaaggtttaggctgatgaccgttcttgtagttttttcattgtgtatgatgccactgattattgaaaatactttttgacagggcatccattgcgtcacagctgaagtaggagttttttttgtatacgctgaaatatctgaagtagggatatgaaatattttttgtttgttatgtacattatctggttgtttccttgtgttattgaactgatctatcctgcaaaaactgttgtacgctaaccaggttttgttgtactgtatgttctcacaggtcattggcatacgtacctgtttttttggtatggtgctgcatgcaactttccagtatacggactgttaattcattcccatggcattatgttcctttatccttacttttgttggtattgtggtagcagtgcacagtgaaggtagaaaatcgaagttgtcatttttaaagtgaaggcctcccaaacagtgcctaaaactcgctatactcctcacccctcgggtaacccatctcgaaaggtgcccttttctcatatttgcaaatgga

SEQ ID NO: 75269 - DNA, 3259 bp, Zea Mays
tccaaaaataccaatccgccttccatgttctcgtcgctgcctccgtctgacggctcgaagctccctccagttccgatctaaacccgccgaaaccctaatccccatggctgccgccatgggcaaccccatcctgaccctccccgcaccggagggcaacggcaccgggggcggcgacgccgaccagcagctgcagcaggcgccgcctaagccgcctcctcccggcgcgaagacggaccccccggcgacggtggccacccacacgcgcaccatcggcatcatccaccctccgcccgacatccgcgtcatcatcgagaagacggctaccttcgtcgccaagaacgggcccgagttcgagcgccgcatcatctccctcaaccagggcaacgccaaattcaacttcctgcagccctcggatccctaccacgcctactaccagcaccgcgtttccgagatagccgctgcgccgcccggcgcggacggcccctcgggcgccgatactggcgcggctcccgacgaatcgccagcgtcggccccggccgacggcgccgccgccgcacccgtagatggcgctgctgcggacgcaaaggccgatcactccgcgcccttccgcgtggggccgccgcccaaggtgctggtgccacccaaggctgagctgtacacggtgcggctgcccgagggtatcacaggggaggagctggacatcatcaagctgaccgcccaatttgtggcgcggaacgggaagaacttcctgacgagcctggcgcaacgcgagagcaacaacatgcagttccacttcatccgacccacgcacagcatgttccccttctttacggccctcacagatgcgtactccagggtgctgaggccggcagagggggtgcctgcattgctaaaagagctgagggaggggtcaaaggacctgactacagtgttggagagatgcttgaaccggttagagtgggatcggtcgcaggagcaggcaaggcagcaggcagaggatgaggttgagcaggaacggatgcagatgtcaatgattgactggcatgattttgttgttgtggagaccattgaatttgcagatgatgagtatgaggggcttcctgtgccacttacactggaggagttgaagcgccagaagaggatggagaacttgggagaggaggaagcgatggatttgactgaaccttctaaggaggttgagatggaaatggatgaagaggagatgcaacttgttgaggaaggaatgcgggcagcacggcttgaggagaatgatggagcagcacaagttagcttgccgggtgatgacgaggcacctatgaggattgtcaagaactacaagaggcctgaggagaggattccggcagagagagacccaactaagtttgttgtctcgccaataactggggaactcattccgatcagcgagatggaggaacacatgcgcatctcactcattgaccctaagtacaaggagcagaaagagaggatgttagccaagatcaaggagactacccttgcacctgatgatgaaatatcacggaacattgttggccttgctcgcactcgccctgatatttttggaaccactgaggaggaggtgtctaacgccgtcaaggcagaaattgagaagaaaaaggatgaacagccaaagcaggttatttgggatggtcattctggtagcattggacgcactgctactcatgcattatctcagcctcagggtggtgaggaacagtttgatgctacgaatgttgatgggaggcctgttcctggtccagctccacttgtccgacctggcatgccgttgcctcgacctcctcagccacttcctcttgttaatgttcctcgttttatcgctccaccagcaccatactctgttccacccccaggttctcatatgcctggagttccacacatgatgcctcacatgcatctgcctccacagcagatacctggccagccgccgatggttaggatgccaggtcaaatggttcatatgccaaccagcattcctccgcctcctggccaaactcagtttatgcctggtccaccacgcacatttgctatgcccccatcatcgcacatgccacccatgatcaatcccattggaatccctcagcctccagcaccgcctctgcctccacagcctcctgctgaagagcaaccacctccacccgatgaaccagaacctaagaggcagagaacagatgatgcttctctcatcccagcagagcagtaccttgttcagcatccgggtcctgctagcatctctgtatctgtacccaaccttgatgaagggaacttgcgaggccaaattttgcagattcctgtccaatcactgtcagacacagttggtagtctgaaggagcaaattgctggagagttgcaactccctgctaataagcagaagttgagtgtgaggactagtttcctcaaagacaaccttactcttgcttactacaatgtgggtcctggagtggtgatcaatctaacactgagggagcgtggtgggagaaagaaatgagtcttttggttctcagttggcagtttaatgcttacaactataattcagcagctatcatggagaaccagttcgtatctttcatattattttcttttgtatgctatatgcaatcatttgtgttatgtgaacatcgtactttcctctatattatgatacagttaaatcttgtgagtggttctgcctagtatgttacttgaggttgctaaatgctaatggatactttcttggccacttaatgttaaatcgtatggcttctctaacttcttttgtttggtctttgcgagatgccttctatataaagagttcggatttctgttttctattcaatgttatgttttttcttgtcttatgggtgtacatgttacatgtagattcttctgtacaatgtcgatgacagtactatttgtttggtggttattttgaaaggtttaggctgatgaccgttcttgtagttttttcattgtgtatgatgccactgattattgaaaatactttttgacagggcatccattgcgtcacagctgaagtaggagttttttttgtatacgctgaaatatctgaagtcattggcatacgtacctgtttttttggtatggtgctgcatgcaactttccagtatacggactgttaattcattcccatggcattatgttcctttatccttacttttgttggtattgtggtagcagtgcacaggagctaaagtaccaaagctaaaagtgcctaaaatattac

SEQ ID NO: 75270 - DNA, 2736 bp, Zea Mays
aacagctgaaatttctccaaaaataccaatccgccttccatgttctcgtcgctgcctccgtctgacggctcgaagctccctccagttccgatctaaacccgccgaaaccctaatccccatggctgccgccatgggcaaccccatcctgaccctccccgcaccggagggcaacggcaccgggggcggcgacgccgaccagcagctgcagcaggcgccgcctaagccgcctcctcccggcgcgaagacggaccccccggcgacggtggccacccacacgcgcaccatcggcatcatccaccctccgcccgacatccgcgtcatcatcgagaagacggctaccttcgtcgccaagaacgggcccgagttcgagcgccgcatcatctccctcaaccagggcaacgccaaattcaacttcctgcagccctcggatccctaccacgcctactaccagcaccgcgtttccgagatagccgctgcgccgcccggcgcggacggcccctcgggcgccgatactggcgcggctcccgacgaatcgccagcgtcggccccggccgacggcgccgccgccgcacccgtagatggcgctgctgcggacgcaaaggccgatcactccgcgcccttccgcgtggggccgccgcccaaggtgctggtgccacccaaggctgagctgtacacggtgcggctgcccgagggtatcacaggggaggagctggacatcatcaagctgaccgcccaatttgtggcgcggaacgggaagaacttcctgacgagcctggcgcaacgcgagagcaacaacatgcagttccacttcatccgacccacgcacagcatgttccccttctttacggccctcacagatgcgtactccagggtgctgaggccggcagagggggtgcctgcattgctaaaagagctgagggaggggtcaaaggacctgactacagtgttggagagatgcttgaaccggttagagtgggatcggtcgcaggagcaggcaaggcagcaggcagaggatgaggttgagcaggaacggatgcagatgtcaatgattgactggcatgattttgttgttgtggagaccattgaatttgcagatgatgagtatgaggggcttcctgtgccacttacactggaggagttgaagcgccagaagaggatggagaacttgggagaggaggaagcgatggatttgactgaaccttctaaggaggttgagatggaaatggatgaagaggagatgcaacttgttgaggaaggaatgcgggcagcacggcttgaggagaatgatggagcagcacaagttagcttgccgggtgatgacgaggcacctatgaggattgtcaagaactacaagaggcctgaggagaggattccggcagagagagacccaactaagtttgttgtctcgccaataactggggaactcattccgatcagcgagatggaggaacacatgcgcatctcactcattgaccctaagtacaaggagcagaaagagaggatgttagccaagatcaaggagactacccttgcacctgatgatgaaatatcacggaacattgttggccttgctcgcactcgccctgatatttttggaaccactgaggaggaggtgtctaacgccgtcaaggcagaaattgagaagaaaaaggatgaacagccaaagcaggttatttgggatggtcattctggtagcattggacgcactgctactcatgcattatctcagcctcagggtggtgaggaacagtttgatgctacgaatgttgatgggaggcctgttcctggtccagctccacttgtccgacctggcatgccgttgcctcgacctcctcagccacttcctcttgttaatgttcctcgttttatcgctccaccagcaccatactctgttccacccccaggttctcatatgcctggagttccacacatgatgcctcacatgcatctgcctccacagcagatacctggccagccgccgatggttaggatgccaggtcaaatggttcatatgccaaccagcattcctccgcctcctggccaaactcagtttatgcctggtccaccacgcacatttgctatgcccccatcatcgcacatgccacccatgatcaatcccattggaatccctcagcctccagcaccgcctctgcctccacagcctcctgctgaagagcaaccacctccacccgatgaaccagaacctaagaggcagagaacagatgatgcttctctcatcccagcagagcagtaccttgttcagcatccgggtcctgctagcatctctgtatctgtacccaaccttgatgaagggaacttgcgaggccaaattttgcagattcctgtccaatcactgtcagacacagttggtagtctgaaggagcaaattgctggagagttgcaactccctgctaataagcagaagttgagtgtgaggactagtttcctcaaagacaaccttactcttgcttactacaatgtgggtcctggagtggtgatcaatctaacactgagggagcgtggtgggagaaagaaatgagtcttttggttctcagttggcagtttaatgcttacaactataattcagcagctatcatggagaaccagtcattggcatacgtacctgtttttttggtatggtgctgcatgcaactttccagtatacggactgttaattcattcccatggcattatgttcctttatccttacttttgttggtattgtggtagcagtgc

SEQ ID NO: 75271 - DNA, 2797 bp, Zea Mays
gaacagctgaaatttctccaaaaataccaatccgccttccatgttctcgtcgctgcctccgtctgacggctcgaagctccctccagttccgatctaaacccgccgaaaccctaatccccatggctgccgccatgggcaaccccatcctgaccctccccgcaccggagggcaacggcaccgggggcggcgacgccgaccagcagctgcagcaggcgccgcctaagccgcctcctcccggcgcgaagacggaccccccggcgacggtggccacccacacgcgcaccatcggcatcatccaccctccgcccgacatccgcgtcatcatcgagaagacggctaccttcgtcgccaagaacgggcccgagttcgagcgccgcatcatctccctcaaccagggcaacgccaaattcaacttcctgcagccctcggatccctaccacgcctactaccagcaccgcgtttccgagatagccgctgcgccgcccggcgcggacggcccctcgggcgccgatactggcgcggctcccgacgaatcgccagcgtcggccccggccgacggcgccgccgccgcacccgtagatggcgctgctgcggacgcaaaggccgatcactccgcgcccttccgcgtggggccgccgcccaaggtgctggtgccacccaaggctgagctgtacacggtgcggctgcccgagggtatcacaggggaggagctggacatcatcaagctgaccgcccaatttgtggcgcggaacgggaagaacttcctgacgagcctggcgcaacgcgagagcaacaacatgcagttccacttcatccgacccacgcacagcatgttccccttctttacggccctcacagatgcgtactccagggtgctgaggccggcagagggggtgcctgcattgctaaaagagctgagggaggggtcaaaggacctgactacagtgttggagagatgcttgaaccggttagagtgggatcggtcgcaggagcaggcaaggcagcaggcagaggatgaggttgagcaggaacggatgcagatgtcaatgattgactggcatgattttgttgttgtggagaccattgaatttgcagatgatgagtatgaggggcttcctgtgccacttacactggaggagttgaagcgccagaagaggatggagaacttgggagaggaggaagcgatggatttgactgaaccttctaaggaggttgagatggaaatggatgaagaggagatgcaacttgttgaggaaggaatgcgggcagcacggcttgaggagaatgatggagcagcacaagttagcttgccgggtgatgacgaggcacctatgaggattgtcaagaactacaagaggcctgaggagaggattccggcagagagagacccaactaagtttgttgtctcgccaataactggggaactcattccgatcagcgagatggaggaacacatgcgcatctcactcattgaccctaagtacaaggagcagaaagagaggatgttagccaagatcaaggagactacccttgcacctgatgatgaaatatcacggaacattgttggccttgctcgcactcgccctgatatttttggaaccactgaggaggaggtgtctaacgccgtcaaggcagaaattgagaagaaaaaggatgaacagccaaagcaggttatttgggatggtcattctggtagcattggacgcactgctactcatgcattatctcagcctcagggtggtgaggaacagtttgatgctacgaatgttgatgggaggcctgttcctggtccagctccacttgtccgacctggcatgccgttgcctcgacctcctcagccacttcctcttgttaatgttcctcgttttatcgctccaccagcaccatactctgttccacccccaggttctcatatgcctggagttccacacatgatgcctcacatgcatctgcctccacagcagatacctggccagccgccgatggttaggatgccaggtcaaatggttcatatgccaaccagcattcctccgcctcctggccaaactcagtttatgcctggtccaccacgcacatttgctatgcccccatcatcgcacatgccacccatgatcaatcccattggaatccctcagcctccagcaccgcctctgcctccacagcctcctgctgaagagcaaccacctccacccgatgaaccagaacctaagaggcagagaacagatgatgcttctctcatcccagcagagcagtaccttgttcagcatccgggtcctgctagcatctctgtatctgtacccaaccttgatgaagggaacttgcgaggccaaattttgcagattcctgtccaatcactgtcagacacagttggtagtctgaaggagcaaattgctggagagttgcaactccctgctaataagcagaagttgagtgtgaggactagtttcctcaaagacaaccttactcttgcttactacaatgtgggtcctggagtggtgatcaatctaacactgagggagcgtggtgggagaaagaaatgagtcttttggttctcagttggcagtttaatgcttacaactataattcagcagctatcatggagaaccaggcatccattgcgtcacagctgaagtaggagttttttttgtatacgctgaaatatctgaagtcattggcatacgtacctgtttttttggtatggtgctgcatgcaactttccagtatacggactgttaattcattcccatggcattatgttcctttatccttacttttgttggtattgtggtagcagtgc

SEQ ID NO: 75272 - DNA, 1572 bp, Zea Mays
ctcgttgccatctctaaggacgcaggttaaatgcatgctgatctaatgtgtaggctggttatcaaaatatattagccagtgtatatataagtacatcacataaacttttacagttactagatcattttgcgcgcttcgcgcgccctgcagttgcaaccggatgttgtcaactacttgaacaaaacaataatcatcccatcaatttggcacgcaaataaaaagaacacatataataaatggcaaactaatctaaagttgttctggcagtcaacaagcatgcaaacaaagtgattatgtctagatctttacatagcgcgacaacagttcatgaccaagcaacattacaagcgtcagatagtgtcactgcaaaagcaaacatagtgctaacaacattattcacaagtctagaaatgagcgagttacaacttttttgggtggcgaccattgtaaacaaaagctaacaatagcgatcacctggatctacacatatatacatacaaaattttcttctttctggatccacaaacgttcggctttaaagtgcacagaactactctggaataaggttggattaatggaatgctctgcaacgaaaaggataataataataatattaccacaattcaatatatctgaagacacactacatatatatatgcaaatagaaaagtgggttgctacatatatgcaaatagaaaaggaaagaatggatacctgtaggttgatagaattggaatgcactaaaaaatttctaatgcatgtaaattgagcatgcgagccatccagcagcgtcaaagatatcgtgcataagaaaatattgtaaagtaaaataaatggttaatgttctgtaacacatgttagtgacaagagaaaataattgtgtatttgtacctggtagtataactgaaatgctctagccctgccatatatttctacactaactttctgtgtcatgaatgttggcaagggtgtgctgaatggttgtagatgatgaattgatttatgaagtttcaatgatgcatatgaagctaatttttagcagaaatgaacatgggtatatccttagcactttcaaagttgcaggttcttggcaaatgcagcaggttttattcagtacgatgtgatacttatactaattgttttgataaaagtaaataaagctagaaatttcttccctgaaacatacaaacaatcatttttgcatagatgcaaattatggcgaagctatggagtctattctataataagtaggggtgctattttgctctagttcgatacaaaagagggaaatagtattaggctatagaaagatgacatcaagacaactaaaattgttaattcatctttagtacttaaacagagtggaccaatattgaaaatcattatgaaacatcaatctttataatgaagtcccaacaaaaataacatgacagttagaaagaacaacctcaaatgccaccatgatttgtcccttggtgatttctaatatcacacttgaatccagttagacttaatgggagaaatttggaacggaaaaataaaattatttgtccaaaaacaacatgatctaat

SEQ ID NO: 75273 - DNA, 1077 bp, Zea Mays
atcggacggctgcggcctcaattgctgatcggatcgcggccgctggaaatctgcgtgactgcgtctatactgcgcaggcacgagcgtttgtgttgcggcgaggttttcgtgcggccgctgcggtgacaagcaggtcctccctcaagctcgcggcggatcagcgaccgatcgacccgtcttcctcggttcctcatccatcccgggcatccggattccggtgagcggaggaaggcgccatgaaagctgcggaggacgccacgcgctgccctcagatcccccggcgttgccaccactgtgccgggccactctccaaggacatgctggacagtacctccgttggttcgagatagcttctccatgattggttcggctcttgggggtatagcaggagcgttttatggtttcaaccatgttatgcctgttgttcgacgtcacattaagggcccaatgtggatgcatttttttgttggtgcaccaccagttattgtgttctcttctgcatgtgctggattagcaggtggtacaataccagccaccgcacagctggtttcatcatcctgtcatgccgtgtcatcgcactcctttgcccgctcttcgcgtgtaccaacacatgcaccctccttcgcccccgctgcatctcatgacgacatgcgcaagacaagaagctcctcaccgttgtaagttatcgggtacaacagttcctctacataactccgcctgccttgagaaactaccctattatttaactatgcaagactcatcccatcctactctatcaaacacgaatgttttatcgctccttgccctgtttaatcagggatgccactgtacatggtaaatttctctctctcgtggacagatgctacacgtgccctgtttataaattttggatatatcttgatgtatagctagcattgggcaatgtttcgtggttcaataaaacttcgtgacgtgaccagtgttacactgagctgatgttcttttgagacattccagccctcgaagatattgttttgctcgatggcattgtgactgcattcagtatttacatgaaaaatgccagctatttgttattgg

SEQ ID NO: 75274 - DNA, 1029 bp, Zea Mays
atcggacggctgcggcctcaattgctgatcggatcgcggccgctggaaatctgcgtgactgcgtctatactgcgcaggcacgagcgtttgtgttgcggcgaggttttcgtgcggccgctgcggtgacaagcaggtcctccctcaagctcgcggcggatcagcgaccgatcgacccgtcttcctcggttcctcatccatcccgggcatccggattccggtgagcggaggaaggcgccatgaaagctgcggaggacgccacgcgctgccctcagatcccccggcgttgccaccactgtgccgggccactctccaaggacatggaaacgagcagctggacagtacctccgttggttcgagatagcttctccatgattggttcggctcttgggggtatagcaggagcgttttatggtttcaaccatggcaccaccagttattgtgttctcttctgcatgtgctggattagcaggtggtacaataccagccaccgcacagctggtttcatcatcctgtcatgccgtgtcatcgcactcctttgcccgctcttcgcgtgtaccaacacatgcaccctccttcgcccccgctgcatctcatgacgacatgcgcaagacaagaagctcctcaccgttgtaagttatcgggtacaacagttcctctacataactccgcctgccttgagaaactaccctattatttaactatgcaagactcatcccatcctactctatcaaacacgaatgttttatcgctccttgccctgtttaatcagggatgccactgtacatggtaaatttctctctctcgtggacagatgctacacgtgccctgtttataaattttggatatatcttgatgtatagctagcattgggcaatgtttcgtggttcaataaaacttcgtgacgtgaccagtgttacactgagctgatgttcttttgagacattccagccctcgaagatattgttttgctcgatggcattgtgactgcattcagtatttacatgaaaaatgccagctatttgttattgg

SEQ ID NO: 75275 - DNA, 1488 bp, Zea Mays
ctgtctgtatacctgtcactcacgctaccgccgtgaccgatcatctcccactctctcgtcagatcctctcggctagctagctagctagctaggacagaggagggaggggaaggcgctggctatggcgactgcggcggcggcggcggccatggaggagccggacgtcgtcaacggccgcgacgtggtgagctgggtggcgtccggggtggtgctgtggtcgaccgccttcttgctggtgcgggcgctgttccccaagcgctcctacgacttctgcaaccgcgccgtctccaccatgcacgccgtcgccgccgtgtgcctcgcctgcctctccgtcgacgactggtcgtgccccgtctgcccgctcgccgccgcatcctcccctcgccagatgaaggcgctggcggttacgctggcgtacatggtgtacgacgcggcgtgctgccacctcaacggcgacacgcggctggacaacgccgtgcaccacctggtcagcatcgtcggcatcggcgcggggctcgcctaccagagggtgagcgagcgagcggcaacgagtcacacaacatcacatgcacatcactagcttcgtcgtcgtcggtagctgcagagcagctagcagggccggcggccgcgctctgttgagcatgcagcagagctaaccaattccaaccaaccataccaaccagccaacaacgaaacgaactaacgaggcggcgttattgccgttggcgtggtgcacgcagtgcgggacggagatggtggccagcatgctcgtgacggagatgtccagcccgctgctgcacctgcgggagatgctcaaggagctgggcgtgcgggacacggagctgaacctcctcgtcgacgtgctcttcgccgccaccttctccgccgcccggatgggcgtcgggccgtacctcacctacgtcaccgtgacggccgacaaccccatcctcatcaaggcgatggcgacggggctgcagctggtgagcgcctactggttcctgcggatcctccggatggtcaggtacaagctcgccggcaagaagaagccgacgccggccaagctcgccgccgccgccgccaactgacgtaataagcgccggcgacgaccttcacgagctacgcacatttatgataccgggagttggattcgacagaggccgtgctgtacatatagtacaaatacacacacacgcccgcctctgaagcaatgcaatgcaatgcaatgcaatttctccactgccaaggatgtgtctgtcatctctcatcaaccaagtgtcggtgcgtaccaactgtacgcgcgttgctagcgcaaaaagaaaagaaaaaaaagaaagaaaaaaatcgttcaatgagtcctgttgaatgtggcggcactttaactgcaaactgctgtgagtgcgccaaaacgattgatggtgatgaatgatgatgatgatgtgcagcactgtgaccacgtcaacctttcaccaacgtggcaactaaatggcg

SEQ ID NO: 75276 - DNA, 1171 bp, Zea Mays
ctgtctgtatacctgtcactcacgctaccgccgtgaccgatcgttcgttccttccttctcttctccctcccttcgcgggccgcgcgcctattttatttactactgtattcatatcatttatattttttggtttccttccctggcagatctcccactctctcgtcagatcctctcggctagctagctagctagctaggacagaggagggaggggaaggcgctggctatggcgactgcggcggcggcggcggccatggaggagccggacgtcgtcaacggccgcgacgtggtgagctgggtggcgtccggggtggtgctgtggtcgaccgccttcttgctggtgcgggcgctgttccccaagcgctcctacgacttctgcaaccgcgccgtctccaccatgcacgccgtcgccgccgtgtgcctcgcctgcctctccgtcgacgactggtcgtgccccgtctgcccgctcgccgccgcatcctcccctcgccagatgctcaaggagctgggcgtgcgggacacggagctgaacctcctcgtcgacgtgctcttcgccgccaccttctccgccgcccggatgggcgtcgggccgtacctcacctacgtcaccgtgacggccgacaaccccatcctcatcaaggcgatggcgacggggctgcagctggtgagcgcctactggttcctgcggatcctccggatggtcaggtacaagctcgccggcaagaagaagccgacgccggccaagctcgccgccgccgccgccaactgacgtaataagcgccggcgacgaccttcacgagctacgcacatttatgataccgggagttggattcgacagaggccgtgctgtacatatagtacaaatacacacacacgcccgcctctgaagcaatgcaatgcaatgcaatgcaatttctccactgccaaggatgtgtctgtcatctctcatcaaccaagtgtcggtgcgtaccaactgtacgcgcgttgctagcgcaaaaagaaaagaaaaaaaagaaagaaaaaaatcgttcaatgagtcctgttgaatgtggcggcactttaactgcaaactgctgtgagtgcgccaaaacgattgatggtgatgaatgatgatgatgatgtgcagcactgtgaccacgtcaacctttcaccaacgtggcaactaaatggcg

SEQ ID NO: 75277 - DNA, 3317 bp, Zea Mays
cgccgcgagcgaggggagcgacggcgggagcatccccgtcatgccggcgttcttgaggtcgaggttgtcgacgcgaccctcttgccccagctcggatccgcctaggcgcgccacgacaccgtcctcgccggccccgccggcacggtgctcgtcctcaccgagctcgccacgctatcctacaccccctccggatccgccaagtgatgaagcatcccctctctttgccgtccaagccgcggagccccatactggcctctgacgccgtcttcgcactctgcgacgtcggcacgccgtggcgcatccagtggaagctcttctcctgcccgcttgccatgctcacagggggctatgcgcccgtggagtgagcggcgtggggagacatcttcgaggtcctcaagcgtccccggctcctggctggggcggcggccgctgggtcattatgatcggcaggctcaagtcctccttcgccatggacgcatcgtgctccacggtcttaatacttcgcctagatctggccaccatggagtgggaggaagctgggcgcatgccgcccaatatgtaccgctgcttcactggcctttgcgaggctgcctcgcagggaggcgccataccgaccgctgctaccgggggtaacaataaggtcaaagttttcggaagcgatgggaaggtgtggttcgcaggccgccttcaccggtacacaacactcagtgctacagctgactggcgatcaagtccagacaacagtagcgccccctaccccagcgccgagccaggaccggcgaggaacacaagtcaactagtcaagtcgccgtgcggctcaccagctggcagccagcgagccagcagcggcacctggcgatccgatccaacgagccgcagggccacgaacacgacctcactaccgcatcctgccgtccaacccatccagctcactccgcgaccaatggctcgggccccaggagtcaggacgcccgcgttaagcaaacgaccgagccccgccgcgccgtcccgccagcgcgcagttaaaaacgcgggtgcacgcagcgcacccgtcgcttcgcttccttgctggctgtggctgcttcgtccgtcccacccaatcggcctctcccctccgctccccagcaggagcagccagcccagccctgacgcttcctccccacccggcgtgcaatcgctcccagtcctgactcgttcgctggaccgaacaccgcccggtggtgctcttccgccgtgcttctccgggctcctcctcgccgcccgccgcccggcggcgccgtcctggtggttccgtggggcgccggtcgggcgcgatcggccgtgcggccacccggctctcagtctcaggagagatatattgtaaaatggaagtactgcgtgatatgcacctgccaccaggatttggattccatccttcggatactgaacttgtttctcactacctgaagaggaaaatacttggccagaaaattgacaaagtgcaatcttccaatcgaggacaacaagtggcatttctttgcctctcgtgacaggaagtaccctactggctctaggtcaaacagggcaacactcgctggttactggaaatcaactgggaaggaccgagccataaagctgaagaagcgaactctaggaacaaagaagactttagtctttcatgagggtcggcctccctctggcagacgcactgagtggattatgcatgagtattacatagatgagaacgaatgtaaagtcagccctgatatgaaggatgcttttgtcctctgccgtgttactaagagaagtgactgggaactggataatgaggtgggcaacaggtaccctcatctggaacaactagatgctgctgctgcatcagttgccagcactgtaaagccagaagatgcggttgccacagttatctgtccagaagaatctaatcgtgctgctacaccagttggcagtgatgaactatctaatgatgttggtcaggaacctatcactcctgattcatcacctccaaacggtggtaaagaactggaagtatggctggaagaactgttggatccttcaccttcatttaaccttgtagctgatactcgttctgctgatgtgtctctgactgaccaatatgctgaatcgtccaatcctggttctgtgtctcggaatattggaccaggccatgctagccctatccaggatggaacagatgctacagactacctattaactgatgatcttcccgaggatctttacagtatgttgtatcctggtactgaccagttctatgatagtatgttcttggaacaagctggccaggaaggtattgcttttcctaccaaccaagcgtactacatgatgggaatggaatcctatgctcttccaaccaacttgaacggaactctgaatgctgaattgcagtcagaccaggaaaataacacgacgaatctggcaaatggaaatactgacactggagttacaatacaaagccgcagagcaaccacatctcctgctaacatttcactagcagctggcaagattaaaatgcaggttggaattaataggatggtcacaagtagttccgtatccatcaaccagaccatgcggtttacagataacagtggccgacgtcttgatctcaagactgatgatgttgagcaccagaagaaaactacaaacagtgccatttctgccaagcagtctagggcagccaatcctgaaggccacagtagtcaaggctacctcaagggcttcaaaaatacattcagatgttcatcagctggattcaaggcatacatatcttttgccttttttgtggttggagtcgctgctgctgcagtgctgcatcaccaccgctcctgtgccaacctataaatttgaatcaccaaacaccagcatgcttagttgtagttctagtggtcagcggcagcattggcttgagggcaggtatcttcccagattcatccttgcagtagttcgtcggctttacttacttgcattggactggagtagtagttgagttcctcagcttatatcacgggggttactggcctggacaatggagatacatttgtgcgaccactgattcccagttatctccacatgttttttgtggtgctgtacatattaagtttttttctcgttttgatcgtctagttgctaatgggtgcctatttaaaaaaacgaaaaaaagagggaaaattggtgggggcatatgaacaaaagaaaagaaaagaaagaaagatgtactttaggttatccttagatttgtaaagctgaaccatgtttataaatgatagtggatgactacattattaaactagagaccactgcat

SEQ ID NO: 75278 - DNA, 3373 bp, Zea Mays
cgccgcgagcgaggggagcgacggcgggagcatccccgtcatgccggcgttcttgaggtcgaggttgtcgacgcgaccctcttgccccagctcggatccgcctaggcgcgccacgacaccgtcctcgccggccccgccggcacggtgctcgtcctcaccgagctcgccacgctatcctacaccccctccggatccgccaagtgatgaagcatcccctctctttgccgtccaagccgcggagccccatactggcctctgacgccgtcttcgcactctgcgacgtcggcacgccgtggcgcatccagtggaagctcttctcctgcccgcttgccatgctcacagggggctatgcgcccgtggagtgagcggcgtggggagacatcttcgaggtcctcaagcgtccccggctcctggctggggcggcggccgctgggtcattatgatcggcaggctcaagtcctccttcgccatggacgcatcgtgctccacggtcttaatacttcgcctagatctggccaccatggagtgggaggaagctgggcgcatgccgcccaatatgtaccgctgcttcactggcctttgcgaggctgcctcgcagggaggcgccataccgaccgctgctaccgggggtaacaataaggtcaaagttttcggaagcgatgggaaggtgtggttcgcaggccgccttcaccggtacacaacactcagtgctacagctgactggcgatcaagtccagacaacagtagcgccccctaccccagcgccgagccaggaccggcgaggaacacaagtcaactagtcaagtcgccgtgcggctcaccagctggcagccagcgagccagcagcggcacctggcgatccgatccaacgagccgcagggccacgaacacgacctcactaccgcatcctgccgtccaacccatccagctcactccgcgaccaatggctcgggccccaggagtcaggacgcccgcgttaagcaaacgaccgagccccgccgcgccgtcccgccagcgcgcagttaaaaacgcgggtgcacgcagcgcacccgtcgcttcgcttccttgctggctgtggctgcttcgtccgtcccacccaatcggcctctcccctccgctccccagcaggagcagccagcccagccctgacgcttcctccccacccggcgtgcaatcgctcccagtcctgactcgttcgctggaccgaacaccgcccggtggtgctcttccgccgtgcttctccgggctcctcctcgccgcccgccgcccggcggcgccgtcctggtggttccgtggggcgccggtcgggcgcgatcggccgtgcggccacccggctctcagtctcaggagagatatattgtaaaatggaagtactgcgtgatatgcacctgccaccaggatttggattccatccttcggatactgaacttgtttctcactacctgaagaggaaaatacttggccagaaaattgagtatgatcctataccagaggttgatatatataagcatgaaccatgggatttacctgcaaagtgcaatcttccaatcgaggacaacaagtggcatttctttgcctctcgtgacaggaagtaccctactggctctaggtcaaacagggcaacactcgctggttactggaaatcaactgggaaggaccgagccataaagctgaagaagcgaactctaggaacaaagaagactttagtctttcatgagggtcggcctccctctggcagacgcactgagtggattatgcatgagtattacatagatgagaacgaatgtaaagtcagccctgatatgaaggatgcttttgtcctctgccgtgttactaagagaagtgactgggaactggataatgaggtgggcaacaggtaccctcatctggaacaactagatgctgctgctgcatcagttgccagcactgtaaagccagaagatgcggttgccacagttatctgtccagaagaatctaatcgtgctgctacaccagttggcagtgatgaactatctaatgatgttggtcaggaacctatcactcctgattcatcacctccaaacggtggtaaagaactggaagtatggctggaagaactgttggatccttcaccttcatttaaccttgtagctgatactcgttctgctgatgtgtctctgactgaccaatatgctgaatcgtccaatcctggttctgtgtctcggaatattggaccaggccatgctagccctatccaggatggaacagatgctacagactacctattaactgatgatcttcccgaggatctttacagtatgttgtatcctggtactgaccagttctatgatagtatgttcttggaacaagctggccaggaaggtattgcttttcctaccaaccaagcgtactacatgatgggaatggaatcctatgctcttccaaccaacttgaacggaactctgaatgctgaattgcagtcagaccaggaaaataacacgacgaatctggcaaatggaaatactgacactggagttacaatacaaagccgcagagcaaccacatctcctgctaacatttcactagcagctggcaagattaaaatgcaggttggaattaataggatggtcacaagtagttccgtatccatcaaccagaccatgcggtttacagataacagtggccgacgtcttgatctcaagactgatgatgttgagcaccagaagaaaactacaaacagtgccatttctgccaagcagtctagggcagccaatcctgaaggccacagtagtcaaggctacctcaagggcttcaaaaatacattcagatgttcatcagctggattcaaggcatacatatcttttgccttttttgtggttggagtcgctgctgctgcagtgctgcatcaccaccgctcctgtgccaacctataaatttgaatcaccaaacaccagcatgcttagttgtagttctagtggtcagcggcagcattggcttgagggcaggtatcttcccagattcatccttgcagtagttcgtcggctttacttacttgcattggactggagtagtagttgagttcctcagcttatatcacgggggttactggcctggacaatggagatacatttgtgcgaccactgattcccagttatctccacatgttttttgtggtgctgtacatattaagtttttttctcgttttgatcgtctagttgctaatgggtgcctatttaaaaaaacgaaaaaaagagggaaaattggtgggggcatatgaacaaaagaaaagaaaagaaagaaagatgtactttaggttatccttagatttgtaaagctgaaccatgtttataaatgatagtggatgactacattattaaactagagaccactgcat

SEQ ID NO: 75279 - DNA, 3280 bp, Zea Mays
cgccgcgagcgaggggagcgacggcgggagcatccccgtcatgccggcgttcttgaggtcgaggttgtcgacgcgaccctcttgccccagctcggatccgcctaggcgcgccacgacaccgtcctcgccggccccgccggcacggtgctcgtcctcaccgagctcgccacgctatcctacaccccctccggatccgccaagtgatgaagcatcccctctctttgccgtccaagccgcggagccccatactggcctctgacgccgtcttcgcactctgcgacgtcggcacgccgtggcgcatccagtggaagctcttctcctgcccgcttgccatgctcacagggggctatgcgcccgtggagtgagcggcgtggggagacatcttcgaggtcctcaagcgtccccggctcctggctggggcggcggccgctgggtcattatgatcggcaggctcaagtcctccttcgccatggacgcatcgtgctccacggtcttaatacttcgcctagatctggccaccatggagtgggaggaagctgggcgcatgccgcccaatatgtaccgctgcttcactggcctttgcgaggctgcctcgcagggaggcgccataccgaccgctgctaccgggggtaacaataaggtcaaagttttcggaagcgatgggaaggtgtggttcgcaggccgccttcaccggtacacaacactcagtgctacagctgactggcgatcaagtccagacaacagtagcgccccctaccccagcgccgagccaggaccggcgaggaacacaagtcaactagtcaagtcgccgtgcggctcaccagctggcagccagcgagccagcagcggcacctggcgatccgatccaacgagccgcagggccacgaacacgacctcactaccgcatcctgccgtccaacccatccagctcactccgcgaccaatggctcgggccccaggagtcaggacgcccgcgttaagcaaacgaccgagccccgccgcgccgtcccgccagcgcgcagttaaaaacgcgggtgcacgcagcgcacccgtcgcttcgcttccttgctggctgtggctgcttcgtccgtcccacccaatcggcctctcccctccgctccccagcaggagcagccagcccagccctgacgcttcctccccacccggcgtgcaatcgctcccagtcctgactcgttcgctggaccgaacaccgcccggtggtgctcttccgccgtgcttctccgggctcctcctcgccgcccgccgcccggcggcgccgtcctggtggttccgtggggcgccggtcgggcgcgatcggccgtgcggccacccggctctcagtctcaggagagatatattgtaaaatggaagtactgcgtgatatgcacctgccaccaggatttggattccatccttcggatactgaacttgtttctcactacctgaagaggaaaatacttggccagaaaattgagtatgatcctataccagaggttgatatatataagcatgaaccatgggatttacctgcaaagtgcaatcttccaatcgaggacaacaagtggcatttctttgcctctcgtgacaggaagtaccctactggctctaggtcaaacagggcaacactcgctggttactggaaatcaactgggaaggaccgagccataaagctgaagaagcgaactctaggaacaaagaagactttagtctttcatgagggtcggcctccctctggcagacgcactgagtggattatgcatgagtattacatagatgagaacgaatgtaaagtcagccctgatatgaaggatgcttttgtcctctgccgtgttactaagagaagtgactgggaactggataatgaggtgggcaacaggtaccctcatctggaacaactagatgctgctgctgcatcagttgccagcactgtaaagccagaagatgcggttgccacagttatctgtccagaagaatctaatcgtgctgctacaccagttggcagtgatgaactatctaatgatgttggtcaggaacctatcactcctgattcatcacctccaaacggtggtaaagaactggaaaatttgcagaatcctggttctgtgtctcggaatattggaccaggccatgctagccctatccaggatggaacagatgctacagactacctattaactgatgatcttcccgaggatctttacagtatgttgtatcctggtactgaccagttctatgatagtatgttcttggaacaagctggccaggaaggtattgcttttcctaccaaccaagcgtactacatgatgggaatggaatcctatgctcttccaaccaacttgaacggaactctgaatgctgaattgcagtcagaccaggaaaataacacgacgaatctggcaaatggaaatactgacactggagttacaatacaaagccgcagagcaaccacatctcctgctaacatttcactagcagctggcaagattaaaatgcaggttggaattaataggatggtcacaagtagttccgtatccatcaaccagaccatgcggtttacagataacagtggccgacgtcttgatctcaagactgatgatgttgagcaccagaagaaaactacaaacagtgccatttctgccaagcagtctagggcagccaatcctgaaggccacagtagtcaaggctacctcaagggcttcaaaaatacattcagatgttcatcagctggattcaaggcatacatatcttttgccttttttgtggttggagtcgctgctgctgcagtgctgcatcaccaccgctcctgtgccaacctataaatttgaatcaccaaacaccagcatgcttagttgtagttctagtggtcagcggcagcattggcttgagggcaggtatcttcccagattcatccttgcagtagttcgtcggctttacttacttgcattggactggagtagtagttgagttcctcagcttatatcacgggggttactggcctggacaatggagatacatttgtgcgaccactgattcccagttatctccacatgttttttgtggtgctgtacatattaagtttttttctcgttttgatcgtctagttgctaatgggtgcctatttaaaaaaacgaaaaaaagagggaaaattggtgggggcatatgaacaaaagaaaagaaaagaaagaaagatgtactttaggttatccttagatttgtaaagctgaaccatgtttataaatgatagtggatgactacattattaaactagagaccactgcat

SEQ ID NO: 75280 - DNA, 3326 bp, Zea Mays
cgccgcgagcgaggggagcgacggcgggagcatccccgtcatgccggcgttcttgaggtcgaggttgtcgacgcgaccctcttgccccagctcggatccgcctaggcgcgccacgacaccgtcctcgccggccccgccggcacggtgctcgtcctcaccgagctcgccacgctatcctacaccccctccggatccgccaagtgatgaagcatcccctctctttgccgtccaagccgcggagccccatactggcctctgacgccgtcttcgcactctgcgacgtcggcacgccgtggcgcatccagtggaagctcttctcctgcccgcttgccatgctcacagggggctatgcgcccgtggagtgagcggcgtggggagacatcttcgaggtcctcaagcgtccccggctcctggctggggcggcggccgctgggtcattatgatcggcaggctcaagtcctccttcgccatggacgcatcgtgctccacggtcttaatacttcgcctagatctggccaccatggagtgggaggaagctgggcgcatgccgcccaatatgtaccgctgcttcactggcctttgcgaggctgcctcgcagggaggcgccataccgaccgctgctaccgggggtaacaataaggtcaaagttttcggaagcgatgggaaggtgtggttcgcaggccgccttcaccggtacacaacactcagtgctacagctgactggcgatcaagtccagacaacagtagcgccccctaccccagcgccgagccaggaccggcgaggaacacaagtcaactagtcaagtcgccgtgcggctcaccagctggcagccagcgagccagcagcggcacctggcgatccgatccaacgagccgcagggccacgaacacgacctcactaccgcatcctgccgtccaacccatccagctcactccgcgaccaatggctcgggccccaggagtcaggacgcccgcgttaagcaaacgaccgagccccgccgcgccgtcccgccagcgcgcagttaaaaacgcgggtgcacgcagcgcacccgtcgcttcgcttccttgctggctgtggctgcttcgtccgtcccacccaatcggcctctcccctccgctccccagcaggagcagccagcccagccctgacgcttcctccccacccggcgtgcaatcgctcccagtcctgactcgttcgctggaccgaacaccgcccggtggtgctcttccgccgtgcttctccgggctcctcctcgccgcccgccgcccggcggcgccgtcctggtggttccgtggggcgccggtcgggcgcgatcggccgtgcggccacccggctctcagtctcaggagagatatattgtaaaatggaagtactgcgtgatatgcacctgccaccaggatttggattccatccttcggatactgaacttgtttctcactacctgaagaggaaaatacttggccagaaaattgacaaagtgcaatcttccaatcgaggacaacaagtggcatttctttgcctctcgtgacaggaagtaccctactggctctaggtcaaacagggcaacactcgctggttactggaaatcaactgggaaggaccgagccataaagctgaagaagcgaactctaggaacaaagaagactttagtctttcatgagggtcggcctccctctggcagacgcactgagtggattatgcatgagtattacatagatgagaacgaatgtaaagtcagccctgatatgaaggatgcttttgtcctctgccgtgttactaagagaagtgactgggaactggataatgaggtgggcaacaggtaccctcatctggaacaactagatgctgctgctgcatcagttgccagcactgtaaagccagaagatgcggttgccacagttatctgtccagaagaatctaatcgtgctgctacaccagttggcagtgatgaactatctaatgatgttggtcaggaacctatcactcctgattcatcacctccaaacggtggtaaagaactggaagtatggctggaagaactgttggatccttcaccttcatttaaccttgtagctgatactcgttctgctgatgtgtctctgactgaccaatatgctgaatcgtccaatttgcagaatcctggttctgtgtctcggaatattggaccaggccatgctagccctatccaggatggaacagatgctacagactacctattaactgatgatcttcccgaggatctttacagtatgttgtatcctggtactgaccagttctatgatagtatgttcttggaacaagctggccaggaaggtattgcttttcctaccaaccaagcgtactacatgatgggaatggaatcctatgctcttccaaccaacttgaacggaactctgaatgctgaattgcagtcagaccaggaaaataacacgacgaatctggcaaatggaaatactgacactggagttacaatacaaagccgcagagcaaccacatctcctgctaacatttcactagcagctggcaagattaaaatgcaggttggaattaataggatggtcacaagtagttccgtatccatcaaccagaccatgcggtttacagataacagtggccgacgtcttgatctcaagactgatgatgttgagcaccagaagaaaactacaaacagtgccatttctgccaagcagtctagggcagccaatcctgaaggccacagtagtcaaggctacctcaagggcttcaaaaatacattcagatgttcatcagctggattcaaggcatacatatcttttgccttttttgtggttggagtcgctgctgctgcagtgctgcatcaccaccgctcctgtgccaacctataaatttgaatcaccaaacaccagcatgcttagttgtagttctagtggtcagcggcagcattggcttgagggcaggtatcttcccagattcatccttgcagtagttcgtcggctttacttacttgcattggactggagtagtagttgagttcctcagcttatatcacgggggttactggcctggacaatggagatacatttgtgcgaccactgattcccagttatctccacatgttttttgtggtgctgtacatattaagtttttttctcgttttgatcgtctagttgctaatgggtgcctatttaaaaaaacgaaaaaaagagggaaaattggtgggggcatatgaacaaaagaaaagaaaagaaagaaagatgtactttaggttatccttagatttgtaaagctgaaccatgtttataaatgatagtggatgactacattattaaactagagaccactgcat

SEQ ID NO: 75281 - DNA, 2749 bp, Zea Mays
tggactacctgcgccttcgccggcgcaccgccgcccgcgtgcgccgcgctcgcgctgtggctcgtggtgctcttctacctcctgggcgacacctaaaggatcacacaattgattcggcgatttgcactccacctgatgttgctttgctcgcaacttttgcttgccacgacggaggctagatccagctcctaggtgtccgtcgtccttccatctcccaccctccctcgttggagcacgagcaccaaagatcttcgtcggccctgcccctgcttccttcaactccaccaccaggtaatgccctggacttaattgaatgggctctcttctcaccaggatcggtgtcctgccatggctccacgccatgattgttgatcccgtgctgtaggtcatcagaaggggagcagaacccaagcaactagccttctctgctgcccttggtatcacgattgggatctttccgaaatattaggagcacctaaaggatcaactacgataaatgttttcagtgagtgtaccaaggccgaatcgtttcttccatttggttctggaagtcgagcatgtgttgggcagaagtttgttgttcttgcaatatcgatgttgattgccagtctgctccgcagctatgaggtatagcctcatccaagtttgtctaaagaaatggacacaacagttacagcagccaccttcatctcccaaaccctaagatcatcctcaccaaaagaaggatctgaagggagagtttggcaaacaaaaatctggcacgtttgctttcactgtattgtttttcactggtgttacatcagtatatgatctttagtttcctaccgtcgtttggaccatgctgaagtttggaaaggcgaccttggtgatgcagaagtgtcttttttcctctggatttttgacagaccctgtgtgcttcactggatctaagtttttgtcaggtttttggagcacccgcagggctgttagatcacaggagacgtatgttgatgtgtataaacagactcattttttcagttggggttttctcctctctgtggagaatgtaatgcccaacgcatgatgtttgtcgtgttgagatgttttttgatagttttttgcgtatgttgttgatattgattttattggatgtgaattcattcatcctttcatagtatatttgaattcatgatagtatctacatatgtacactgcttaaagatactatctacgtatctatatctattacaattttgtataaatactttttgatagtttttaatttgtatgacaaagcagagacacatacactgcttaaagatatgcgtctgagaacatcattgcatcatgccactgggcatacaagggtgttgaggaagactcaaccctagaaggtactactaatactagcaattacttttttaattaatgcctacattcctgttatgtagtatgcacatcggatttgtattgttgtcgtactattgatgcatgattttaacttgagggggcaagaatatgctaattaatttgtgtttatgttcttggtgcagatccctatttcttatatatcttatctctactattccattcacctctctctcctctcccacatttaaacgataaaaaatctaaaattatgcaaaaataaagattaataatttatgaaatatctagtcatggattttatactttgctctgtggcattaatcccttgtctggcattatctggtacttaaatacttaaagtatatatttttattccaaatgctacatacatatgtttttcagtcaacacaactccatctcgttttgtatttttcttagtgttcaatactatttggattctattaagtcagaaatagcaaagataacatagaaaggtggacttccaaatgcagaagcagttggaaaaattgtacatcttatgcaacttgatcaaactgttatattttagatcttttgtttagcattttttaatccacatgtatttctctatcatataaaactctatattgactctttaaaataatttatgtgaatttgataatgtctgtcacacggattctgtataccatagtgaattgatggttgagagactatgcatgaggcatgcaaattaacaagactcatacaagcagcgtcgaacagtgtgctgatgatgatcagagacacaagggcagcacatgatcaggtcttaacatgtttggcttccgaacaggcttttctccagatccccaagaaagaagaagaatatccggtcacatatgtgttgatgctcatccccaacatacataaattatcaatggtaccagcgagaggaaatcatatggctgcaccaagccaccaaaaaatcagttaccgtagtgaagaactttcattcatccaggcagtaaatgtatattagattggcagctgttattctgtaacatattatcacgttttttttcttttccctaagattgcagtagtaactatagtccgtgaaatcaaatctgagtttagagaatattttttctaaacttctgttctctatcatgtgtaaggataacttccttatgatatctcatatatcttttcaaatggttagccagctatttcaagtattaaatgatccagaagttgagaaaacacggttctattgatttcctagagacataaaaacagtacctaaatgcataatgatccccatgcttacctagtaccaaccaaataccagcaccattgtatacagataagaataaaagaagagagacaactttaatgcttg

SEQ ID NO: 75282 - DNA, 2762 bp, Zea Mays
gtacgtggactacctgcgccttcgccggcgcaccgccgcccgcgtgcgccgcgctcgcgctgtggctcgtggtgctcttctacctcctgggcgacacctaaaggatcacacaattgattcggcgatttgcactccacctgatgttgctttgctcgcaacttttgcttgccacgacggaggctagatccagctcctaggtgtccgtcgtccttccatctcccaccctccctcgttggagcacgagcaccaaaggtgcccagatcttcgtcggccctgcccctgcttccttcaactccaccaccaggtaatgccctggacttaattgaatgggctctcttctcaccaggatcggtgtcctgccatggctccacgccatgattgttgatcccgtgctgtaggtcatcagaaggggagcagaacccaagcaactagccttctctgctgcccttggtatcacgattgggatctttccgaaatattaggagcacctaaaggatcaactacgataaatgttttcagtgagtgtaccaaggccgaatcgtttcttccatttggttctggaagtcgagcatgtgttgggcagaagtttgttgttcttgcaatatcgatgttgattgccagtctgctccgcagctatgaggtatagcctcatccaagtttgtctaaagaaatggacacaacagttacagcagccaccttcatctcccaaaccctaagatcatcctcaccaaaagaaggatctgaagggagagtttggcaaacaaaaatctggcacgtttgctttcactgtattgtttttcactggtgttacatcagtatatgatctttagtttcctaccgtcgtttggaccatgctgaagtttggaaaggcgaccttggtgatgcagaagtgtcttttttcctctggatttttgacagaccctgtgtgcttcactggatctaagtttttgtcaggtttttggagcacccgcagggctgttagatcacaggagacgtatgttgatgtgtataaacagactcattttttcagttggggttttctcctctctgtggagaatgtaatgcccaacgcatgatgtttgtcgtgttgagatgttttttgatagttttttgcgtatgttgttgatattgattttattggatgtgaattcattcatcctttcatagtatatttgaattcatgatagtatctacatatgtacactgcttaaagatactatctacgtatctatatctattacaattttgtataaatactttttgatagtttttaatttgtatgacaaagcagagacacatacactgcttaaagatatgcgtctgagaacatcattgcatcatgccactgggcatacaagggtgttgaggaagactcaaccctagaaggtactactaatactagcaattacttttttaattaatgcctacattcctgttatgtagtatgcacatcggatttgtattgttgtcgtactattgatgcatgattttaacttgagggggcaagaatatgctaattaatttgtgtttatgttcttggtgcagatccctatttcttatatatcttatctctactattccattcacctctctctcctctcccacatttaaacgataaaaaatctaaaattatgcaaaaataaagattaataatttatgaaatatctagtcatggattttatactttgctctgtggcattaatcccttgtctggcattatctggtacttaaatacttaaagtatatatttttattccaaatgctacatacatatgtttttcagtcaacacaactccatctcgttttgtatttttcttagtgttcaatactatttggattctattaagtcagaaatagcaaagataacatagaaaggtggacttccaaatgcagaagcagttggaaaaattgtacatcttatgcaacttgatcaaactgttatattttagatcttttgtttagcattttttaatccacatgtatttctctatcatataaaactctatattgactctttaaaataatttatgtgaatttgataatgtctgtcacacggattctgtataccatagtgaattgatggttgagagactatgcatgaggcatgcaaattaacaagactcatacaagcagcgtcgaacagtgtgctgatgatgatcagagacacaagggcagcacatgatcaggtcttaacatgtttggcttccgaacaggcttttctccagatccccaagaaagaagaagaatatccggtcacatatgtgttgatgctcatccccaacatacataaattatcaatggtaccagcgagaggaaatcatatggctgcaccaagccaccaaaaaatcagttaccgtagtgaagaactttcattcatccaggcagtaaatgtatattagattggcagctgttattctgtaacatattatcacgttttttttcttttccctaagattgcagtagtaactatagtccgtgaaatcaaatctgagtttagagaatattttttctaaacttctgttctctatcatgtgtaaggataacttccttatgatatctcatatatcttttcaaatggttagccagctatttcaagtattaaatgatccagaagttgagaaaacacggttctattgatttcctagagacataaaaacagtacctaaatgcataatgatccccatgcttacctagtaccaaccaaataccagcaccattgtatacagataagaataaaagaagagagacaactttaatgcttg

SEQ ID NO: 75283 - DNA, 1932 bp, Zea Mays
ctggttcgaatcttggcgaggggagcagaacccaagcaactagccttctctgctgcccttggtatcacgattgggatctttccgaaatattaggagcacctaaaggatcaactacgataaatgttttcagtgagtgtaccaaggccgaatcgtttcttccatttggttctggaagtcgagcatgtgttgggcagaagtttgttgttcttgcaatatcgatgttgattgccagtctgctccgcagctatgaggttagatgcactggtagcttctcgttgtgacacccacacctcttaatttgttctacacattgcccttctacagattgacacacacctcatcatgagtgagtgtgccaaggccggatcatttcttctatagattgcccttttcagtatgatctgtgttttaactttttaaacttctgatgttatttggaactcgatctctcaggtatagcctcatccaagtttgtctaaagaaatggacacaacagttacagcagccaccttcatctcccaaaccctaagatcatcctcaccaaaagaaggatctgaagggagagtttggcaaacaaaaatctgagacacatacactgcttaaagatatgcgtctgagaacatcattgcatcatgccactgggcatacaagggtgttgaggaagactcaaccctagaaggtactactaatactagcaattacttttttaattaatgcctacattcctgttatgtagtatgcacatcggatttgtattgttgtcgtactattgatgcatgattttaacttgagggggcaagaatatgctaattaatttgtgtttatgttcttggtgcagatccctatttcttatatatcttatctctactattccattcacctctctctcctctcccacatttaaacgataaaaaatctaaaattatgcaaaaataaagattaataatttatgaaatatctagtcatggattttatactttgctctgtggcattaatcccttgtctggcattatctggtacttaaatacttaaagtatatatttttattccaaatgctacatacatatgtttttcagtcaacacaactccatctcgttttgtatttttcttagtgttcaatactatttggattctattaagtcagaaatagcaaagataacatagaaaggtggacttccaaatgcagaagcagttggaaaaattgtacatcttatgcaacttgatcaaactgttatattttagatcttttgtttagcattttttaatccacatgtatttctctatcatataaaactctatattgactctttaaaataatttatgtgaatttgataatgtctgtcacacggattctgtataccatagtgaattgatggttgagagactatgcatgaggcatgcaaattaacaagactcatacaagcagcgtcgaacagtgtgctgatgatgatcagagacacaagggcagcacatgatcaggtcttaacatgtttggcttccgaacaggcttttctccagatccccaagaaagaagaagaatatccggtcacatatgtgttgatgctcatccccaacatacataaattatcaatggtattatatatttccgttgcgacgcacggacacacacctagtaattatatatgtctgctcaactcctttaaacaactaacataaaacatcttcaatacgaaagttctaaattgtttcccacgcacgcaaggcgcgcgcactttactagttaatgaccatctctacctgtccaagacgaaaatttctgccattagtcgtagagacaatttcgaccgtggctgcatgattgttgacggcttctaaccgtagtgactgcaccatcaatcgtcatatgtgagtaaaatcggggagaaggctgtctagctattatcgaagagcaaaactatagctagaaacagc

SEQ ID NO: 75284 - DNA, 2000 bp, Zea Mays
ctcctgggcgacacctaaaggatcacacaattgttagttttgcactccacctgaagtctaaagtgatgtgttgtgtacagtctaaagtccattttgtgtaggattcggcgatttgcactccacctgatgttgctttgctcgcaacttttgcttgccacgacggaggctagatccagctcctaggtgtccgtcgtccttccatctcccaccctccctcgttggagcacgagcaccaaaggtgcccagatcttcgtcggccctgcccctgcttccttcaactccaccaccaggggagcagaacccaagcaactagccttctctgctgcccttggtatcacgattgggatctttccgaaatattaggagcacctaaaggatcaactacgataaatgttttcagtgagtgtaccaaggccgaatcgtttcttccatttggttctggaagtcgagcatgtgttgggcagaagtttgttgttcttgcaatatcgatgttgattgccagtctgctccgcagctatgaggtatagcctcatccaagtttgtctaaagaaatggacacaacagttacagcagccaccttcatctcccaaaccctaagatcatcctcaccaaaagaaggatctgaagggagagtttggcaaacaaaaatctgagacacatacactgcttaaagatatgcgtctgagaacatcattgcatcatgccactgggcatacaagggtgttgaggaagactcaaccctagaaggtactactaatactagcaattacttttttaattaatgcctacattcctgttatgtagtatgcacatcggatttgtattgttgtcgtactattgatgcatgattttaacttgagggggcaagaatatgctaattaatttgtgtttatgttcttggtgcagatccctatttcttatatatcttatctctactattccattcacctctctctcctctcccacatttaaacgataaaaaatctaaaattatgcaaaaataaagattaataatttatgaaatatctagtcatggattttatactttgctctgtggcattaatcccttgtctggcattatctggtacttaaatacttaaagtatatatttttattccaaatgctacatacatatgtttttcagtcaacacaactccatctcgttttgtatttttcttagtgttcaatactatttggattctattaagtcagaaatagcaaagataacatagaaaggtggacttccaaatgcagaagcagttggaaaaattgtacatcttatgcaacttgatcaaactgttatattttagatcttttgtttagcattttttaatccacatgtatttctctatcatataaaactctatattgactctttaaaataatttatgtgaatttgataatgtctgtcacacggattctgtataccatagtgaattgatggttgagagactatgcatgaggcatgcaaattaacaagactcatacaagcagcgtcgaacagtgtgctgatgatgatcagagacacaagggcagcacatgatcaggtcttaacatgtttggcttccgaacaggcttttctccagatccccaagaaagaagaagaatatccggtcacatatgtgttgatgctcatccccaacatacataaattatcaatggtattatatatttccgttgcgacgcacggacacacacctagtaattatatatgtctgctcaactcctttaaacaactaacataaaacatcttcaatacgaaagttctaaattgtttcccacgcacgcaaggcgcgcgcactttactagttaatgaccatctctacctgtccaagacgaaaatttctgccattagtcgtagagacaatttcgaccgtggctgcatgattgttgacggcttctaaccgtagtgactgcaccatcaatcgtcatatgtgagtaaaatcggggagaaggctgtctagctattatcgaagagcaaaactatagctagaaacagc

SEQ ID NO: 75285 - DNA, 2817 bp, Zea Mays
ccggcgcaccgccgcccgcgtgcgccgcgctcgcgctgtggctcgtggtgctcttctacctcctgggcgacacctaaaggatcacacaattgattcggcgatttgcactccacctgatgttgctttgctcgcaacttttgcttgccacgacggaggctagatccagctcctaggtgtccgtcgtccttccatctcccaccctccctcgttggagcacgagcaccaaaggtgcccagatcttcgtcggccctgcccctgcttccttcaactccaccaccaggtaatgccctggacttaattgaatgggctctcttctcaccaggatcggtgtcctgccatggctccacgccatgattgttgatcccgtgctgtaggtcatcagaaggggagcagaacccaagcaactagccttctctgctgcccttggtatcacgattgggatctttccgaaatattaggagcacctaaaggatcaactacgataaatgttttcagtgagtgtaccaaggccgaatcgtttcttccatttggttctggaagtcgagcatgtgttgggcagaagtttgttgttcttgcaatatcgatgttgattgccagtctgctccgcagctatgaggttagatgcactggtagcttctcgttgtgacacccacacctcttaatttgttctacacattgcccttctacagattgacacacacctcatcatgagtgagtgtgccaaggccggatcatttcttctatagattgcccttttcagtatgatctgtgttttaactttttaaacttctgatgttatttggaactcgatctctcaggtatagcctcatccaagtttgtctaaagaaatggacacaacagttacagcagccaccttcatctcccaaaccctaagatcatcctcaccaaaagaaggatctgaagggagagtttggcaaacaaaaatctggcacgtttgctttcactgtattgtttttcactggtgttacatcagtatatgatctttagtttcctaccgtcgtttggaccatgctgaagtttggaaaggcgaccttggtgatgcagaagtgtcttttttcctctggatttttgacagaccctgtgtgcttcactggatctaagtttttgtcaggtttttggagcacccgcagggctgttagatcacaggagacgtatgttgatgtgtataaacagactcattttttcagttggggttttctcctctctgtggagaatgtaatgcccaacgcatgatgtttgtcgtgttgagatgttttttgatagttttttgcgtatgttgttgatattgattttattggatgtgaattcattcatcctttcatagtatatttgaattcatgatagtatctacatatgtacactgcttaaagatactatctacgtatctatatctattacaattttgtataaatactttttgatagtttttaatttgtatgacaaagcagagacacatacactgcttaaagatatgcgtctgagaacatcattgcatcatgccactgggcatacaagggtgttgaggaagactcaaccctagaaggtactactaatactagcaattacttttttaattaatgcctacattcctgttatgtagtatgcacatcggatttgtattgttgtcgtactattgatgcatgattttaacttgagggggcaagaatatgctaattaatttgtgtttatgttcttggtgcagatccctatttcttatatatcttatctctactattccattcacctctctctcctctcccacatttaaacgataaaaaatctaaaattatgcaaaaataaagattaataatttatgaaatatctagtcatggattttatactttgctctgtggcattaatcccttgtctggcattatctggtacttaaatacttaaagtatatatttttattccaaatgctacatacatatgtttttcagtcaacacaactccatctcgttttgtatttttcttagtgttcaatactatttggattctattaagtcagaaatagcaaagataacatagaaaggtggacttccaaatgcagaagcagttggaaaaattgtacatcttatgcaacttgatcaaactgttatattttagatcttttgtttagcattttttaatccacatgtatttctctatcatataaaactctatattgactctttaaaataatttatgtgaatttgataatgtctgtcacacggattctgtataccatagtgaattgatggttgagagactatgcatgaggcatgcaaattaacaagactcatacaagcagcgtcgaacagtgtgctgatgatgatcagagacacaagggcagcacatgatcaggtcttaacatgtttggcttccgaacaggcttttctccagatccccaagaaagaagaagaatatccggtcacatatgtgttgatgctcatccccaacatacataaattatcaatggtattatatatttccgttgcgacgcacggacacacacctagtaattatatatgtctgctcaactcctttaaacaactaacataaaacatcttcaatacgaaagttctaaattgtttcccacgcacgcaaggcgcgcgcactttactagttaatgaccatctctacctgtccaagacgaaaatttctgccattagtcgtagagacaatttcgaccgtggctgcatgattgttgacggcttctaaccgtagtgactgcaccatcaatcgtcatatgtgagtaaaatcggggagaaggctgtctagctattatcgaagagcaaaactatagctagaaacagc

SEQ ID NO: 75286 - DNA, 2103 bp, Zea Mays
cgccttcgccggcgcaccgccgcccgcgtgcgccgcgctcgcgctgtggctcgtggtgctcttctacctcctgggcgacacctaaaggatcacacaattgattcggcgatttgcactccacctgatgttgctttgctcgcaacttttgcttgccacgacggaggctagatccagctcctaggtgtccgtcgtccttccatctcccaccctccctcgttggagcacgagcaccaaaggtgcccagatcttcgtcggccctgcccctgcttccttcaactccaccaccaggtaatgccctggacttaattgaatgggctctcttctcaccaggatcggtgtcctgccatggctccacgccatgattgttgatcccgtgctgtaggtcatcagaaggggagcagaacccaagcaactagccttctctgctgcccttggtatcacgattgggatctttccgaaatattaggagcacctaaaggatcaactacgataaatgttttcagtgagtgtaccaaggccgaatcgtttcttccatttggttctggaagtcgagcatgtgttgggcagaagtttgttgttcttgcaatatcgatgttgattgccagtctgctccgcagctatgaggtatagcctcatccaagtttgtctaaagaaatggacacaacagttacagcagccaccttcatctcccaaaccctaagatcatcctcaccaaaagaaggatctgaagggagagtttggcaaacaaaaatctgagacacatacactgcttaaagatatgcgtctgagaacatcattgcatcatgccactgggcatacaagggtgttgaggaagactcaaccctagaaggtactactaatactagcaattacttttttaattaatgcctacattcctgttatgtagtatgcacatcggatttgtattgttgtcgtactattgatgcatgattttaacttgagggggcaagaatatgctaattaatttgtgtttatgttcttggtgcagatccctatttcttatatatcttatctctactattccattcacctctctctcctctcccacatttaaacgataaaaaatctaaaattatgcaaaaataaagattaataatttatgaaatatctagtcatggattttatactttgctctgtggcattaatcccttgtctggcattatctggtacttaaatacttaaagtatatatttttattccaaatgctacatacatatgtttttcagtcaacacaactccatctcgttttgtatttttcttagtgttcaatactatttggattctattaagtcagaaatagcaaagataacatagaaaggtggacttccaaatgcagaagcagttggaaaaattgtacatcttatgcaacttgatcaaactgttatattttagatcttttgtttagcattttttaatccacatgtatttctctatcatataaaactctatattgactctttaaaataatttatgtgaatttgataatgtctgtcacacggattctgtataccatagtgaattgatggttgagagactatgcatgaggcatgcaaattaacaagactcatacaagcagcgtcgaacagtgtgctgatgatgatcagagacacaagggcagcacatgatcaggtcttaacatgtttggcttccgaacaggcttttctccagatccccaagaaagaagaagaatatccggtcacatatgtgttgatgctcatccccaacatacataaattatcaatggtattatatatttccgttgcgacgcacggacacacacctagtaattatatatgtctgctcaactcctttaaacaactaacataaaacatcttcaatacgaaagttctaaattgtttcccacgcacgcaaggcgcgcgcactttactagttaatgaccatctctacctgtccaagacgaaaatttctgccattagtcgtagagacaatttcgaccgtggctgcatgattgttgacggcttctaaccgtagtgactgcaccatcaatcgtcatatgtgagtaaaatcggggagaaggctgtctagctattatcgaagagcaaaactatagctagaaacagc

SEQ ID NO: 75287 - DNA, 2224 bp, Zea Mays
cgtggactacctgcgccttcgccggcgcaccgccgcccgcgtgcgccgcgctcgcgctgtggctcgtggtgctcttctacctcctgggcgacacctaaaggatcacacaattgattcggcgatttgcactccacctgatgttgctttgctcgcaacttttgcttgccacgacggaggctagatccagctcctaggtgtccgtcgtccttccatctcccaccctccctcgttggagcacgagcaccaaaggatcggtgtcctgccatggctccacgccatgattgttgatcccgtgctgtaggtcatcagaaggggagcagaacccaagcaactagccttctctgctgcccttggtatcacgattgggatctttccgaaatattaggagcacctaaaggatcaactacgataaatgttttcagtgagtgtaccaaggccgaatcgtttcttccatttggttctggaagtcgagcatgtgttgggcagaagtttgttgttcttgcaatatcgatgttgattgccagtctgctccgcagctatgaggttagatgcactggtagcttctcgttgtgacacccacacctcttaatttgttctacacattgcccttctacagattgacacacacctcatcatgagtgagtgtgccaaggccggatcatttcttctatagattgcccttttcagtatgatctgtgttttaactttttaaacttctgatgttatttggaactcgatctctcaggtatagcctcatccaagtttgtctaaagaaatggacacaacagttacagcagccaccttcatctcccaaaccctaagatcatcctcaccaaaagaaggatctgaagggagagtttggcaaacaaaaatctgagacacatacactgcttaaagatatgcgtctgagaacatcattgcatcatgccactgggcatacaagggtgttgaggaagactcaaccctagaaggtactactaatactagcaattacttttttaattaatgcctacattcctgttatgtagtatgcacatcggatttgtattgttgtcgtactattgatgcatgattttaacttgagggggcaagaatatgctaattaatttgtgtttatgttcttggtgcagatccctatttcttatatatcttatctctactattccattcacctctctctcctctcccacatttaaacgataaaaaatctaaaattatgcaaaaataaagattaataatttatgaaatatctagtcatggattttatactttgctctgtggcattaatcccttgtctggcattatctggtacttaaatacttaaagtatatatttttattccaaatgctacatacatatgtttttcagtcaacacaactccatctcgttttgtatttttcttagtgttcaatactatttggattctattaagtcagaaatagcaaagataacatagaaaggtggacttccaaatgcagaagcagttggaaaaattgtacatcttatgcaacttgatcaaactgttatattttagatcttttgtttagcattttttaatccacatgtatttctctatcatataaaactctatattgactctttaaaataatttatgtgaatttgataatgtctgtcacacggattctgtataccatagtgaattgatggttgagagactatgcatgaggcatgcaaattaacaagactcatacaagcagcgtcgaacagtgtgctgatgatgatcagagacacaagggcagcacatgatcaggtcttaacatgtttggcttccgaacaggcttttctccagatccccaagaaagaagaagaatatccggtcacatatgtgttgatgctcatccccaacatacataaattatcaatggtattatatatttccgttgcgacgcacggacacacacctagtaattatatatgtctgctcaactcctttaaacaactaacataaaacatcttcaatacgaaagttctaaattgtttcccacgcacgcaaggcgcgcgcactttactagttaatgaccatctctacctgtccaagacgaaaatttctgccattagtcgtagagacaatttcgaccgtggctgcatgattgttgacggcttctaaccgtagtgactgcaccatcaatcgtcatatgtgagtaaaatcggggagaaggctgtctagctattatcgaagagcaaaactatagctagaaacagc

SEQ ID NO: 75288 - DNA, 2108 bp, Zea Mays
cgtggactacctgcgccttcgccggcgcaccgccgcccgcgtgcgccgcgctcgcgctgtggctcgtggtgctcttctacctcctgggcgacacctaaaggatcacacaattgattcggcgatttgcactccacctgatgttgctttgctcgcaacttttgcttgccacgacggaggctagatccagctcctaggtgtccgtcgtccttccatctcccaccctccctcgttggagcacgagcaccaaagatcttcgtcggccctgcccctgcttccttcaactccaccaccaggtaatgccctggacttaattgaatgggctctcttctcaccaggatcggtgtcctgccatggctccacgccatgattgttgatcccgtgctgtaggtcatcagaaggggagcagaacccaagcaactagccttctctgctgcccttggtatcacgattgggatctttccgaaatattaggagcacctaaaggatcaactacgataaatgttttcagtgagtgtaccaaggccgaatcgtttcttccatttggttctggaagtcgagcatgtgttgggcagaagtttgttgttcttgcaatatcgatgttgattgccagtctgctccgcagctatgaggtatagcctcatccaagtttgtctaaagaaatggacacaacagttacagcagccaccttcatctcccaaaccctaagatcatcctcaccaaaagaaggatctgaagggagagtttggcaaacaaaaatctgagacacatacactgcttaaagatatgcgtctgagaacatcattgcatcatgccactgggcatacaagggtgttgaggaagactcaaccctagaaggtactactaatactagcaattacttttttaattaatgcctacattcctgttatgtagtatgcacatcggatttgtattgttgtcgtactattgatgcatgattttaacttgagggggcaagaatatgctaattaatttgtgtttatgttcttggtgcagatccctatttcttatatatcttatctctactattccattcacctctctctcctctcccacatttaaacgataaaaaatctaaaattatgcaaaaataaagattaataatttatgaaatatctagtcatggattttatactttgctctgtggcattaatcccttgtctggcattatctggtacttaaatacttaaagtatatatttttattccaaatgctacatacatatgtttttcagtcaacacaactccatctcgttttgtatttttcttagtgttcaatactatttggattctattaagtcagaaatagcaaagataacatagaaaggtggacttccaaatgcagaagcagttggaaaaattgtacatcttatgcaacttgatcaaactgttatattttagatcttttgtttagcattttttaatccacatgtatttctctatcatataaaactctatattgactctttaaaataatttatgtgaatttgataatgtctgtcacacggattctgtataccatagtgaattgatggttgagagactatgcatgaggcatgcaaattaacaagactcatacaagcagcgtcgaacagtgtgctgatgatgatcagagacacaagggcagcacatgatcaggtcttaacatgtttggcttccgaacaggcttttctccagatccccaagaaagaagaagaatatccggtcacatatgtgttgatgctcatccccaacatacataaattatcaatggtattatatatttccgttgcgacgcacggacacacacctagtaattatatatgtctgctcaactcctttaaacaactaacataaaacatcttcaatacgaaagttctaaattgtttcccacgcacgcaaggcgcgcgcactttactagttaatgaccatctctacctgtccaagacgaaaatttctgccattagtcgtagagacaatttcgaccgtggctgcatgattgttgacggcttctaaccgtagtgactgcaccatcaatcgtcatatgtgagtaaaatcggggagaaggctgtctagctattatcgaagagcaaaactatagctagaaacagc

SEQ ID NO: 75289 - DNA, 2640 bp, Zea Mays
ggtacgtggactacctgcgccttcgccggcgcaccgccgcccgcgtgcgccgcgctcgcgctgtggctcgtggtgctcttctacctcctgggcgacacctaaaggatcacacaattgattcggcgatttgcactccacctgatgttgctttgctcgcaacttttgcttgccacgacggaggctagatccagctcctaggtgtccgtcgtccttccatctcccaccctccctcgttggagcacgagcaccaaaggtgcccagatcttcgtcggccctgcccctgcttccttcaactccaccaccaggtaatgccctggacttaattgaatgggctctcttctcaccaggatcggtgtcctgccatggctccacgccatgattgttgatcccgtgctgtaggtcatcagaaggggagcagaacccaagcaactagccttctctgctgcccttggtatcacgattgggatctttccgaaatattaggagcacctaaaggatcaactacgataaatgttttcagtgagtgtaccaaggccgaatcgtttcttccatttggttctggaagtcgagcatgtgttgggcagaagtttgttgttcttgcaatatcgatgttgattgccagtctgctccgcagctatgaggtatagcctcatccaagtttgtctaaagaaatggacacaacagttacagcagccaccttcatctcccaaaccctaagatcatcctcaccaaaagaaggatctgaagggagagtttggcaaacaaaaatctggcacgtttgctttcactgtattgtttttcactggtgttacatcagtatatgatctttagtttcctaccgtcgtttggaccatgctgaagtttggaaaggcgaccttggtgatgcagaagtgtcttttttcctctggatttttgacagaccctgtgtgcttcactggatctaagtttttgtcaggtttttggagcacccgcagggctgttagatcacaggagacgtatgttgatgtgtataaacagactcattttttcagttggggttttctcctctctgtggagaatgtaatgcccaacgcatgatgtttgtcgtgttgagatgttttttgatagttttttgcgtatgttgttgatattgattttattggatgtgaattcattcatcctttcatagtatatttgaattcatgatagtatctacatatgtacactgcttaaagatactatctacgtatctatatctattacaattttgtataaatactttttgatagtttttaatttgtatgacaaagcagagacacatacactgcttaaagatatgcgtctgagaacatcattgcatcatgccactgggcatacaagggtgttgaggaagactcaaccctagaaggtactactaatactagcaattacttttttaattaatgcctacattcctgttatgtagtatgcacatcggatttgtattgttgtcgtactattgatgcatgattttaacttgagggggcaagaatatgctaattaatttgtgtttatgttcttggtgcagatccctatttcttatatatcttatctctactattccattcacctctctctcctctcccacatttaaacgataaaaaatctaaaattatgcaaaaataaagattaataatttatgaaatatctagtcatggattttatactttgctctgtggcattaatcccttgtctggcattatctggtacttaaatacttaaagtatatatttttattccaaatgctacatacatatgtttttcagtcaacacaactccatctcgttttgtatttttcttagtgttcaatactatttggattctattaagtcagaaatagcaaagataacatagaaaggtggacttccaaatgcagaagcagttggaaaaattgtacatcttatgcaacttgatcaaactgttatattttagatcttttgtttagcattttttaatccacatgtatttctctatcatataaaactctatattgactctttaaaataatttatgtgaatttgataatgtctgtcacacggattctgtataccatagtgaattgatggttgagagactatgcatgaggcatgcaaattaacaagactcatacaagcagcgtcgaacagtgtgctgatgatgatcagagacacaagggcagcacatgatcaggtcttaacatgtttggcttccgaacaggcttttctccagatccccaagaaagaagaagaatatccggtcacatatgtgttgatgctcatccccaacatacataaattatcaatggtattatatatttccgttgcgacgcacggacacacacctagtaattatatatgtctgctcaactcctttaaacaactaacataaaacatcttcaatacgaaagttctaaattgtttcccacgcacgcaaggcgcgcgcactttactagttaatgaccatctctacctgtccaagacgaaaatttctgccattagtcgtagagacaatttcgaccgtggctgcatgattgttgacggcttctaaccgtagtgactgcaccatcaatcgtcatatgtgagtaaaatcggggagaaggctgtctagctattatcgaagagcaaaactatagctagaaacagc

SEQ ID NO: 75290 - DNA, 1629 bp, Zea Mays
agagaatttgtgcccaaaccatacccagtgaggaatcagtcaccaagagcgagcccgcagtactgggtcggcaggccacgagcgagcggtcagcatccgcaggtacagccacacacccacgcacgagcactcccagccggcccgccgagaatccactcacccgctggttcatgggctccacggaaacgatagcccacacgtcagtcccttccacaagacccaaaccgtctccggagtaaacccccgagatctatccccgtttccaacctcacacccccccttccattggagctccttcgtctgagttaaacctaaaccctaatcgcgacctgcgttcgtcaaaaccctacctggccatggacggcggaggaggaggcggtggaggaggaggtggagttggggcaggtgtcatggtgggtggcggagtcgtgccgggcggcgggggcggcgacgtggaactcgtcagcaagacgctgcagttcgagcacaagctgttctactttgatctgaaggagaacccgcgggggaggtacctcaagatctccgagaagacatcggccacgcgctccaccatcatcgtccccatcgacggcgtcgcctggttcctcgacctcttcgactactacatccgcaccgacgagcgcgacgtcttcagcaaggagctgcgactccagaccaaggtgttctatttcgatatcggggagaacaagaggggccgattcctcaagttggttactaagtgagtagtggtttcttttttagatccatataaagaaaaggaacagattgaaacaccaaattttgaatggtttggtttatgtccactacaacaagaagataatggaaagattcaaagagtgacgcgttgaagtgaaaaatctaaaccctttgatcttagagagttccaatggaagaatgagttcaaatggcaactaacaatcaataagttcatcctctagatcttgatcttttctggtcccatgttgataaagccattggtgcaacaacatcactacaacgtcgcagttttcctaggatgagtgggagctacactcgtcaaagtagtgttgtagttgctgcttcaacatccactacaaccacgatattagaacaagaacaaggattaggagaagaggaagaagctgaaattgactttgttgctcctgatgatctgcatgttgaggatgattatggccaagccgtacagatgctgaagctgctgcaactgcaagtgatatgggtggcataaatgagatgaacttagatatcgaataggccttacgggcttagggcagggcaatatgccatatttatcagctattcagtttatcatgtatttgatggatatatatagttgcttgctacttgctggaccttatattttatttgctagtttttgatgtatcatatggtatatgttgcatacctgctgtgggacaaatgggcgcctaggtgtccatgcgcccggccggcgacttgtcttgccttggtgccgtgataaataggattgtatggatatgctatcttttattgatgcaagtatgcaacagtttttttgtaatcactaatcatcagcgatattattctttctggagttgtgagtttatgttctggttagtttaattttat

SEQ ID NO: 75291 - DNA, 1206 bp, Zea Mays
acggccaccagaccaccacgacgctctcagcttcaccttctcttcagtcttgtctgctagactgtcgacagattccgctccaacgcgcacctgcagtcccgcacgccctcgcccaccgtcgcctttcaaaaagctggaggattctcgagagggagaagcgcgcctggcagctccgttccatccgcccccacgaatgtccgacgaggccaggcgcgggcccgcgggcgccgcgcaggcgatgctccgggcctcctccgaggaccgcaagccggtgggcgctgggtccccggcggcggttgcgcacaagatccagctcaagagcgccgatatgaaggaggagatgcggcaggacgccttcgaaattgcccgcatcgcgttcgataagcacagcatggagaaggacatcgctgagtacataaagaaggagttcgacaagaaccacggcccaacctggcactgcatcgtcggccgcaacttcggttcatacgtgacgcacgagacaaactactttgtatatttctacatcgactctaaagctgtcttgctattcaagtctgggtgattgctcgcagccgacgcaatcaaccttgcacgcctacgttccattgctcccatgtatgcaccgcacccttccccccaggcccagggtcgtctgcagccaagctggaagccggtaatcttaatgagcctgcatgttgatgtatatcagcaacggattattcttcgtatgcccactagtgtgagatcagattgcatcttacttatgtctgatatatctaggttaggtgttgtgagtacattgtcttgttgcaatatgattgccggacaactggacgaactgcctctcgtctgtttgtgattatctcaatagaagcgtccttgctcatgcgtaatactcatatggttttactgtgctgggtatttagtgggtagtcgtggtccatatgcaggctcggtccatcacctgaacgagcccacgcgatcgaacccaaacctccactcggagcgatggacggatcaacctagttaatcgtgtgtggttagttctctaggcaagcaaaatgatctttgtcacatccatccatataggctaaagaaggcgagtaataccttcgacattaacgcttatccaaggcacccagtggtacctgaagcatatgatagcgtatgacaaggagacgaaggagggttcaagcgacatgttca

SEQ ID NO: 75292 - DNA, 3507 bp, Zea Mays
gcggtttagattctagcctttgaggcagcagtaccgcagcctaaatgccgtcacggcattgttaatgccagactgcacgtaatcaggccttgtaatatccactcctttaattttttttttcatttttttctggtgcgtgaagcatgttgaatcgaggtgaggtttcgttcggttgtatatagatagaacgaagggaattgaggcttaaatctttttctgtttatttttgaatttaatctcatccgatcctttttcaattcacttcttctaaccgaagaagcatgaggtggattcgtgattattgttgtatgtatatctcctgtacaatttgacctgctggctgtgtagtgtgtacacaggaacctcgcaagtcgcattcgcagctgaaggagaaagaggcaccacgccaaaaccaccacagcaagcggataaatatccaatgtcaaaagggttccttttgaacaagcaaccgaaaagatttttcttcgtcgctcgctcaccacccatcccacccccacaggccacaggccacaggccacagacgagacgatccccggtcatcgcctacctccctgtcctctgccgtccttcccttcgccacgtctccaagtatataggaggaggctctccggcaatgcccgctcccccatcatcctaccaatcacggcagccactccccgtcgtcgaccaaaagcactccggtgagctagaaccggcagaagaatagccagcctgccggcgatccgcgcagaccacgccagccgccccacaagtcccagacggcagggattcctaaacataacgcgctattcctattattagccagccgcctctcgattcgcgcggcttaaccgccctcgtgcgcgtgcgcgcgcgcgcgcggtaggaggccacacgttccggaggcgcgcgcccagaccagggccgcccccgcgccatggacgtgctgcggttcgtgcgcgccgccgcggcgccgcagcctgcggtggcgccgccggcgtcggctgcgacggtgccggcgcagcgccagcggctgcgcatgtggccgcgtggcgggggagaccagccgcccccggtcggcgccgcctccacgcgcggcgcggagccgaggagcccgcccgacgaggagcggaaggcggagggggcccagcgggggcagggcaactgggtgctgcagatgctgcgggtgcagccgcggtgggtggatgcggcggacgcggaggccaccggcggcggccaggaaccggacgaggagacggcggctgcggctgcggctggcgctggtggcgtcgaggagtgcgcttcctgcggctgcggggaagacgacgaaggctgcgccgtggggtacggcgacggcgacggcgaggtgttcgaccgcgcgtcgttctcgcggctcctgcggaaggcgtcgctcggggaggctaaagagtattccatgatgtcctacctctgcaacatcgcctacatgatccccagaattcagccaaaatgtcttcggcgatacaatctgcggttcgtgacgtcgtcagtgcaagacaaggccggagttagcaaccctgaccagaagcaggagcgtagcaccaagaaagacgaatctggcgatcaagcatccgaagctgtcgacgacgcggtgccacgacgtgggctagggacgataaaaccgtttggtgcgtaccatgtagtgtcttctgctgcctcttacctgcactcccgggccatgggcgttatgccatttggtcccgggaatggcgtcaaggacgatcatccagcagccgtcacgtcgctcgtgagcggcgcgagcggtgacggattgagcgtggacgaggcttcgttcgtggccacgacgagttcggtgacctccatggtcgcggcgaaggaggagacgcggcaagccgttgcggatgatctcaactcttcgagatcttgcccttgcgagtggttcgtctgtgaggatgatcagaacagcacgatatacttcgtggttcaggtaccggtaccgctagcttgtggcccaaatactcatggtgattcgatatgtagtttctgttcacttttttttttttgcttctgaatccaatttttgtgccattgtggtttgttttgctttttgtgacctacgtacagggctcagaatcaattgcttcttggcaggccaaccttttgttcgaacctgtcaaatttgaggaggtggacgtgctggttcacaggggcatatacgaagccgccaaggggatgtatcaccagatgctaccctacgtgaaggcgcacctgaagagctggggcaaatccgcgcggctgcggttcacggggcactccctcggcgggagcctggcgctgctcgtgaacctgatgctgctggtgcgaggggaggcgcccgcgtcgtcgctgctgcccgtgataacgttcggcgcgccgtgcatcatgtgcggcggcgaccacctgctccgccgcctcgggctgccgcggagccacgtgcagtccgtcacgatgcaccgggacatagtgccccgggtgttctcctgccactaccccgaccatgtcgccaacatcctgaagctcgccaacgggaatttccgcagccacccgtgcctcgcgaaccaaaactcctgtacgcgccgatgggggaggtgctgatcctgcagccggacgagcggctgtccccgcaccaccacctgctcccaccggacagcggcatctaccacctgggcggcggtggcggtggcggtggggcgggaacggcggcgaatgcgggcgaaggctccctgccgcagctccggtccgcgctgtcggccttcttcaactcgccgcacccgctcgagatcctcaaggacggcgccgcgtacgggccccggggctccgtgtaccgggaccacgacgtgaactcgtacctccggtccgtgcgcgccgtggtccgcaaggaggccaggcgcgcgcgggaggccgagcgggagcgctggcgcctgctcctctggtggccgttcggcgtgcacggcgtgtcgtcggcgtcggcggggcggcgcgggggcctcgtggacgccgtcagcgaggctgccaggcgcgcgcatctcttgctggtggtgctgctgcccgcggagctgctcgctctcggcgcgctcctggccgtcattagattcaggtgattagataggctctcacgcgggttcatcaatccgttcgttcgttcgtacgccgtcgacacacacgattcttttgtaccaaacacacacacacacatacacgtctgcaaagcaaatgcgacattgcagctgcgtcgcatgtatgtaaaatgaatgaaatgaaaaaaaaaacacaaactcgaattctttggttccgtccaacggttccctctcgacttcactcactcctcgaactatcaactatattttgagtcccctatgaactatattttgaatcttggaagtctgagtccgtccctgcatagcccccgctaatttgtgatgtccattacgtgttccctgattggtttaaaaatacagtaaacttcct

SEQ ID NO: 75293 - DNA, 3797 bp, Zea Mays
gcggtttagattctagcctttgaggcagcagtaccgcagcctaaatgccgtcacggcattgttaatgccagactgcacgtaatcaggccttgtaatatccactcctttaattttttttttcatttttttctggtgcgtgaagcatgttgaatcgaggtgaggtttcgttcggttgtatatagatagaacgaagggaattgaggcttaaatctttttctgtttatttttgaatttaatctcatccgatcctttttcaattcacttcttctaaccgaagaagcatgaggtggattcgtgattattgttgtatgtatatctcctgtacaatttgacctgctggctgtgtagtgtgtacacaggaacctcgcaagtcgcattcgcagctgaaggagaaagaggcaccacgccaaaaccaccacagcaagcggataaatatccaatgtcaaaagggttccttttgaacaagcaaccgaaaagatttttcttcgtcgctcgctcaccacccatcccacccccacaggccacaggccacaggccacagacgagacgatccccggtcatcgcctacctccctgtcctctgccgtccttcccttcgccacgtctccaagtatataggaggaggctctccggcaatgcccgctcccccatcatcctaccaatcacggcagccactccccgtcgtcgaccaaaagcactccggtgagctagaaccggcagaagaatagccagcctgccggcgatccgcgcagaccacgccagccgccccacaagtcccagacggcagggattcctaaacataacgcgctattcctattattagccagccgcctctcgattcgcgcggcttaaccgccctcgtgcgcgtgcgcgcgcgcgcgcggtaggaggccacacgttccggaggcgcgcgcccagaccagggccgcccccgcgccatggacgtgctgcggttcgtgcgcgccgccgcggcgccgcagcctgcggtggcgccgccggcgtcggctgcgacggtgccggcgcagcgccagcggctgcgcatgtggccgcgtggcgggggagaccagccgcccccggtcggcgccgcctccacgcgcggcgcggagccgaggagcccgcccgacgaggagcggaaggcggagggggcccagcgggggcagggcaactgggtgctgcagatgctgcgggtgcagccgcggtgggtggatgcggcggacgcggaggccaccggcggcggccaggaaccggacgaggagacggcggctgcggctgcggctggcgctggtggcgtcgaggagtgcgcttcctgcggctgcggggaagacgacgaaggctgcgccgtggggtacggcgacggcgacggcgaggtgttcgaccgcgcgtcgttctcgcggctcctgcggaaggcgtcgctcggggaggctaaagagtattccatgatgtcctacctctgcaacatcgcctacatgatccccagaattcaggtaaccgtcaccgtcgtccatcgccacggctagctagtagtactgctactcttcctctctctctctctctcacgcgtcaattgcagtgcagctcgtcctcggtgaatgtggaattgctttcggtaaacgctcgtgagcatgtgattgtgccagacacttgtcgtcctcttgttcatgcgtgtattttccagcgtcaatgcaggggcgcgcggggtggtggtatttcctaggaaagcccatgccgaatctggtctattttggatttttactgtctacttctcctttccagtgtgattttccaatagctagtcttggactagtccgagtccatccttgagttctgcttgtcttcgccaattggttaattgccctgaactgtttttctggtctacagaaatatcgtcggagtttcctctgaaccagagtttcttacctttcccaccgcctaactcaggaatccttttgctttcatgcttcccatcccagccaaaatgtcttcggcgatacaatctgcggttcgtgacgtcgtcagtgcaagacaaggccggagttagcaaccctgaccagaagcaggagcgtagcaccaagaaagacgaatctggcgatcaagcatccgaagctgtcgacgacgcggtgccacgacgtgggctagggacgataaaaccgtttggtgcgtaccatgtagtgtcttctgctgcctcttacctgcactcccgggccatgggcgttatgccatttggtcccgggaatggcgtcaaggacgatcatccagcagccgtcacgtcgctcgtgagcggcgcgagcggtgacggattgagcgtggacgaggcttcgttcgtggccacgacgagttcggtgacctccatggtcgcggcgaaggaggagacgcggcaagccgttgcggatgatctcaactcttcgagatcttgcccttgcgagtggttcgtctgtgaggatgatcagaacagcacgatatacttcgtggttcaggaggtggacgtgctggttcacaggggcatatacgaagccgccaaggggatgtatcaccagatgctaccctacgtgaaggcgcacctgaagagctggggcaaatccgcgcggctgcggttcacggggcactccctcggcgggagcctggcgctgctcgtgaacctgatgctgctggtgcgaggggaggcgcccgcgtcgtcgctgctgcccgtgataacgttcggcgcgccgtgcatcatgtgcggcggcgaccacctgctccgccgcctcgggctgccgcggagccacgtgcagtccgtcacgatgcaccgggacatagtgccccgggtgttctcctgccactaccccgaccatgtcgccaacatcctgaagctcgccaacgggaatttccgcagccacccgtgcctcgcgaaccagaaactcctgtacgcgccgatgggggaggtgctgatcctgcagccggacgagcggctgtccccgcaccaccacctgctcccaccggacagcggcatctaccacctgggcggcggtggcggtggcggtggggcgggaacggcggcgaatgcgggcgaaggctccctgccgcagctccggtccgcgctgtcggccttcttcaactcgccgcacccgctcgagatcctcaaggacggcgccgcgtacgggccccggggctccgtgtaccgggaccacgacgtgaactcgtacctccggtccgtgcgcgccgtggtccgcaaggaggccaggcgcgcgcgggaggccgagcgggagcgctggcgcctgctcctctggtggccgttcggcgtgcacggcgtgtcgtcggcgtcggcggggcggcgcgggggcctcgtggacgccgtcagcgaggctgccaggcgcgcgcatctcttgctggtggtgctgctgcccgcggagctgctcgctctcggcgcgctcctggccgtcattagattcaggtgattagataggctctcacgcgggttcatcaatccgttcgttcgttcgtacgccgtcgacacacacgattcttttgtaccaaacacacacacacacatacacgtctgcaaagcaaatgcgacattgcagctgcgtcgcatgtatgtaaaatgaatgaaatgaaaaaaaaaacacaaactcgaattctttggttccgtccaacggttccctctcgacttcactcactcctcgaactatcaactatattttgagtcccctatgaactatattttgaatcttggaagtctgagtccgtccctgcatagcccccgctaatttgtgatgtccattacgtgttccctgattggtttaaaaatacagtaaacttcct

SEQ ID NO: 75294 - DNA, 3895 bp, Zea Mays
gacagacagccagcggtttagattctagcctttgaggcagcagtaccgcagcctaaatgccgtcacggcattgttaatgccagactgcacgtaatcaggccttgtaatatccactcctttaattttttttttcatttttttctggtgcgtgaagcatgttgaatcgaggtgaggtttcgttcggttgtatatagatagaacgaagggaattgaggcttaaatctttttctgtttatttttgaatttaatctcatccgatcctttttcaattcacttcttctaaccgaagaagcatgaggtggattcgtgattattgttgtatgtatatctcctgtacaatttgacctgctggctgtgtagtgtgtacacaggaacctcgcaagtcgcattcgcagctgaaggagaaagaggcaccacgccaaaaccaccacagcaagcggataaatatccaatgtcaaaagggttccttttgaacaagcaaccgaaaagatttttcttcgtcgctcgctcaccacccatcccacccccacaggccacaggccacaggccacagacgagacgatccccggtcatcgcctacctccctgtcctctgccgtccttcccttcgccacgtctccaagtatataggaggaggctctccggcaatgcccgctcccccatcatcctaccaatcacggcagccactccccgtcgtcgaccaaaagcactccggtgagctagaaccggcagaagaatagccagcctgccggcgatccgcgcagaccacgccagccgccccacaagtcccagacggcagggattcctaaacataacgcgctattcctattattagccagccgcctctcgattcgcgcggcttaaccgccctcgtgcgcgtgcgcgcgcgcgcgcggtaggaggccacacgttccggaggcgcgcgcccagaccagggccgcccccgcgccatggacgtgctgcggttcgtgcgcgccgccgcggcgccgcagcctgcggtggcgccgccggcgtcggctgcgacggtgccggcgcagcgccagcggctgcgcatgtggccgcgtggcgggggagaccagccgcccccggtcggcgccgcctccacgcgcggcgcggagccgaggagcccgcccgacgaggagcggaaggcggagggggcccagcgggggcagggcaactgggtgctgcagatgctgcgggtgcagccgcggtgggtggatgcggcggacgcggaggccaccggcggcggccaggaaccggacgaggagacggcggctgcggctgcggctggcgctggtggcgtcgaggagtgcgcttcctgcggctgcggggaagacgacgaaggctgcgccgtggggtacggcgacggcgacggcgaggtgttcgaccgcgcgtcgttctcgcggctcctgcggaaggcgtcgctcggggaggctaaagagtattccatgatgtcctacctctgcaacatcgcctacatgatccccagaattcaggtaaccgtcaccgtcgtccatcgccacggctagctagtagtactgctactcttcctctctctctctctctcacgcgtcaattgcagtgcagctcgtcctcggtgaatgtggaattgctttcggtaaacgctcgtgagcatgtgattgtgccagacacttgtcgtcctcttgttcatgcgtgtattttccagcgtcaatgcaggggcgcgcggggtggtggtatttcctaggaaagcccatgccgaatctggtctattttggatttttactgtctacttctcctttccagtgtgattttccaatagctagtcttggactagtccgagtccatccttgagttctgcttgtcttcgccaattggttaattgccctgaactgtttttctggtctacagaaatatcgtcggagtttcctctgaaccagagtttcttacctttcccaccgcctaactcaggaatccttttgctttcatgcttcccatcccagccaaaatgtcttcggcgatacaatctgcggttcgtgacgtcgtcagtgcaagacaaggccggagttagcaaccctgaccagaagcaggagcgtagcaccaagaaagacgaatctggcgatcaagcatccgaagctgtcgacgacgcggtgccacgacgtgggctagggacgataaaaccgtttggtgcgtaccatgtagtgtcttctgctgcctcttacctgcactcccgggccatgggcgttatgccatttggtcccgggaatggcgtcaaggacgatcatccagcagccgtcacgtcgctcgtgagcggcgcgagcggtgacggattgagcgtggacgaggcttcgttcgtggccacgacgagttcggtgacctccatggtcgcggcgaaggaggagacgcggcaagccgttgcggatgatctcaactcttcgagatcttgcccttgcgagtggttcgtctgtgaggatgatcagaacagcacgatatacttcgtggttcagtttcaggagttggtagtagtatacgactacgagagcagccgagcaggtgaatctaaattcagttttctgatgcggcggcgctgcaggaggtggacgtgctggttcacaggggcatatacgaagccgccaaggggatgtatcaccagatgctaccctacgtgaaggcgcacctgaagagctggggcaaatccgcgcggctgcggttcacggggcactccctcggcgggagcctggcgctgctcgtgaacctgatgctgctggtgcgaggggaggcgcccgcgtcgtcgctgctgcccgtgataacgttcggcgcgccgtgcatcatgtgcggcggcgaccacctgctccgccgcctcgggctgccgcggagccacgtgcagtccgtcacgatgcaccgggacatagtgccccgggtgttctcctgccactaccccgaccatgtcgccaacatcctgaagctcgccaacgggaatttccgcagccacccgtgcctcgcgaaccagaaactcctgtacgcgccgatgggggaggtgctgatcctgcagccggacgagcggctgtccccgcaccaccacctgctcccaccggacagcggcatctaccacctgggcggcggtggcggtggcggtggggcgggaacggcggcgaatgcgggcgaaggctccctgccgcagctccggtccgcgctgtcggccttcttcaactcgccgcacccgctcgagatcctcaaggacggcgccgcgtacgggccccggggctccgtgtaccgggaccacgacgtgaactcgtacctccggtccgtgcgcgccgtggtccgcaaggaggccaggcgcgcgcgggaggccgagcgggagcgctggcgcctgctcctctggtggccgttcggcgtgcacggcgtgtcgtcggcgtcggcggggcggcgcgggggcctcgtggacgccgtcagcgaggctgccaggcgcgcgcatctcttgctggtggtgctgctgcccgcggagctgctcgctctcggcgcgctcctggccgtcattagattcaggtgattagataggctctcacgcgggttcatcaatccgttcgttcgttcgtacgccgtcgacacacacgattcttttgtaccaaacacacacacacacatacacgtctgcaaagcaaatgcgacattgcagctgcgtcgcatgtatgtaaaatgaatgaaatgaaaaaaaaaacacaaactcgaattctttggttccgtccaacggttccctctcgacttcactcactcctcgaactatcaactatattttgagtcccctatgaactatattttgaatcttggaagtctgagtccgtccctgcatagcccccgctaatttgtgatgtccattacgtgttccctgattggtttaaaaatacagtaaacttcct

SEQ ID NO: 75295 - DNA, 3832 bp, Zea Mays
ggaaatgccgtgagcgccacacgtgtacgtccgcgccagcggtctcatccgctgacgtgccgccagcctgacgtccacgccgcagggcgacgcgtccacgccacggaagcaacggtggcatcttctgcgcgtggcccctgggacggacgcgcgccgctgccgacctgccgtgtcgcctctctgcctgcctgcgctagtttaagccaactgcgcgtccgcctttctgaagcggttgacacttgacagacagccagcggtttagattctagcctttgaggcagcagtaccgcagcctaaatgccgtcacggcattgttaatgccagactgcacgtaatcaggccttgtaatatccactcctttaattttttttttcatttttttctggtgcgtgaagcatgttgaatcgagtgtgtacacaggaacctcgcaagtcgcattcgcagctgaaggagaaagaggcaccacgccaaaaccaccacagcaagcggataaatatccaatgtcaaaagggttccttttgaacaagcaaccgaaaagatttttcttcgtcgctcgctcaccacccatcccacccccacaggccacaggccacaggccacagacgagacgatccccggtcatcgcctacctccctgtcctctgccgtccttcccttcgccacgtctccaagtatataggaggaggctctccggcaatgcccgctcccccatcatcctaccaatcacggcagccactccccgtcgtcgaccaaaagcactccggtgagctagaaccggcagaagaatagccagcctgccggcgatccgcgcagaccacgccagccgccccacaagtcccagacggcagggattcctaaacataacgcgctattcctattattagccagccgcctctcgattcgcgcggcttaaccgccctcgtgcgcgtgcgcgcgcgcgcgcggtaggaggccacacgttccggaggcgcgcgcccagaccagggccgcccccgcgccatggacgtgctgcggttcgtgcgcgccgccgcggcgccgcagcctgcggtggcgccgccggcgtcggctgcgacggtgccggcgcagcgccagcggctgcgcatgtggccgcgtggcgggggagaccagccgcccccggtcggcgccgcctccacgcgcggcgcggagccgaggagcccgcccgacgaggagcggaaggcggagggggcccagcgggggcagggcaactgggtgctgcagatgctgcgggtgcagccgcggtgggtggatgcggcggacgcggaggccaccggcggcggccaggaaccggacgaggagacggcggctgcggctgcggctggcgctggtggcgtcgaggagtgcgcttcctgcggctgcggggaagacgacgaaggctgcgccgtggggtacggcgacggcgacggcgaggtgttcgaccgcgcgtcgttctcgcggctcctgcggaaggcgtcgctcggggaggctaaagagtattccatgatgtcctacctctgcaacatcgcctacatgatccccagaattcagtgcagctcgtcctcggtgaatgtggaattgctttcggtaaacgctcgtgagcatgtgattgtgccagacacttgtcgtcctcttgttcatgcgtgtattttccagcgtcaatgcaggggcgcgcggggtggtggtatttcctaggaaagcccatgccgaatctggtctattttggatttttactgtctacttctcctttccagtgtgattttccaatagctagtcttggactagtccgagtccatccttgagttctgcttgtcttcgccaattggttaattgccctgaactgtttttctggtctacagaaatatcgtcggagtttcctctgaaccagagtttcttacctttcccaccgcctaactcaggaatccttttgctttcatgcttcccatcccagccaaaatgtcttcggcgatacaatctgcggttcgtgacgtcgtcagtgcaagacaaggccggagttagcaaccctgaccagaagcaggagcgtagcaccaagaaagacgaatctggcgatcaagcatccgaagctgtcgacgacgcggtgccacgacgtgggctagggacgataaaaccgtttggtgcgtaccatgtagtgtcttctgctgcctcttacctgcactcccgggccatgggcgttatgccatttggtcccgggaatggcgtcaaggacgatcatccagcagccgtcacgtcgctcgtgagcggcgcgagcggtgacggattgagcgtggacgaggcttcgttcgtggccacgacgagttcggtgacctccatggtcgcggcgaaggaggagacgcggcaagccgttgcggatgatctcaactcttcgagatcttgcccttgcgagtggttcgtctgtgaggatgatcagaacagcacgatatacttcgtggttcagggctcagaatcaattgcttcttggcaggccaaccttttgttcgaacctgtcaaatttgaggaggtggacgtgctggttcacaggggcatatacgaagccgccaaggggatgtatcaccagatgctaccctacgtgaaggcgcacctgaagagctggggcaaatccgcgcggctgcggttcacggggcactccctcggcgggagcctggcgctgctcgtgaacctgatgctgctggtgcgaggggaggcgcccgcgtcgtcgctgctgcccgtgataacgttcggcgcgccgtgcatcatgtgcggcggcgaccacctgctccgccgcctcgggctgccgcggagccacgtgcagtccgtcacgatgcaccgggacatagtgccccgggtgttctcctgccactaccccgaccatgtcgccaacatcctgaagctcgccaacgggaatttccgcagccacccgtgcctcgcgaaccagaaactcctgtacgcgccgatgggggaggtgctgatcctgcagccggacgagcggctgtccccgcaccaccacctgctcccaccggacagcggcatctaccacctgggcggcggtggcggtggcggtggggcgggaacggcggcgaatgcgggcgaaggctccctgccgcagctccggtccgcgctgtcggccttcttcaactcgccgcacccgctcgagatcctcaaggacggcgccgcgtacgggccccggggctccgtgtaccgggaccacgacgtgaactcgtacctccggtccgtgcgcgccgtggtccgcaaggaggccaggcgcgcgcgggaggccgagcgggagcgctggcgcctgctcctctggtggccgttcggcgtgcacggcgtgtcgtcggcgtcggcggggcggcgcgggggcctcgtggacgccgtcagcgaggctgccaggcgcgcgcatctcttgctggtggtgctgctgcccgcggagctgctcgctctcggcgcgctcctggccgtcattagattcaggtgattagataggctctcacgcgggttcatcaatccgttcgttcgttcgtacgccgtcgacacacacgattcttttgtaccaaacacacacacacacatacacgtctgcaaagcaaatgcgacattgcagctgcgtcgcatgtatgtaaaatgaatgaaatgaaaaaaaaaacacaaactcgaattctttggttccgtccaacggttccctctcgacttcactcactcctcgaactatcaactatattttgagtcccctatgaactatattttgaatcttggaagtctgagtccgtccctgcatagcccccgctaatttgtgatgtccattacgtgttccctgattggtttaaaaatacagtaaacttcct

SEQ ID NO: 75296 - DNA, 3444 bp, Zea Mays
tttttttttgctggaaatgccgtgagcgccacacgtgtacgtccgcgccagcggtctcatccgctgacgtgccgccagcctgacgtccacgccgcagggcgacgcgtccacgccacggaagcaacggtggcatcttctgcgcgtggcccctgggacggacgcgcgccgctgccgacctgccgtgtcgcctctctgcctgcctgcgctagtttaagccaactgcgcgtccgcctttctgaagcggttgacacttgacagacagccagcggtttagattctagcctttgaggcagcagtaccgcagcctaaatgccgtcacggcattgttaatgccagactgcacgtaatcaggccttgtaatatccactcctttaattttttttttcatttttttctggtgcgtgaagcatgttgaatcgagtgtgtacacaggaacctcgcaagtcgcattcgcagctgaaggagaaagaggcaccacgccaaaaccaccacagcaagcggataaatatccaatgtcaaaagggttccttttgaacaagcaaccgaaaagatttttcttcgtcgctcgctcaccacccatcccacccccacaggccacaggccacaggccacagacgagacgatccccggtcatcgcctacctccctgtcctctgccgtccttcccttcgccacgtctccaagtatataggaggaggctctccggcaatgcccgctcccccatcatcctaccaatcacggcagccactccccgtcgtcgaccaaaagcactccggtgagctagaaccggcagaagaatagccagcctgccggcgatccgcgcagaccacgccagccgccccacaagtcccagacggcagggattcctaaacataacgcgctattcctattattagccagccgcctctcgattcgcgcggcttaaccgccctcgtgcgcgtgcgcgcgcgcgcgcggtaggaggccacacgttccggaggcgcgcgcccagaccagggccgcccccgcgccatggacgtgctgcggttcgtgcgcgccgccgcggcgccgcagcctgcggtggcgccgccggcgtcggctgcgacggtgccggcgcagcgccagcggctgcgcatgtggccgcgtggcgggggagaccagccgcccccggtcggcgccgcctccacgcgcggcgcggagccgaggagcccgcccgacgaggagcggaaggcggagggggcccagcgggggcagggcaactgggtgctgcagatgctgcgggtgcagccgcggtgggtggatgcggcggacgcggaggccaccggcggcggccaggaaccggacgaggagacggcggctgcggctgcggctggcgctggtggcgtcgaggagtgcgcttcctgcggctgcggggaagacgacgaaggctgcgccgtggggtacggcgacggcgacggcgaggtgttcgaccgcgcgtcgttctcgcggctcctgcggaaggcgtcgctcggggaggctaaagagtattccatgatgtcctacctctgcaacatcgcctacatgatccccagaattcagccaaaatgtcttcggcgatacaatctgcggttcgtgacgtcgtcagtgcaagacaaggccggagttagcaaccctgaccagaagcaggagcgtagcaccaagaaagacgaatctggcgatcaagcatccgaagctgtcgacgacgcggtgccacgacgtgggctagggacgataaaaccgtttggtgcgtaccatgtagtgtcttctgctgcctcttacctgcactcccgggccatgggcgttatgccatttggtcccgggaatggcgtcaaggacgatcatccagcagccgtcacgtcgctcgtgagcggcgcgagcggtgacggattgagcgtggacgaggcttcgttcgtggccacgacgagttcggtgacctccatggtcgcggcgaaggaggagacgcggcaagccgttgcggatgatctcaactcttcgagatcttgcccttgcgagtggttcgtctgtgaggatgatcagaacagcacgatatacttcgtggttcagggctcagaatcaattgcttcttggcaggccaaccttttgttcgaacctgtcaaatttgaggaggtggacgtgctggttcacaggggcatatacgaagccgccaaggggatgtatcaccagatgctaccctacgtgaaggcgcacctgaagagctggggcaaatccgcgcggctgcggttcacggggcactccctcggcgggagcctggcgctgctcgtgaacctgatgctgctggtgcgaggggaggcgcccgcgtcgtcgctgctgcccgtgataacgttcggcgcgccgtgcatcatgtgcggcggcgaccacctgctccgccgcctcgggctgccgcggagccacgtgcagtccgtcacgatgcaccgggacatagtgccccgggtgttctcctgccactaccccgaccatgtcgccaacatcctgaagctcgccaacgggaatttccgcagccacccgtgcctcgcgaaccagaaactcctgtacgcgccgatgggggaggtgctgatcctgcagccggacgagcggctgtccccgcaccaccacctgctcccaccggacagcggcatctaccacctgggcggcggtggcggtggcggtggggcgggaacggcggcgaatgcgggcgaaggctccctgccgcagctccggtccgcgctgtcggccttcttcaactcgccgcacccgctcgagatcctcaaggacggcgccgcgtacgggccccggggctccgtgtaccgggaccacgacgtgaactcgtacctccggtccgtgcgcgccgtggtccgcaaggaggccaggcgcgcgcgggaggccgagcgggagcgctggcgcctgctcctctggtggccgttcggcgtgcacggcgtgtcgtcggcgtcggcggggcggcgcgggggcctcgtggacgccgtcagcgaggctgccaggcgcgcgcatctcttgctggtggtgctgctgcccgcggagctgctcgctctcggcgcgctcctggccgtcattagattcaggtgattagataggctctcacgcgggttcatcaatccgttcgttcgttcgtacgccgtcgacacacacgattcttttgtaccaaacacacacacacacatacacgtctgcaaagcaaatgcgacattgcagctgcgtcgcatgtatgtaaaatgaatgaaatgaaaaaaaaaacacaaactcgaattctttggttccgtccaacggttccctctcgacttcactcactcctcgaactatcaactatattttgagtcccctatgaactatattttgaatcttggaagtctgagtccgtccctgcatagcccccgctaatttgtgatgtccattacgtgttccctgattggtttaaaaatacagtaaacttcct

SEQ ID NO: 75297 - DNA, 2085 bp, Zea Mays
cccgcctctcatttcccccctcctcccgctccccttggctccccaagcctcgacgcccggctagggttttgcctccttcccgccgccgctgtttcagcgagcgagaccgagtggtagagaaagagcggtgcttagccacccatgtcgctgcgtccgagcgagcgggtcgaggtacggcggaaccgctacaaggtggcggttgacgcggaggaggggcggcggcggcgcgaggacaatatggtggagatccgcaagagccgccgtgaggagagcctcctcaagaggcgccgtgaggggctccaggcccaggtccctgcccctccctccggggttgagaagaagcttgaaagcctcccagctatggttagtggggtttattcggatgataataaccttcagcttgaggccaccacacagttccgcaaattgctctctatagagaggagtctcccccatcgaagaagttatcaaaacaggtgtagttccaagatttgtgcagtctctcaccagagaggatttcccccagctgcagtttgaagccgcatgggctctcacaaatattgcttctggcacttcagaaaatacaaaggctgttattgaccatggggctgttcctatatttgtgaagcttcttgggtctggtagtgatgatgttcgtgagcaggctgtgtgggctttgggtaatgttgctggcgattctccgaagtgccgcgaccttgttctcgccaatggtgcgttgatgcctctgctagcccagttgaatgagcatgttaagctctccatgctgcggaatgccacctggactttgtctaacttctgcaggggaaaaccacagccatcatttgatcagactaagcctgctctgccagcacttgcacgacttatccattccaacgacgaggaagttctcactgatgcatgctgggccctgtcatacttatctgacggcactaatgataagatccaggctgtgattgaagctggtgtttgcccccggctcgtggagcttctcctccatccatcaccatcggtgcttatacctgctctacgaactgttgggaatattgtcactggagatgatttgcaaactcagtgtattattgatcatcaagctcttccccgcctcctgaatctgttgacgcagaaccacaagaaaagcattaagaaagaggcatgctggactatttcaaatattactgctggaaacaaagatcagatacaggctgtcataagtgccggtatcatcgctcctttgttgcaactgcttcaaacagcagagtttgatatcaagaaggaggctgcttgggccatctcaaatgctacctctggtggttctcatgagcaaatcaagtacttggtgtctgagggctgcatcaagccattgtgtgaccttcttgtctgccctgatccgagaattgtaacagtttgtctggagggtctggagaatattcttaaagtagggcagcatgacaagaccatgggtgcaacaggtgacactaatgtcttagctcagatgatcgatgaagcggaaggcctggaaaagatcgagaacctacagagccacgataacaatgaaatctatgaaaaggctgtgaagcttcttgagacatactggatggaggaggaagatgacgcaatggctactgccggggaagctgctcctgctgtttttgactttaaccaaggtggcaaccctcctgctgctggtggtctgaacttcaactgatacagtctttgatcgaaagggtgttaattccctcagtgatgggcttggcattggcttgtcgtgacaaatgtagtctggtcgactccacgtgggatataatggtttgtgggtctgtaacaaggattatataatcgtcgaacattagagcgtgggttcttgagaacgctactctaggttgtccggagtgggtaaacctgagtgggaacatttgagcatattgctcggccttgttttactacggtcgaggctaaattgatttctaaaagctgtttgcttctgcattgttggcgggaaaataaggcgaatgttttgatgccaaattcaatttcgagttaagaggcagatacaaggcccttcac

SEQ ID NO: 75298 - DNA, 2166 bp, Zea Mays
cccgcctctcatttcccccctcctcccgctccccttggctccccaagcctcgacgcccggctagggttttgcctccttcccgccgccgctgtttcagcgagcgagaccgagtggtagagaaagagcggtgcttagccacccatgtcgctgcgtccgagcgagcgggtcgaggtacggcggaaccgctacaaggtggcggttgacgcggaggaggggcggcggcggcgcgaggacaatatggtggagatccgcaagagccgccgtgaggagagcctcctcaagaggcgccgtgaggggctccaggcccaggtccctgcccctccctccggggttgagaagaagcttgaaagcctcccagctatggttagtggggtttattcggatgataataaccttcagcttgaggccaccacacagttccgcaaattgctctctatagagaggagtctcccccatcgaagaagttatcaaaacaggtgtagttccaagatttgtgcagtctctcaccagagaggatttcccccagctgctttgaagccgcatgggctctcacaaatattgcttctggcacttcagaaaatacaaaggctgttattgaccatggggctgttcctatatttgtgaagcttcttgggtctggtagtgatgatgttcgtgagcaggctgtgtgggctttgggtaatgttgctggcgattctccgaagtgccgcgaccttgttctcgccaatggtgcgttgatgcctctgctagcccagttgaatgagcatgttaagctctccatgctgcggaatgccacctggactttgtctaacttctgcaggggaaaaccacagccatcatttgatcagactaagcctgctctgccagcacttgcacgacttatccattccaacgacgaggaagttctcactgatgcatgctgggccctgtcatacttatctgacggcactaatgataagatccaggctgtgattgaagctggtgtttgcccccggctcgtggagcttctcctccatccatcaccatcggtgcttatacctgctctacgaactgttgggaatattgtcactggagatgatttgcaaactcagtgtattattgatcatcaagctcttccccgcctcctgaatctgttgacgcagaaccacaagaaaagcattaagaaagaggcatgctggactatttcaaatattactgctggaaacaaagatcagatacaggctgtcataagtgccggtatcatcgctcctttgttgcaactgcttcaaacagcagagtttgatatcaagaaggaggctgcttgggccatctcaaatgctacctctggtggttctcatgagcaaatcaagtacttggtgtctgagggctgcatcaagccattgtgtgaccttcttgtctgccctgatccgagaattgtaacagtttgtctggagggtctggagaatattcttaaagtagggcagcatgacaagaccatgggtgcaacaggtgacactaatgtcttagctcagatgatcgatgaagcggaaggcctggaaaagatcgagaacctacagagccacgataacaatgaaatctatgaaaaggctgtgaagcttcttgagacatactggatggaggaggaagatgacgcaatggctactgccggggaagctgctcctgctgtttttgactttaaccaaggtggcaaccctcctgctgctggtggtctgaacttcaactgatacagtctttgatcgaaagggtgttaattccctcagtgatgggcttggcattggcttgtcgtgacaaatgtagtctggtcgactccacgtgggatataatggtttgtggtgagtccaataaactcaagatttcgaagggagatgggctgagcattatattcccaagtgaaccatggctatcaatatcgcagggtctgtaacaaggattatataatcgtcgaacattagagcgtgggttcttgagaacgctactctaggttgtccggagtgggtaaacctgagtgggaacatttgagcatattgctcggccttgttttactacggtcgaggctaaattgatttctaaaagctgtttgcttctgcattgttggcgggaaaataaggcgaatgttttgatgccaaattcaatttcgagttaagaggcagatacaaggcccttcac

SEQ ID NO: 75299 - DNA, 2227 bp, Zea Mays
cttggcgctaggtcccccgcctctcatttcccccctcctcccgctccccttggctccccaagcctcgacgcccggctagggttttgcctccttcccgccgccgctgtttcagcgagcgagaccgagtggtagagaaagagcggtgcttagccacccatgtcgctgcgtccgagcgagcgggtcgaggtacggcggaaccgctacaaggtggcggttgacgcggaggaggggcggcggcggcgcgaggacaatatggtggagatccgcaagagccgccgtgaggagagcctcctcaagaggcgccgtgaggggctccaggcccaggtccctgcccctccctccggggttgagaagaagcttgaaagcctcccagctatggttagtggggtttattcggatgataataaccttcagcttgaggccaccacacagttccgcaaattgctctctatagagaggagtctcccccatcgaagaagttatcaaaacaggtgtagttccaagatttgtgcagtctctcaccagagaggatttcccccagctgcagaaaatacaaaggctgttattgaccatggggctgttcctatatttgtgaagcttcttgggtctggtagtgatgatgttcgtgagcaggctgtgtgggctttgggtaatgttgctggcgattctccgaagtgccgcgaccttgttctcgccaatggtgcgttgatgcctctgctagcccagttgaatgagcatgttaagctctccatgctgcggaatgccacctggactttgtctaacttctgcaggggaaaaccacagccatcatttgatcagactaagcctgctctgccagcacttgcacgacttatccattccaacgacgaggaagttctcactgatgcatgctgggccctgtcatacttatctgacggcactaatgataagatccaggctgtgattgaagctggtgtttgcccccggctcgtggagcttctcctccatccatcaccatcggtgcttatacctgctctacgaactgttgggaatattgtcactggagatgatttgcaaactcagtgtattattgatcatcaagctcttccccgcctcctgaatctgttgacgcagaaccacaagaaaagcattaagaaagaggcatgctggactatttcaaatattactgctggaaacaaagatcagatacaggctgtcataagtgccggtatcatcgctcctttgttgcaactgcttcaaacagcagagtttgatatcaagaaggaggctgcttgggccatctcaaatgctacctctggtggttctcatgagcaaatcaagtacttggtgtctgagggctgcatcaagccattgtgtgaccttcttgtctgccctgatccgagaattgtaacagtttgtctggagggtctggagaatattcttaaagtagggcagcatgacaagaccatgggtgcaacaggtgacactaatgtcttagctcagatgatcgatgaagcggaaggcctggaaaagatcgagaacctacagagccacgataacaatgaaatctatgaaaaggctgtgaagcttcttgagacatactggatggaggaggaagatgacgcaatggctactgccggggaagctgctcctgctgtttttgactttaaccaaggtggcaaccctcctgctgctggtggtctgaacttcaactgatacagtctttgatcgaaagggtgttaattccctcagtgatgggcttggcattggcttgtcgtgacaaatgtagtctggtcgactccacgtgggatataatggtttgtggtgagtccaataaactcaagatttcgaagggagatgggctgagcattatattcccaagtgaaccatggctatcaatatcgcagggtctgtaacaaggattatataatcgtcgaacattagagcgtgggttcttgagaacgctactctaggttgtgcgtcgtttaattatatctggctactgtaaggcattcctgattggtttggttttttaagttcctcgggaatggtctgcgttgcaggttgtccggagtgggtaaacctgagtgggaacatttgagcatattgctcggccttgttttactacggtcgaggctaaattgatttctaaaagctgtttgcttctgcattgttggcgggaaaataaggcgaatgttttgatgccaaattcaatttcgagttaagaggcagatacaaggcccttcac

SEQ ID NO: 75300 - DNA, 876 bp, Zea Mays
aacacccaacacgatgcccttggggaagtactactgcgactactgcgacaagcagttccaggacacccccgccgcccggaagcgccacctccagggcgtgcagcaccaacgcgcccgcgccctctggtacgactccattcgccaccaagaccagcatggcggcgcttcctccctcctcctgcctgacggcaccctcgccaagggcatctgtcaccacttcgtccgcacgggggcttgcaagtatggggattcatgcagatacttccatccgaagccaaatggtgtcaatccagcattagctgcaccagggcttgggtctgggcctgcacccatggtgcagcagtctgatattattgggaaccaacccaattttgttgtataccagggagtagacataaattcttcctcagaaagaattgtgatatacgacaagctagatgcttaccatatcctcacttcagtcagctgtcatgccatgatgtgagcccttgcgacacaatcatcctatttggacattccaatttactccatcatgtgccagcgggtccattgggaagatactggggggacacgcctcttggggcaacctgccgccatcactgcaacctcctcctgaaggcggctaccctcccctcccgttcatcgactggggctgaaggggcgttgtctccctgaaattcgaaccatttaatatttcataccttgattggttgtgctaaatcgcatatacttggagcgcagtagagttaaggtgatcccagtttattttgatcttaaatttatctctgtaatagatatttacagtcagaggtacacttcgcagattgcgttgatgtttgaatgaactcacatttgcatcaatggtgctcttatggc

SEQ ID NO: 75301 - DNA, 711 bp, Zea Mays
aacacccaacacgatgcccttggggaagtactactgcgactactgcgacaagcagttccaggacacccccgccgcccggaagcgccacctccagggcgtgcagcaccaacgcgcccgcgccctctgaccagcatggcggcgcttcctccctcctcctgcctgacggcaccctcgccaagggcatctgtcaccacttcgtccgcacgggggcttgcaagtatggggattcatgcagatacttccatccgaagccaaatggtgtcaatccagcattagctgcaccagggcttgggtctgggcctgcacccatggtgcagcagtctgatattattgggaaccaacccaattttgttgtataccagggagtagacataaattcttcctcagggaagatactggggggacacgcctcttggggcaacctgccgccatcactgcaacctcctcctgaaggcggctaccctcccctcccgttcatcgactggggctgaaggggcgttgtctccctgaaattcgaaccatttaatatttcataccttgattggttgtgctaaatcgcatatacttggagcgcagtagagttaaggtgatcccagtttattttgatcttaaatttatctctgtaatagatatttacagtcagaggtacacttcgcagattgcgttgatgtttgaatgaactcacatttgcatcaatggtgctcttatggc

SEQ ID NO: 75302 - DNA, 1783 bp, Zea Mays
ggtttctggagcgttttctctgttcttggcgaggtagctcaatagatctactgctctcgggggagttaatgcaaagctgagttgctgcacgttggctttcttcagagatggcttcagctggtgtagccccatctgggtacaaaaacagcagcagcactagcattggtgccgagaagttgcaagatcagatgaacgagctaaagattagagatgataaggaagttgaagcaaccataattaatgggaaagggactgaaactgggcacataattgtcaccactactggtggcaagaatggtcaaccaaaacagacagtgagctacatggctgagcgcattgtaggtcaaggttcttttgggatcgtcttccaggctaagtgtttggagacgggtgagactgttgccataaagaaggttcttcaggataagcgttacaagaaccgcgagttgcagaccatgcgccttcttgaccaccctaatgttgttgctttgaagcattgcttcttttcaactaccgagaaggatgagctttatctgaacttggtccttgagtatgtgccggagacagttcatcgagttgtgaagcatcacaacaagatgaaccaacgcatgccacttatttatgtgaagctgtatatgtaccagatatgtagggcattggcttacattcatggcactattggtgtctgccacagagatattaagccacaaaaccttctggtgaacccacacacccaccagcttaaactatgtgactttggcagtgcaaaagttctggtcaagggggaaccaaacatatcgtacatctgctcccgatactatagggctccagagctcatatttggtgccactgagtataccacagcgattgacatttggtctgctggatgtgttcttgctgagcttatgctagggcagcctttgtttccgggtgaaagtggtgtggaccaacttgttgaaatcatcaaggtcctcggtacgccaacaagggaagaaattaaatgcatgaacccaaattacacagagtttaagttcccacaaatcaaagcacacccatggcacaaggtattccacaaaaggatgccgccagaagctgttgatctggtctctcggctactccagtactccccaaatctgagatgcactgctatggaggcacttgttcacccattctttgatgagcttcgagatcctaatactcgccttccaaatggtcgctttttgccaccactattcaatttcaagcctcacgaacttaaaggagtcccatcagacattgtcgcgaaattgattccagaacatgcaaagaagcaatgctcctatgttggattgtgaaatgaccgcgccttgagactggaacctgtggttgcaattgtgaatttcccctgggatgtttgacgatctgaggcatgcgagcctgttgttgaagatgcaaggttacgtacttgtacgacaatgtgacctgtgtagctgagtagtctatgtcgcagtgacatgtaacggcaccccccttcctactaactgacgcttactcgagattgccatagttgatcttgtaatttgttatagagcagtatgaatgtatttatggtagcttgaatctatgtatggattcacttcgtttttccatgtttccttgtctccagacccagattgctaccgtattgtttcagaattcctagctacctgttgcctattgagtattgactaccagcttgcacttgtctgttattgcactggctgtggaatcagctgttgatttttgccacaatattttagttcag

SEQ ID NO: 75303 - DNA, 1915 bp, Zea Mays
ccatctgttcttgctcctgatttggctgtttgttttttctgtctgttcttcgctgttggtagtttgtgaccgtgaatgggcgttcctggtccatgttcgcgtgcgctgctgccgattctgggagctctctggtcgtccgtctcgctgggatctgccttttccccggtagctcaatagatctactgctctcgggggagttaatgcaaagctgagttgctgcacgttggctttcttcagagatggcttcagctggtgtagccccatctgggtacaaaaacagcagcagcactagcattggtgccgagaagttgcaagatcagatgaacgagctaaagattagagatgataaggaagttgaagcaaccataattaatgggaaagggactgaaactgggcacataattgtcaccactactggtggcaagaatggtcaaccaaaacagacagtgagctacatggctgagcgcattgtaggtcaaggttcttttgggatcgtcttccaggctaagtgtttggagacgggtgagactgttgccataaagaaggttcttcaggataagcgttacaagaaccgcgagttgcagaccatgcgccttcttgaccaccctaatgttgttgctttgaagcattgcttcttttcaactaccgagaaggatgagctttatctgaacttggtccttgagtatgtgccggagacagttcatcgagttgtgaagcatcacaacaagatgaaccaacgcatgccacttatttatgtgaagctgtatatgtaccagatatgtagggcattggcttacattcatggcactattggtgtctgccacagagatattaagccacaaaaccttctggtgaacccacacacccaccagcttaaactatgtgactttggcagtgcaaaagttctggtcaagggggaaccaaacatatcgtacatctgctcccgatactatagggctccagagctcatatttggtgccactgagtataccacagcgattgacatttggtctgctggatgtgttcttgctgagcttatgctagggcagcctttgtttccgggtgaaagtggtgtggaccaacttgttgaaatcatcaaggtcctcggtacgccaacaagggaagaaattaaatgcatgaacccaaattacacagagtttaagttcccacaaatcaaagcacacccatggcacaaggtattccacaaaaggatgccgccagaagctgttgatctggtctctcggctactccagtactccccaaatctgagatgcactgctatggaggcacttgttcacccattctttgatgagcttcgagatcctaatactcgccttccaaatggtcgctttttgccaccactattcaatttcaagcctcacgaacttaaaggagtcccatcagacattgtcgcgaaattgattccagaacatgcaaagaagcaatgctcctatgttggattgtgaaatgaccgcgccttgagactggaacctgtggttgcaattgtgaatttcccctgggatgtttgacgatctgaggcatgcgagcctgttgttgaagatgcaaggttacgtacttgtacgacaatgtgacctgtgtagctgagtagtctatgtcgcagtgacatgtaacggcaccccccttcctactaactgacgcttactcgagattgccatagttgatcttgtaatttgttatagagcagtatgaatgtatttatggtagcttgaatctatgtatggattcacttcgtttttccatgtttccttgtctccagacccagattgctaccgtattgtttcagaattcctagctacctgttgcctattgagtattgactaccagcttgcacttgtctgttattgcactggctgtggaatcagctgttgatttttgccacaatattttagttcag

SEQ ID NO: 75304 - DNA, 1523 bp, Zea Mays
cccttgtcttggaccgaagatatctcatggtttgttacgttaatgtaaatctgaagcgcgctttgtcgctataagtaacacgcaggcagccacaccaaagagaagcttgccaaaacaaactactcaacctggaaggctcaagttgttgccaccatgcgtggtgctcgcctagaaggtttcctcaccggcaaggctataatgcctgatgccgaaccccaaagcagagatggagacaaaatcatcaagatctccaatcctgcttatgaagactgggtggccttggatcaacaagtcctaagcttcctgcttgcttccatatcgaaggaagtattaatccaagtctcctccaagacaactgctatggaggtatggcgtcatatagaaactatattttcatctcaaacacgagctcgtgctgtaaatactcggctagctctgtccaccgcccggaaaggcagcagctctgtggccgactatgtcggcaagatgaaggccctcggcgacgaaatggctacagccgggcgacctcttgaagatgatgaactggtggagtatatcctcaccggtcttggtgaagaatacgactctgtggtgtcatctgtccttggccgaactgaaccaatctctgttagtgaattatattcacaattacttgcatttgaaacaagggtgaatctgcgtaacaatgggcaatcgtctggatacttggccaactctgcaaatcgccgtggtcggggtagtacaggacgccacaatcgcggcggaggccgaaatgggagaaacttcaactctcatggcaataacagttcgcgacaggcaaatcaaggaccccgaaacaacaccaccactctgtctgatccatgtcaagtgtgtttcaagaaaggacatactgccaacaaatgctggtacaggtatgatgagaattttgttcctgatccaaggcatgttgctgctgctgccatgacatcctataccgtggatactaattggtacacggatacgagtgctactgatcatataaccggagatctcaataagttggccctccgggagaaatacaatggcgatgatcaaatccacacagccaatggagcaggatcggagaacgaagcacactctttttaaaggaagatgtcacaaggggttgtaccctctaccttctgcatcagcaaagcaagcctttggagcagtcaaaccgtcttttgaacgatggcatagccgcctaggtcatccagcagcacccatagttcaaaaagtaattagtggttttcatctcccatgtcaaatcaagtcaaataaagagtatgtgtgtagtgcttgccagcaagccaaaagccaccagttaccctttcctaaatctttgagtgtcttgaaacatcctttagatctcgtgttttctgatgtttgggggcctgcacccgagtctgctggcagaaataaatattatgtaagttttattgatgattttagcaaattcacatggatttaccttctcaaattaaagtctgaagtgtttcagaaat

SEQ ID NO: 75305 - DNA, 1534 bp, Zea Mays
gcattgggcgcgattcattcccctcgtgggctcccagttcagtaaaccctacgccctgcggcacacacccatctcgccgcgccgccgcgtaaaccccacccgagcccatctcgccctcgcgcctccccgccctcgcgcaggcgcaacaatggcggccgcctcgaggggcctgctcgcgcgcctccgtgtcctctcactctccggcggcgggagcccgtggctccgcttcccgccttcccggctcttctccgcggaggccttcgtctcccattccgatgacgacgacgctgggggcgagggaggaggcgggggccggatcatcgaggcacggtccggggtgatgggccccacctcgcggcgcaccggcgtcatcggcgtcaagtgcgggatgtcggcgatgtgggacaagtggggcgccaaggtgcccatcaccgtcctctgggtcgacgacaacgttgttacccaggtcaagaccgccgagaaggagggtttcttcgccctacagcttggagcaggtcaaaagaaggaaaaacacctaacaaagcctgaagttggccactttagagcacagggagtgcctctgaaaagaaagctaagggaatttcctgtcactgaggatgcgcttcttcctgttggcacaagcatcacagttcgtcactttgttcctggacaatttgttgatgtcactggaatcacgaaggggaaaggttttgcaggtgtaatgaaaagatatggttttggtgggatgcctgcatcacatggaacatctttggcgcatcgcagtggtggctctactggtcaaagagatgctcctggaagggttttcaaaaacagaaaaatgcctggacgcatgggtggtgtgcaacgcacagtgaagaatgtatgggtctatcaaatagacccagccaggaacttactgtatctgaagggccaggtgagcctgaagacttggagcccctgattgctgatcttggtgatgttgacccattcatggcagccgattaagacaatgcacaaagttggttaattcctttttgtgttctaagcactccttgagctcgtccattccacgagattgtcaaactctcgatggatgtgagcagttcctgaatcacaagctttatccggttactggccagcctgatcaatgttgttccatgtacattacctggcaagtataccagtgctctaatggtttttagatgattgttttgattgaccgaatataacctttttctcaataagttgtacgcggagccacaagtagtatataaaatcagaatatttcactcatgagagtgtgttctggttttacgcgagctgcttatgttattgctagctgttagtttattacctgtcatttttactttctatttctaatacaaccttttctttttctaataatctttatttcaattcttctttttgtcgttttctatgtactattaacttctttcactgctcttgattactgtgtccagagctcaaacgtcatctattacgactcagggaatatatcataataacataaggc

SEQ ID NO: 75306 - DNA, 1626 bp, Zea Mays
gcattgggcgcgattcattcccctcgtgggctcccagttcagtaaaccctacgccctgcggcacacacccatctcgccgcgccgccgcgtaaaccccacccgagcccatctcgccctcgcgcctccccgccctcgcgcaggcgcaacaatggcggccgcctcgaggggcctgctcgcgcgcctccgtgtcctctcactctccggcggcgggagcccgtggctccgcttcccgccttcccggctcttctccgcggaggccttcgtctcccattccgatgacgacgacgctgggggcgagggaggaggcgggggccggatcatcgaggcacggtccggggtgatgggccccacctcgcggcgcaccggcgtcatcggcgtcaagtgcgggatgtcggcgatgtgggacaagtggggcgccaaggtgcccatcaccgtcctctgggtcgacgacaacgttgttacccaggtcaagaccgccgagaaggagggtttcttcgccctacagcttggagcaggtcaaaagaaggaaaaacacctaacaaagcctgaagttggccactttagagcacagggagtgcctctgaaaagaaagctaagggaatttcctgtcactgaggatgcgcttcttcctgttggcacaagcatcacagttcgtcactttgttcctggacaatttgttgatgtcactggaatcacgaaggggaaagggtgtaatgaaaagatatggttttggtgggatgcctgcatcacatggaacatctttggcgcatcgcagtggtggctctactggtcaaagagatgctcctggaagggttttcaaaaacagaaaaatgcctggacgcatgggtggtgtgcaacgcacagtgaagaatgtatgggtctatcaaatagacccagccaggaacttactgtatctgaagggccaggttcctggtcctcaaggtagctttattttcgttaaggattctatatataagaaacctgacacggctttgctcccatttcctacatacttcacgcgtgaaggtgagcctgaagacttggagcccctgattgctgatcttggtgatgttgacccattcatggcagccgattaagacaatgcacaaagttggttaattcctttttgtgttctaagcactccttgagctcgtccattccacgagattgtcaaactctcgatggatgtgagcagttcctgaatcacaagctttatccggttactggccagcctgatcaatgttgttccatgtacattacctggcaagtataccagtgctctaatggtttttagatgattgttttgattgaccgaatataacctttttctcaataagttgtacgcggagccacaagtagtatataaaatcagaatatttcactcatgagagtgtgttctggttttacgcgagctgcttatgttattgctagctgttagtttattacctgtcatttttactttctatttctaatacaaccttttctttttctaataatctttatttcaattcttctttttgtcgttttctatgtactattaacttctttcactgctcttgattactgtgtccagagctcaaacgtcatctattacgactcagggaatatatcataataacataaggc

SEQ ID NO: 75307 - DNA, 895 bp, Zea Mays
aagctttctcttgaacattctctgtgtttaatgcactggtcaaaagccatgatcagaaagaaaagcttgttacacttatacaacaaaaagaaattgtgggggatcttttcaaccagcttcgcctggctctgcagaggcgctctaattcacgtcctgcacagacgcttgctgcaacttgtatggatgaccaggagcttacggagagtatgcaaaagttgctcattgttatgcaaagattagatgaaaagatcgggccaatgctagaagcagatggagaacttttcaataaaagatggggttggttgtcacgtgctggtctatgggataagagtcatcttaccaggcaaattgaaaaatatgctgatatatacacatcaagggtttcaaattttctgcactatactccattcatgtatttccaatctcaagaacagacacttgcgcatgatgcccattcctattctggaggaaaggacatcaaagttcattgagcatccgttcgtcacaatctggagattaggcaggaaagagcgaacgtgatcattgtgattatggctgcgatggctacacaataacaattgtcgttttgaacaaattaattaatacaccttgtaagattgtatttatatataagtaaatctttagctatagcatgctgaatgattgttctgatagtcagtttgtttgtcgtggcctacctagagtttcatattgggaggcacagtacctgttttggtgtacctgctgctatttgcattgtatatgtgaaatgcgaagtgaagtatgacaaggtaacgataagtgacaaatcacgtcatttgatcctgcgcaagtcgatattatgtcttttaggttgcgtttggattgagcaaagttggataagatttgatcgacg

SEQ ID NO: 75308 - DNA, 1082 bp, Zea Mays
agagtttggatttggggaagaaaacaagggagctactccaacttttatggtggcttatattctggtggtagtgctcagatggttgagaaatcactagacattcatggggatgagatattatatgttggggaccatatttacacagatgtaagccagtcaaaagttcatttacgatggaggacggcattaatctgcagagaactagaagatgagtttaatgcactggtcaaaagccatgatcagaaagaaaagcttgttacacttatacaacaaaaagaaattgtgggggatcttttcaaccagcttcgcctggctctgcagaggcgctctaattcacgtcctgcacagacgcttgctgcaacttgtatggatgaccaggagcttacggagagtatgcaaaagttgctcattgttatgcaaagattagatgaaaagatcgggccaatgctagaagcagatggagaacttttcaataaaagatggggttggttgtcacgtgctggtctatgggataagagtcatcttaccaggcaaattgaaaaatatgctgatatatacacatcaagggtttcaaattttctgcactatactccattcatgtatttccaatctcaagaacagacacttgcgcatgatgcccattcctattctggaggaaaggacatcaaagttcattgagcatccgttcgtcacaatctggagattaggcaggaaagagcgaacgtgatcattgtgattatggctgcgatggctacacaataacaattgtcgttttgaacaaattaattaatacaccttgtaagattgtatttatatataagtaaatctttagctatagcatgctgaatgattgttctgatagtcagtttgtttgtcgtggcctacctagagtttcatattgggaggcacagtacctgttttggtgtacctgctgctatttgcattgtatatgtgaaatgcgaagtgaagtatgacaaggtaacgataagtgacaaatcacgtcatttgatcctgcgcaagtcgatattatgtcttttaggttgcgtttggattgagcaaagttggataagatttgatcgacg

SEQ ID NO: 75309 - DNA, 1133 bp, Zea Mays
gtctctgcaaggaagccagaatttttccagctttcacatccattgtatgaggttgtaacagatgatggactgatgcgtccctgttttaaagtaaattcaggtggcttatattctggtggtagtgctcagatggttgagaaatcactagacattcatggggatgagatattatatgttggggaccatatttacacagatgtaagccagtcaaaagttcatttacgatggaggacggcattaatctgcagagaactagaagatgagtttaatgcactggtcaaaagccatgatcagaaagaaaagcttgttacacttatacaacaaaaagaaattgtgggggatcttttcaaccagcttcgcctggctctgcagaggcgctctaattcacgtcctgcacagacgcttgctgcaacttgtatggatgaccaggagcttacggagagtatgcaaaagttgctcattgttatgcaaagattagatgaaaagatcgggccaatgctagaagcagatggagaacttttcaataaaagatggggttggttgtcacgtgctggtctatgggataagagtcatcttaccaggcaaattgaaaaatatgctgatatatacacatcaagggtttcaaattttctgcactatactccattcatgtatttccaatctcaagaacagacacttgcgcatgatgcccattcctattctggaggaaaggacatcaaagttcattgagcatccgttcgtcacaatctggagattaggcaggaaagagcgaacgtgatcattgtgattatggctgcgatggctacacaataacaattgtcgttttgaacaaattaattaatacaccttgtaagattgtatttatatataagtaaatctttagctatagcatgctgaatgattgttctgatagtcagtttgtttgtcgtggcctacctagagtttcatattgggaggcacagtacctgttttggtgtacctgctgctatttgcattgtatatgtgaaatgcgaagtgaagtatgacaaggtaacgataagtgacaaatcacgtcatttgatcctgcgcaagtcgatattatgtcttttaggttgcgtttggattgagcaaagttggataagatttgatcgacg

SEQ ID NO: 75310 - DNA, 1269 bp, Zea Mays
ccgtaaaaaggctggaaaaaagttgcttctcattactaattcagatttccattatacaaacaaaatgatgaatcatgcattcaatcgctttcttcctaatgatgtgggatggagagatctgtttgaaatggttatagtctctgcaaggaagccagaatttttccagctttcacatccattgtatgaggttgtaacagatgatggactgatgcgtccctgttttaaagtaaattcaggtggcttatattctggtggtagtgctcagatggttgagaaatcactagacattcatggggatgagatattatatgttggggaccatatttacacagatgtaagccagtcaaaagttcatttacgatggaggacggcattaatctgcagagaactagaagatgagtttaatgcactggtcaaaagccatgatcagaaagaaaagcttgttacacttatacaacaaaaagaaattgtgggggatcttttcaaccagcttcgcctggctctgcagaggcgctctaattcacgtcctgcacagacgcttgctgcaacttgtatggatgaccaggagcttacggagagtatgcaaaagttgctcattgttatgcaaagattagatgaaaagatcgggccaatgctagaagcagatggagaacttttcaataaaagatggggttggttgtcacgtgctggtctatgggataagagtcatcttaccaggcaaattgaaaaatatgctgatatatacacatcaagggtttcaaattttctgcactatactccattcatgtatttccaatctcaagaacagacacttgcgcatgatgcccattcctattctggaggaaaggacatcaaagttcattgagcatccgttcgtcacaatctggagattaggcaggaaagagcgaacgtgatcattgtgattatggctgcgatggctacacaataacaattgtcgttttgaacaaattaattaatacaccttgtaagattgtatttatatataagtaaatctttagctatagcatgctgaatgattgttctgatagtcagtttgtttgtcgtggcctacctagagtttcatattgggaggcacagtacctgttttggtgtacctgctgctatttgcattgtatatgtgaaatgcgaagtgaagtatgacaaggtaacgataagtgacaaatcacgtcatttgatcctgcgcaagtcgatattatgtcttttaggttgcgtttggattgagcaaagttggataagatttgatcgacg

SEQ ID NO: 75311 - DNA, 1921 bp, Zea Mays
ctcgagttcatgcggggaacagcaagtcaactttgcatggtcctattgaggagatagcttggaaagaagcgggagaagctgaaacattgcttcatgacttgggaattgcagacccgttttcagtaagacactctcctcgtggaattttctgcaccaggacactaaatcttcgatctatcagtgtagttggctacgatatggactatacattaattcattacaatgtgatggcctgggaaggacgtgcatatgactatgggatggacaacctcaagagcatgggttttccagtagatgaccttaaatttgaccctgacctggtcataagaggtcttgttattgataaagagaagggaaacttggttaaagctgatcgatttgggtacattaagagggccatgcatggtacccaaatgctttccactcgtgctgtgagtgaaatatatggaagagaattggtggacctgcggaaagaaattcgatgggagttccttaatacccttttctctgtttcagaagctgtcatgttcatgcaggctgtttccaaagcactttttcgagcacatgtagaaggccaacttaagagagaaataatggctgagcctgatcggtttgtagagcctgatccagaacttcctttagctcttcttgatcaaaaagaggctggaaaaaagttgcttctcattactaattcagatttccattatacaaacaaaatgatgaatcatgcattcaatcgctttcttcctaatgatgtgggatggagagatctgtttgaaatggttatagtctctgcaaggaagccagaatttttccagctttcacatccattgtatgaggttgtaacagatgatggactgatgcgtccctgttttaaagtaaattcaggtggcttatattctggtggtagtgctcagatggttgagaaatcactagacattcatggggatgagatattatatgttggggaccatatttacacagatgtaagccagtcaaaagttcatttacgatggaggacggcattaatctgcagagaactagaagatgagtttaatgcactggtcaaaagccatgatcagaaagaaaagcttgttacacttatacaacaaaaagaaattgtgggggatcttttcaaccagcttcgcctggctctgcagaggcgctctaattcacgtcctgcacagacgcttgctgcaacttgtatggatgaccaggagcttacggagagtatgcaaaagttgctcattgttatgcaaagattagatgaaaagatcgggccaatgctagaagcagatggagaacttttcaataaaagatggggttggttgtcacgtgctggtctatgggataagagtcatcttaccaggcaaattgaaaaatatgctgatatatacacatcaagggtttcaaattttctgcactatactccattcatgtatttccaatctcaagaacagacacttgcgcatgatgcccattcctattctggaggaaaggacatcaaagttcattgagcatccgttcgtcacaatctggagattaggcaggaaagagcgaacgtgatcattgtgattatggctgcgatggctacacaataacaattgtcgttttgaacaaattaattaatacaccttgtaagattgtatttatatataagtaaatctttagctatagcatgctgaatgattgttctgatagtcagtttgtttgtcgtggcctacctagagtttcatattgggaggcacagtacctgttttggtgtacctgctgctatttgcattgtatatgtgaaatgcgaagtgaagtatgacaaggtaacgataagtgacaaatcacgtcatttgatcctgcgcaagtcgatattatgtcttttaggttgcgtttggattgagcaaagttggataagatttgatcgacg

SEQ ID NO: 75312 - DNA, 2105 bp, Zea Mays
gtcgattctactctacccggtcctcgcttccccgttctgtcctcgcggtcgcgcaggcgtaccaaacagctagggccgggggccgcagccgcgcacacagcaagcaatggcggacgccgccgagatgggaacagcaagtcaactttgcatggtcctattgaggagatagcttggaaagaagcgggagaagctgaaacattgcttcatgacttgggaattgcagacccgttttcagtaagacactctcctcgtggaattttctgcaccaggacactaaatcttcgatctatcagtgtagttggctacgatatggactatacattaattcattacaatgtgatggcctgggaaggacgtgcatatgactatgggatggacaacctcaagagcatgggttttccagtagatgaccttaaatttgaccctgacctggtcataagaggtcttgttattgataaagagaagggaaacttggttaaagctgatcgatttgggtacattaagagggccatgcatggtacccaaatgctttccactcgtgctgtgagtgaaatatatggaagagaattggtggacctgcggaaagaaattcgatgggagttccttaatacccttttctctgtttcagaagctgtcatgttcatgcagatggttgacaagttagatcagggattggtgccagctgaacttgggccactggattacaaaggactgtacaatgctgtttccaaagcactttttcgagcacatgtagaaggccaacttaagagagaaataatggctgagcctgatcggtttgtagagcctgatccagaacttcctttagctcttcttgatcaaaaagaggctggaaaaaagttgcttctcattactaattcagatttccattatacaaacaaaatgatgaatcatgcattcaatcgctttcttcctaatgatgtgggatggagagatctgtttgaaatggttatagtctctgcaaggaagccagaatttttccagctttcacatccattgtatgaggttgtaacagatgatggactgatgcgtccctgttttaaagtaaattcaggtggcttatattctggtggtagtgctcagatggttgagaaatcactagacattcatggggatgagatattatatgttggggaccatatttacacagatgtaagccagtcaaaagttcatttacgatggaggacggcattaatctgcagagaactagaagatgagtttaatgcactggtcaaaagccatgatcagaaagaaaagcttgttacacttatacaacaaaaagaaattgtgggggatcttttcaaccagcttcgcctggctctgcagaggcgctctaattcacgtcctgcacagacgcttgctgcaacttgtatggatgaccaggagcttacggagagtatgcaaaagttgctcattgttatgcaaagattagatgaaaagatcgggccaatgctagaagcagatggagaacttttcaataaaagatggggttggttgtcacgtgctggtctatgggataagagtcatcttaccaggcaaattgaaaaatatgctgatatatacacatcaagggtttcaaattttctgcactatactccattcatgtatttccaatctcaagaacagacacttgcgcatgatgcccattcctattctggaggaaaggacatcaaagttcattgagcatccgttcgtcacaatctggagattaggcaggaaagagcgaacgtgatcattgtgattatggctgcgatggctacacaataacaattgtcgttttgaacaaattaattaatacaccttgtaagattgtatttatatataagtaaatctttagctatagcatgctgaatgattgttctgatagtcagtttgtttgtcgtggcctacctagagtttcatattgggaggcacagtacctgttttggtgtacctgctgctatttgcattgtatatgtgaaatgcgaagtgaagtatgacaaggtaacgataagtgacaaatcacgtcatttgatcctgcgcaagtcgatattatgtcttttaggttgcgtttggattgagcaaagttggataagatttgatcgacg

SEQ ID NO: 75313 - DNA, 2292 bp, Zea Mays
gtcgattctactctacccggtcctcgcttccccgttctgtcctcgcggtcgcgcaggcgtaccaaacagctagggccgggggccgcagccgcgcacacagcaagcaatggcggacgccgccgagatggtgcgcctcctctatctccagaccccgccgcggccgttgctcccgcagttcgctgtacatacacatcggccacaaagtctgctcagagtttccccccgcttccgccctcccatccgtcttcggtgccgcgcgctcgacgccagtagaccggttgcggtggagggggagcgggatgaggaggacggtctcgaggacgaggaggagtcctacttctcggtcacctcgtcggggctctcggaggtggactacctaggggaaagcaccaggggggatttgaacgtgaggagggagcgcctcgaggcgcttgggaacagcaagtcaactttgcatggtcctattgaggagatagcttggaaagaagcgggagaagctgaaacattgcttcatgacttgggaattgcagcctgggaaggacgtgcatatgactatgggatggacaacctcaagagcatgggttttccagtagatgaccttaaatttgaccctgacctggtcataagaggtcttgttattgataaagagaagggaaacttggttaaagctgatcgatttgggtacattaagagggccatgcatggtacccaaatgctttccactcgtgctgtgagtgaaatatatggaagagaattggtggacctgcggaaagaaattcgatgggagttccttaatacccttttctctgtttcagaagctgtcatgttcatgcagatggttgacaagttagatcagggattggtgccagctgaacttgggccactggattacaaaggactgtacaatgctgtttccaaagcactttttcgagcacatgtagaaggccaacttaagagagaaataatggctgagcctgatcggtttgtagagcctgatccagaacttcctttagctcttcttgatcaaaaagaggctggaaaaaagttgcttctcattactaattcagatttccattatacaaacaaaatgatgaatcatgcattcaatcgctttcttcctaatgatgtgggatggagagatctgtttgaaatggttatagtctctgcaaggaagccagaatttttccagctttcacatccattgtatgaggttgtaacagatgatggactgatgcgtccctgttttaaagtaaattcaggtggcttatattctggtggtagtgctcagatggttgagaaatcactagacattcatggggatgagatattatatgttggggaccatatttacacagatgtaagccagtcaaaagttcatttacgatggaggacggcattaatctgcagagaactagaagatgagtttaatgcactggtcaaaagccatgatcagaaagaaaagcttgttacacttatacaacaaaaagaaattgtgggggatcttttcaaccagcttcgcctggctctgcagaggcgctctaattcacgtcctgcacagacgcttgctgcaacttgtatggatgaccaggagcttacggagagtatgcaaaagttgctcattgttatgcaaagattagatgaaaagatcgggccaatgctagaagcagatggagaacttttcaataaaagatggggttggttgtcacgtgctggtctatgggataagagtcatcttaccaggcaaattgaaaaatatgctgatatatacacatcaagggtttcaaattttctgcactatactccattcatgtatttccaatctcaagaacagacacttgcgcatgatgcccattcctattctggaggaaaggacatcaaagttcattgagcatccgttcgtcacaatctggagattaggcaggaaagagcgaacgtgatcattgtgattatggctgcgatggctacacaataacaattgtcgttttgaacaaattaattaatacaccttgtaagattgtatttatatataagtaaatctttagctatagcatgctgaatgattgttctgatagtcagtttgtttgtcgtggcctacctagagtttcatattgggaggcacagtacctgttttggtgtacctgctgctatttgcattgtatatgtgaaatgcgaagtgaagtatgacaaggtaacgataagtgacaaatcacgtcatttgatcctgcgcaagtcgatattatgtcttttaggttgcgtttggattgagcaaagttggataagatttgatcgacg

SEQ ID NO: 75314 - DNA, 2057 bp, Zea Mays
gtcgattctactctacccggtcctcgcttccccgttctgtcctcgcggtcgcgcaggcgtaccaaacagctagggccgggggccgcagccgcgcacacagcaagcaatggcggacgccgccgagatgggaacagcaagtcaactttgcatggtcctattgaggagatagcttggaaagaagcgggagaagctgaaacattgcttcatgacttgggaattgcagacccgttttcagtaagacactctcctcgtggaattttctgcaccaggacactaaatcttcgatctatcagtgcctgggaaggacgtgcatatgactatgggatggacaacctcaagagcatgggttttccagtagatgaccttaaatttgaccctgacctggtcataagaggtcttgttattgataaagagaagggaaacttggttaaagctgatcgatttgggtacattaagagggccatgcatggtacccaaatgctttccactcgtgctgtgagtgaaatatatggaagagaattggtggacctgcggaaagaaattcgatgggagttccttaatacccttttctctgtttcagaagctgtcatgttcatgcagatggttgacaagttagatcagggattggtgccagctgaacttgggccactggattacaaaggactgtacaatgctgtttccaaagcactttttcgagcacatgtagaaggccaacttaagagagaaataatggctgagcctgatcggtttgtagagcctgatccagaacttcctttagctcttcttgatcaaaaagaggctggaaaaaagttgcttctcattactaattcagatttccattatacaaacaaaatgatgaatcatgcattcaatcgctttcttcctaatgatgtgggatggagagatctgtttgaaatggttatagtctctgcaaggaagccagaatttttccagctttcacatccattgtatgaggttgtaacagatgatggactgatgcgtccctgttttaaagtaaattcaggtggcttatattctggtggtagtgctcagatggttgagaaatcactagacattcatggggatgagatattatatgttggggaccatatttacacagatgtaagccagtcaaaagttcatttacgatggaggacggcattaatctgcagagaactagaagatgagtttaatgcactggtcaaaagccatgatcagaaagaaaagcttgttacacttatacaacaaaaagaaattgtgggggatcttttcaaccagcttcgcctggctctgcagaggcgctctaattcacgtcctgcacagacgcttgctgcaacttgtatggatgaccaggagcttacggagagtatgcaaaagttgctcattgttatgcaaagattagatgaaaagatcgggccaatgctagaagcagatggagaacttttcaataaaagatggggttggttgtcacgtgctggtctatgggataagagtcatcttaccaggcaaattgaaaaatatgctgatatatacacatcaagggtttcaaattttctgcactatactccattcatgtatttccaatctcaagaacagacacttgcgcatgatgcccattcctattctggaggaaaggacatcaaagttcattgagcatccgttcgtcacaatctggagattaggcaggaaagagcgaacgtgatcattgtgattatggctgcgatggctacacaataacaattgtcgttttgaacaaattaattaatacaccttgtaagattgtatttatatataagtaaatctttagctatagcatgctgaatgattgttctgatagtcagtttgtttgtcgtggcctacctagagtttcatattgggaggcacagtacctgttttggtgtacctgctgctatttgcattgtatatgtgaaatgcgaagtgaagtatgacaaggtaacgataagtgacaaatcacgtcatttgatcctgcgcaagtcgatattatgtcttttaggttgcgtttggattgagcaaagttggataagatttgatcgacg

SEQ ID NO: 75315 - DNA, 2098 bp, Zea Mays
gtcgattctactctacccggtcctcgcttccccgttctgtcctcgcggtcgcgcaggcgtaccaaacagctagggccgggggccgcagccgcgcacacagcaagcaatggcggacgccgccgagatgcaagtcaactttgcatggtcctattgaggagatagcttggaaagaagcgggagaagctgaaacattgcttcatgacttgggaattgcagacccgttttcagtaagacactctcctcgtggaattttctgcaccaggacactaaatcttcgatctatcagtgtagttggctacgatatggactatacattaattcattacaatgtgatggcctgggaaggacgtgcatatgactatgggatggacaacctcaagagcatgggttttccagtagatgaccttaaatttgaccctgacctggtcataagaggtcttgttattgataaagagaagggaaacttggttaaagctgatcgatttgggtacattaagagggccatgcatggtacccaaatgctttccactcgtgctgtgagtgaaatatatggaagagaattggtggacctgcggaaagaaattcgatgggagttccttaatacccttttctctgtttcagaagctgtcatgttcatgcagatggttgacaagttagatcagggattggtgccagctgaacttgggccactggattacaaaggactgtacaatgctgtttccaaagcactttttcgagcacatgtagaaggccaacttaagagagaaataatggctgagcctgatcggtttgtagagcctgatccagaacttcctttagctcttcttgatcaaaaagaggctggaaaaaagttgcttctcattactaattcagatttccattatacaaacaaaatgatgaatcatgcattcaatcgctttcttcctaatgatgtgggatggagagatctgtttgaaatggttatagtctctgcaaggaagccagaatttttccagctttcacatccattgtatgaggttgtaacagatgatggactgatgcgtccctgttttaaagtaaattcaggtggcttatattctggtggtagtgctcagatggttgagaaatcactagacattcatggggatgagatattatatgttggggaccatatttacacagatgtaagccagtcaaaagttcatttacgatggaggacggcattaatctgcagagaactagaagatgagtttaatgcactggtcaaaagccatgatcagaaagaaaagcttgttacacttatacaacaaaaagaaattgtgggggatcttttcaaccagcttcgcctggctctgcagaggcgctctaattcacgtcctgcacagacgcttgctgcaacttgtatggatgaccaggagcttacggagagtatgcaaaagttgctcattgttatgcaaagattagatgaaaagatcgggccaatgctagaagcagatggagaacttttcaataaaagatggggttggttgtcacgtgctggtctatgggataagagtcatcttaccaggcaaattgaaaaatatgctgatatatacacatcaagggtttcaaattttctgcactatactccattcatgtatttccaatctcaagaacagacacttgcgcatgatgcccattcctattctggaggaaaggacatcaaagttcattgagcatccgttcgtcacaatctggagattaggcaggaaagagcgaacgtgatcattgtgattatggctgcgatggctacacaataacaattgtcgttttgaacaaattaattaatacaccttgtaagattgtatttatatataagtaaatctttagctatagcatgctgaatgattgttctgatagtcagtttgtttgtcgtggcctacctagagtttcatattgggaggcacagtacctgttttggtgtacctgctgctatttgcattgtatatgtgaaatgcgaagtgaagtatgacaaggtaacgataagtgacaaatcacgtcatttgatcctgcgcaagtcgatattatgtcttttaggttgcgtttggattgagcaaagttggataagatttgatcgacg

SEQ ID NO: 75316 - DNA, 2340 bp, Zea Mays
gtcgattctactctacccggtcctcgcttccccgttctgtcctcgcggtcgcgcaggcgtaccaaacagctagggccgggggccgcagccgcgcacacagcaagcaatggcggacgccgccgagatggtgcgcctcctctatctccagaccccgccgcggccgttgctcccgcagttcgctgtacatacacatcggccacaaagtctgctcagagtttccccccgcttccgccctcccatccgtcttcggtgccgcgcgctcgacgccagtagaccggttgcggtggagggggagcgggatgaggaggacggtctcgaggacgaggaggagtcctacttctcggtcacctcgtcggggctctcggaggtggactacctaggggaaagcaccaggggggatttgaacgtgaggagggagcgcctcgaggcgcttgggaacagcaagtcaactttgcatggtcctattgaggagatagcttggaaagaagcgggagaagctgaaacattgcttcatgacttgggaattgcagacccgttttcagtaagacactctcctcgtggaattttctgcaccaggacactaaatcttcgatctatcagtgtagttggctacgatatggactatacattaattcattacaatgtgatggcctgggaaggacgtgcatatgactatgggatggacaacctcaagagcatgggttttccagtagatgaccttaaatttgaccctgacctggtcataagaggtcttgttattgataaagagaagggaaacttggttaaagctgatcgatttgggtacattaagagggccatgcatggtacccaaatgctttccactcgtgctgtgagtgaaatatatggaagagaattggtggacctgcggaaagaaattcgatgggagttccttaatacccttttctctgtttcagaagctgtcatgttcatgcaggctgtttccaaagcactttttcgagcacatgtagaaggccaacttaagagagaaataatggctgagcctgatcggtttgtagagcctgatccagaacttcctttagctcttcttgatcaaaaagaggctggaaaaaagttgcttctcattactaattcagatttccattatacaaacaaaatgatgaatcatgcattcaatcgctttcttcctaatgatgtgggatggagagatctgtttgaaatggttatagtctctgcaaggaagccagaatttttccagctttcacatccattgtatgaggttgtaacagatgatggactgatgcgtccctgttttaaagtaaattcaggtggcttatattctggtggtagtgctcagatggttgagaaatcactagacattcatggggatgagatattatatgttggggaccatatttacacagatgtaagccagtcaaaagttcatttacgatggaggacggcattaatctgcagagaactagaagatgagtttaatgcactggtcaaaagccatgatcagaaagaaaagcttgttacacttatacaacaaaaagaaattgtgggggatcttttcaaccagcttcgcctggctctgcagaggcgctctaattcacgtcctgcacagacgcttgctgcaacttgtatggatgaccaggagcttacggagagtatgcaaaagttgctcattgttatgcaaagattagatgaaaagatcgggccaatgctagaagcagatggagaacttttcaataaaagatggggttggttgtcacgtgctggtctatgggataagagtcatcttaccaggcaaattgaaaaatatgctgatatatacacatcaagggtttcaaattttctgcactatactccattcatgtatttccaatctcaagaacagacacttgcgcatgatgcccattcctattctggaggaaaggacatcaaagttcattgagcatccgttcgtcacaatctggagattaggcaggaaagagcgaacgtgatcattgtgattatggctgcgatggctacacaataacaattgtcgttttgaacaaattaattaatacaccttgtaagattgtatttatatataagtaaatctttagctatagcatgctgaatgattgttctgatagtcagtttgtttgtcgtggcctacctagagtttcatattgggaggcacagtacctgttttggtgtacctgctgctatttgcattgtatatgtgaaatgcgaagtgaagtatgacaaggtaacgataagtgacaaatcacgtcatttgatcctgcgcaagtcgatattatgtcttttaggttgcgtttggattgagcaaagttggataagatttgatcgacg

SEQ ID NO: 75317 - DNA, 1732 bp, Zea Mays
ctactgttaagtcattcaaaacttgagatgcggcttacttttttttacaattcatgttttcagattgacctttcaattttcttagtaataaaaatgtataggcagtgcactgatgttctgattctaatctgtcttgtgttgcctgttttataccgagataactagttacagaatggctctcgagtgtgccagaaatgctttgctacaaaataccatggacaacaaagaaaatacagataagttcagagctgatctcatgaatattgctatgactactcttagttcaaaaatactttcccaagacaaggagtactttgctgaacttgcggttgatgctgtcttgaggcttaagggtagcaccaacttggaatctattcaaattctgaagaaacctggaggatctctcaaggattcatttttggacgaaggattcattcttgacaagaaaattggcatcgggcagccaaagcggattgagaatgccaaaattttggttgcaaacactgctatggacacagataaagttaagatatatggagcacaggtccgggtggattcaatgtctaaggttgcagacattgaagctgctgagaagcagaaaatgagagagaaagtccaaaagatcatagctcacggaatcaactgtttcatcaacaggcagttaatctataacttccctgaggaactctttgctgacgctggcatacttgcaattgagcatgctgactttgagggcattgaacgtctggctcttgttactggtggtgagatcgcatcaacttttgataatccagattctgttaagcttggtcactgcaaggtaattgaagagatcatgattggggaggacaggttaattcatttctctggggtcgcgatggggcaggcttgcaccattgtcttaaggggggctagtgagcatgtgcttgatgaggcagagaggtccttgcatgatgccttgtgtgtgctgtcccagacagtaaatgatacccgtgtcttgtttggaggcggttggcctgagatgctgatggctaaagaagtggatgaacttgcaaggaagacccctgggaagagatctcatgctatcgatgctttctcccacgctctgcaagccatcccaacaatcatagctgacaatgctggtttggacagcgctgagttgatctctcagctccgagctgagcaccacaaagagaactgcactgctggaatcgatgtcatcactggcaccgttggggacatgcaaaggctggggattcaagagtcgttcaaggtgaagcaggccatactcctgtctgcgacggaggccgcggagatgatcctcagggtcgatgagatcataagctgtgccccacgcagaagagaggataggatgtgattagacacgctgtttctcggtgtagtggggatgcttgttaccctagttttgatggtggttctggggcgttcaagttggtcacatttcaagtgtttttggctcctaagaacctagtaattgttatttcgttgaaacaaccaaccgtaggcttttttttttctagattctcatgatgtaccatttggtagcgaagttcttcctctgttcttttttatgtgtcgagttttagtttaaaactagacaacaaatattcgataatggaggtagtacattgtttacgatatgcttgtgccatgtgcctctacatgttctcctattccttttgacgtaggaatgactagcttgtctttgttt

SEQ ID NO: 75318 - DNA, 2152 bp, Zea Mays
ctcagtagcagcggcatctccatccagaccccggtcggctagccccaacgccgccgccgccgccgccgcccgccgctcggggattgcctgctttcctctgccgaccacatctacaccgcacaactggtccttccaagtgagcttcaatcccctgcgtgtagatggagagggttctcaaggatgacgccgtcgaggagaagggcgaccgcgccagaatggcatcgtttgttggggccatggcaatctcggatttggcgaagaccacattgggtccaaaaggaatggacaagatcctgcaatcaactggtagagggcgtaatgttactgttacaaatgatggggctaccattttgaagtcacttcacattgacaatcctgctgcaaaggtccttgttgacatctcaaaagttcaagatgatgaagttggtgatgggacaacttctgttgttgttctagctggagaacttttgaaggaggctgagaagttaattaacatgaaaattcatccgatgactattattgcagggtcttgcttgcatcaatctcatagtaacaaatcaaatagatcaagcatacaatacaaggttacagaatggctctcgagtgtgccagaaatgctttgctacaaaataccatggacaacaaagaaaatacagataagttcagagctgatctcatgaatattgctatgactactcttagttcaaaaatactttcccaagacaaggagtactttgctgaacttgcggttgatgctgtcttgaggcttaagggtagcaccaacttggaatctattcaaattctgaagaaacctggaggatctctcaaggattcatttttggacgaaggattcattcttgacaagaaaattggcatcgggcagccaaagcggattgagaatgccaaaattttggttgcaaacactgctatggacacagataaagttaagatatatggagcacaggtccgggtggattcaatgtctaaggttgcagacattgaagctgctgagaagcagaaaatgagagagaaagtccaaaagatcatagctcacggaatcaactgtttcatcaacaggcagttaatctataacttccctgaggaactctttgctgacgctggcatacttgcaattgagcatgctgactttgagggcattgaacgtctggctcttgttactggtggtgagatcgcatcaacttttgataatccagattctgttaagcttggtcactgcaaggtaattgaagagatcatgattggggaggacaggttaattcatttctctggggtcgcgatggggcaggcttgcaccattgtcttaaggggggctagtgagcatgtgcttgatgaggcagagaggtccttgcatgatgccttgtgtgtgctgtcccagacagtaaatgatacccgtgtcttgtttggaggcggttggcctgagatgctgatggctaaagaagtggatgaacttgcaaggaagacccctgggaagagatctcatgctatcgatgctttctcccacgctctgcaagccatcccaacaatcatagctgacaatgctggtttggacagcgctgagttgatctctcagctccgagctgagcaccacaaagagaactgcactgctggaatcgatgtcatcactggcaccgttggggacatgcaaaggctggggattcaagagtcgttcaaggtgaagcaggccatactcctgtctgcgacggaggccgcggagatgatcctcagggtcgatgagatcataagctgtgccccacgcagaagagaggataggatgtgattagacacgctgtttctcggtgtagtggggatgcttgttaccctagttttgatggtggttctggggcgttcaagttggtcacatttcaagtgtttttggctcctaagaacctagtaattgttatttcgttgaaacaaccaaccgtaggcttttttttttctagattctcatgatgtaccatttggtagcgaagttcttcctctgttcttttttatgtgtcgagttttagtttaaaactagacaacaaatattcgataatggaggtagtacattgtttacgatatgcttgtgccatgtgcctctacatgttctcctattccttttgacgtaggaatgactagcttgtctttgttt

SEQ ID NO: 75319 - DNA, 2096 bp, Zea Mays
atttgattctcagtagcagcggcatctccatccagaccccggtcggctagccccaacgccgccgccgccgccgccgcccgccgctcggggattgcctgctttcctctgccgaccacatctacaccgcacaactggtccttccaagtgagcttcaatcccctgcgtgtagatggagagggttctcaaggatgacgccgtcgaggagaagggcgaccgcgccagaatggcatcgtttgttggggccatggcaatctcggatttggcgaagaccacattgggtccaaaaggaatggacaagatcctgcaatcaactggtagagggcgtaatgttactgttacaaatgatggggctaccattttgaagtcacttcacattgacaatcctgctgcaaaggtccttgttgacatctcaaaagttcaagatgatgaagttggtgatgggacaacttctgttgttgttctagctggagaacttttgaaggaggctgagaagttaattaacatgaaaattcatccgatgactattattgcaggttacagaatggctctcgagtgtgccagaaatgctttgctacaaaataccatggacaacaaagaaaatacagataagttcagagctgatctcatgaatattgctatgactactcttagttcaaaaatactttcccaagacaaggagtactttgctgaacttgcggttgatgctgtcttgaggcttaagcaccaacttggaatctattcaaattctgaagaaacctggaggatctctcaaggattcatttttggacgaaggattcattcttgacaagaaaattggcatcgggcagccaaagcggattgagaatgccaaaattttggttgcaaacactgctatggacacagataaagttaagatatatggagcacaggtccgggtggattcaatgtctaaggttgcagacattgaagctgctgagaagcagaaaatgagagagaaagtccaaaagatcatagctcacggaatcaactgtttcatcaacaggcagttaatctataacttccctgaggaactctttgctgacgctggcatacttgcaattgagcatgctgactttgagggcattgaacgtctggctcttgttactggtggtgagatcgcatcaacttttgataatccagattctgttaagcttggtcactgcaaggtaattgaagagatcatgattggggaggacaggttaattcatttctctggggtcgcgatggggcaggcttgcaccattgtcttaaggggggctagtgagcatgtgcttgatgaggcagagaggtccttgcatgatgccttgtgtgtgctgtcccagacagtaaatgatacccgtgtcttgtttggaggcggttggcctgagatgctgatggctaaagaagtggatgaacttgcaaggaagacccctgggaagagatctcatgctatcgatgctttctcccacgctctgcaagccatcccaacaatcatagctgacaatgctggtttggacagcgctgagttgatctctcagctccgagctgagcaccacaaagagaactgcactgctggaatcgatgtcatcactggcaccgttggggacatgcaaaggctggggattcaagagtcgttcaaggtgaagcaggccatactcctgtctgcgacggaggccgcggagatgatcctcagggtcgatgagatcataagctgtgccccacgcagaagagaggataggatgtgattagacacgctgtttctcggtgtagtggggatgcttgttaccctagttttgatggtggttctggggcgttcaagttggtcacatttcaagtgtttttggctcctaagaacctagtaattgttatttcgttgaaacaaccaaccgtaggcttttttttttctagattctcatgatgtaccatttggtagcgaagttcttcctctgttcttttttatgtgtcgagttttagtttaaaactagacaacaaatattcgataatggaggtagtacattgtttacgatatgcttgtgccatgtgcctctacatgttctcctattccttttgacgtaggaatgactagcttgtctttgttt

SEQ ID NO: 75320 - DNA, 2175 bp, Zea Mays
atttgattctcagtagcagcggcatctccatccagaccccggtcggctagccccaacgccgccgccgccgccgccgcccgccgctcggggattgcctgctttcctctgccgaccacatctacaccgcacaactggtccttccaagtgagcttcaatcccctgcgtgtagatggagagggttctcaaggatgacgccgtcgaggagaagggcgaccgcgccagaatggcatcgtttgttggggccatggcaatctcggatttggcgaagaccacattgggtccaaaaggaatggacaagatcctgcaatcaactggtagagggcgtaatgttactgttacaaatgatggggctaccattttgaagtcacttcacattgacaatcctgctgcaaaggtccttgttgacatctcaaaagttcaagatgatgaagttggtgatgggacaacttctgttgttgttctagctggagaacttttgaaggaggctgagaagttaattaacatgaaaattcatccgatgactattattgcagcatgccatgttactaggtcttgcttgcatcaatctcatagtaacaaatcaaatagatcaagcatacaatacaaggttacagaatggctctcgagtgtgccagaaatgctttgctacaaaataccatggacaacaaagaaaatacagataagttcagagctgatctcatgaatattgctatgactactcttagttcaaaaatactttcccaagacaaggagtactttgctgaacttgcggttgatgctgtcttgaggcttaagggtagcaccaacttggaatctattcaaattctgaagaaacctggaggatctctcaaggattcatttttggacgaaggattcattcttgacaagaaaattggcatcgggcagccaaagcggattgagaatgccaaaattttggttgcaaacactgctatggacacagataaagttaagatatatggagcacaggtccgggtggattcaatgtctaaggttgcagacattgaagctgctgagaagcagaaaatgagagagaaagtccaaaagatcatagctcacggaatcaactgtttcatcaacaggcagttaatctataacttccctgaggaactctttgctgacgctggcatacttgcaattgagcatgctgactttgagggcattgaacgtctggctcttgttactggtggtgagatcgcatcaacttttgataatccagattctgttaagcttggtcactgcaaggtaattgaagagatcatgattggggaggacaggttaattcatttctctggggtcgcgatggggcaggcttgcaccattgtcttaaggggggctagtgagcatgtgcttgatgaggcagagaggtccttgcatgatgccttgtgtgtgctgtcccagacagtaaatgatacccgtgtcttgtttggaggcggttggcctgagatgctgatggctaaagaagtggatgaacttgcaaggaagacccctgggaagagatctcatgctatcgatgctttctcccacgctctgcaagccatcccaacaatcatagctgacaatgctggtttggacagcgctgagttgatctctcagctccgagctgagcaccacaaagagaactgcactgctggaatcgatgtcatcactggcaccgttggggacatgcaaaggctggggattcaagagtcgttcaaggtgaagcaggccatactcctgtctgcgacggaggccgcggagatgatcctcagggtcgatgagatcataagctgtgccccacgcagaagagaggataggatgtgattagacacgctgtttctcggtgtagtggggatgcttgttaccctagttttgatggtggttctggggcgttcaagttggtcacatttcaagtgtttttggctcctaagaacctagtaattgttatttcgttgaaacaaccaaccgtaggcttttttttttctagattctcatgatgtaccatttggtagcgaagttcttcctctgttcttttttatgtgtcgagttttagtttaaaactagacaacaaatattcgataatggaggtagtacattgtttacgatatgcttgtgccatgtgcctctacatgttctcctattccttttgacgtaggaatgactagcttgtctttgttt

SEQ ID NO: 75321 - DNA, 2031 bp, Zea Mays
cccacggtatgtgcaggtatttgattctcagtagcagcggcatctccatccagaccccggtcggctagccccaacgccgccgccgccgccgccgcccgccgctcggggattgcctgctttcctctgccgaccacatctacaccgcacaactggtccttccaagtgagcttcaatcccctgcgtgtagatggagagggttctcaaggatgacgccgtcgaggagaagggcgaccgcgccagaatggcatcgtttgttggggccatggcaatctcggatttggcgaagaccacattgggtccaaaaggaatggacaagatcctgcaatcaactggtagagggcgtaatgttactgttacaaatgatggggctaccattttgaagtcacttcacattgacaatcctgctgcaaaggtccttgttgacatctcaaaagttcaagatgatgaagttggtgatgggacaacttctgttgttgttctagctggagaacttttgaaggaggctgagaagttaattaacatgaaaattcatccgatgactattattgcaggttacagaatggctctcgagtgtgccagaaatgctttgctacaaaataccatggacaacaaagaaaatacagataagttcagagctgatctcatgaatattgctatgactactcttagttcaaaaatactttcccaagacaaggagtactttgctgaacttgcggttgatgctgtcttgaggcttaagggtagcaccaacttggaatctattcaaattctgaagaaacctggaggatctctcaaggattcatttttggacgaaggattcattcttgacaagaaaattggcatcgggcagccaaagcggattgagaatgccaaaattttggttgcaaacactgctatggacacagataaagttaagatatatggagcacaggtccgggtggattcaatgtctaaggttgcagacattgaagctgctgagaagcagaaaatgagagagaaagtccaaaagatcatagctcacggaatcaactgtttcatcaacaggcagttaatctataacttccctgaggaactctttgctgacgctggcatacttgcaattgagcatgctgactttgagggcattgaacgtctggctcttgttactggtggttaattcatttctctggggtcgcgatggggcaggcttgcaccattgtcttaaggggggctagtgagcatgtgcttgatgaggcagagaggtccttgcatgatgccttgtgtgtgctgtcccagacagtaaatgatacccgtgtcttgtttggaggcggttggcctgagatgctgatggctaaagaagtggatgaacttgcaaggaagacccctgggaagagatctcatgctatcgatgctttctcccacgctctgcaagccatcccaacaatcatagctgacaatgctggtttggacagcgctgagttgatctctcagctccgagctgagcaccacaaagagaactgcactgctggaatcgatgtcatcactggcaccgttggggacatgcaaaggctggggattcaagagtcgttcaaggtgaagcaggccatactcctgtctgcgacggaggccgcggagatgatcctcagggtcgatgagatcataagctgtgccccacgcagaagagaggataggatgtgattagacacgctgtttctcggtgtagtggggatgcttgttaccctagttttgatggtggttctggggcgttcaagttggtcacatttcaagtgtttttggctcctaagaacctagtaattgttatttcgttgaaacaaccaaccgtaggcttttttttttctagattctcatgatgtaccatttggtagcgaagttcttcctctgttcttttttatgtgtcgagttttagtttaaaactagacaacaaatattcgataatggaggtagtacattgtttacgatatgcttgtgccatgtgcctctacatgttctcctattccttttgacgtaggaatgactagcttgtctttgttt

SEQ ID NO: 75322 - DNA, 2177 bp, Zea Mays
cccacggtatgtgcaggtatttgattctcagtagcagcggcatctccatccagaccccggtcggctagccccaacgccgccgccgccgccgccgcccgccgctcggggattgcctgctttcctctgccgaccacatctacaccgcacaactggtccttccaagtgagcttcaatcccctgcgtgtagatggagagggttctcaaggatgacgccgtcgaggagaagggcgaccgcgccagaatggcatcgtttgttggggccatggcaatctcggatttggcgaagaccacattgggtccaaaaggaatggacaagatcctgcaatcaactggtagagggcgtaatgttactgttacaaatgatggggctaccattttgaagtcacttcacattgacaatcctgctgcaaaggtccttgttgacatctcaaaagttcaagatgatgaagttggtgatgggacaacttctgttgttgttctagctggagaacttttgaaggaggctgagaagttaattaacatgaaaattcatccgatgactattattgcaggtcttgcttgcatcaatctcatagtaacaaatcaaatagatcaagcatacaatacaaggttacagaatggctctcgagtgtgccagaaatgctttgctacaaaataccatggacaacaaagaaaatacagataagttcagagctgatctcatgaatattgctatgactactcttagttcaaaaatactttcccaagacaaggagtactttgctgaacttgcggttgatgctgtcttgaggcttaagggtagcaccaacttggaatctattcaaattctgaagaaacctggaggatctctcaaggattcatttttggacgaaggattcattcttgacaagaaaattggcatcgggcagccaaagcggattgagaatgccaaaattttggttgcaaacactgctatggacacagataaagttaagatatatggagcacaggtccgggtggattcaatgtctaaggttgcagacattgaagctgctgagaagcagaaaatgagagagaaagtccaaaagatcatagctcacggaatcaactgtttcatcaacaggcagttaatctataacttccctgaggaactctttgctgacgctggcatacttgcaattgagcatgctgactttgagggcattgaacgtctggctcttgttactggtggtgagatcgcatcaacttttgataatccagattctgttaagcttggtcactgcaaggtaattgaagagatcatgattggggaggacaggttaattcatttctctggggtcgcgatggggcaggcttgcaccattgtcttaaggggggctagtgagcatgtgcttgatgaggcagagaggtccttgcatgatgccttgtgtgtgctgtcccagacagtaaatgatacccgtgtcttgtttggaggcggttggcctgagatgctgatggctaaagaagtggatgaacttgcaaggaagacccctgggaagagatctcatgctatcgatgctttctcccacgctctgcaagccatcccaacaatcatagctgacaatgctggtttggacagcgctgagttgatctctcagctccgagctgagcaccacaaagagaactgcactgctggaatcgatgtcatcactggcaccgttggggacatgcaaaggctggggattcaagagtcgttcaaggtgaagcaggccatactcctgtctgcgacggaggccgcggagatgatcctcagggtcgatgagatcataagctgtgccccacgcagaagagaggataggatgtgattagacacgctgtttctcggtgtagtggggatgcttgttaccctagttttgatggtggttctggggcgttcaagttggtcacatttcaagtgtttttggctcctaagaacctagtaattgttatttcgttgaaacaaccaaccgtaggcttttttttttctagattctcatgatgtaccatttggtagcgaagttcttcctctgttcttttttatgtgtcgagttttagtttaaaactagacaacaaatattcgataatggaggtagtacattgtttacgatatgcttgtgccatgtgcctctacatgttctcctattccttttgacgtaggaatgactagcttgtctttgttt

SEQ ID NO: 75323 - DNA, 2151 bp, Zea Mays
aaaaaatctatttagcccatgaaaccgctacagccggcccagcccacggtatgtgcaggtatttgattctcagtagcagcggcatctccatccagaccccggtcggctagccccaacgccgccgccgccgccgccgcccgccgctcggggattgcctgctttcctctgccgaccacatctacaccgcacaactggtccttccaagtgagcttcaatcccctgcgtgtagatggagagggttctcaaggatgacgccgtcgaggagaagggcgaccgcgccagaatggcatcgtttgttggggccatggcaatctcggatttggcgaagaccacattgggtccaaaaggaatggacaagatcctgcaatcaactggtagagggcgtaatgttactgttacaaatgatggggctaccattttgaagtcacttcacattgacaatcctgctgcaaagacatctcaaaagttcaagatgatgaagttggtgatgggacaacttctgttgttgttctagctggagaacttttgaaggaggctgagaagttaattaacatgaaaattcatccgatgactattattgcaggttacagaatggctctcgagtgtgccagaaatgctttgctacaaaataccatggacaacaaagaaaatacagataagttcagagctgatctcatgaatattgctatgactactcttagttcaaaaatactttcccaagacaaggagtactttgctgaacttgcggttgatgctgtcttgaggcttaagggtagcaccaacttggaatctattcaaattctgaagaaacctggaggatctctcaaggattcatttttggacgaaggattcattcttgacaagaaaattggcatcgggcagccaaagcggattgagaatgccaaaattttggttgcaaacactgctatggacacagataaagttaagatatatggagcacaggtccgggtggattcaatgtctaaggttgcagacattgaagctgctgagaagcagaaaatgagagagaaagtccaaaagatcatagctcacggaatcaactgtttcatcaacaggcagttaatctataacttccctgaggaactctttgctgacgctggcatacttgcaattgagcatgctgactttgagggcattgaacgtctggctcttgttactggtggtgagatcgcatcaacttttgataatccagattctgttaagcttggtcactgcaaggtaattgaagagatcatgattggggaggacaggttaattcatttctctggggtcgcgatggggcaggcttgcaccattgtcttaaggggggctagtgagcatgtgcttgatgaggcagagaggtccttgcatgatgccttgtgtgtgctgtcccagacagtaaatgatacccgtgtcttgtttggaggcggttggcctgagatgctgatggctaaagaagtggatgaacttgcaaggaagacccctgggaagagatctcatgctatcgatgctttctcccacgctctgcaagccatcccaacaatcatagctgacaatgctggtttggacagcgctgagttgatctctcagctccgagctgagcaccacaaagagaactgcactgctggaatcgatgtcatcactggcaccgttggggacatgcaaaggctggggattcaagagtcgttcaaggtgaagcaggccatactcctgtctgcgacggaggccgcggagatgatcctcagggtcgatgagatcataagctgtgccccacgcagaagagaggataggatgtgattagacacgctgtttctcggtgtagtggggatgcttgttaccctagttttgatggtggttctggggcgttcaagttggtcacatttcaagtgtttttggctcctaagaacctagtaattgttatttcgttgaaacaaccaaccgtaggcttttttttttctagattctcatgatgtaccatttggtagcgaagttcttcctctgttcttttttatgtgtcgagttttagtttaaaactagacaacaaatattcgataatggaggtagtacattgtttacgatatgcttgtgccatgtgcctctacatgttctcctattccttttgacgtaggaatgactagcttgtctttgttt

SEQ ID NO: 75324 - DNA, 2416 bp, Zea Mays
atttaataaatatataatattatttatatgatatataataaacgtagcaaagcacgactggctagtaacttaactggctgtaacttataagtacccaaaccttctctcctcggtatccaaagttccacactccacagtccacacccgcgcaaaaaacacagcaaggctccatgaacaagttggcatcctgcttcctccagcacggagcaccacacacccaaatcttcaagtcctaccatgttcagagatccccttcgctgcagttgcttgagaaccgatccgtttccatgacccggcaccgcgccgcggaccgtgctgccagaggcaccatcgtcgacgtcgccgtcgacagtggcaccagcttcgacttcgagagctacctgtcggccaaggccagggccgtgcacgacgcgcttgaccttaccctgcagggtctgcggtgccccgaggtcctgagcgagtccatgcgctactccgttctcgcgggcggcaagcgcctccgccccgtgctggccatcgccgcgtgcgagctcgtgggcgggaccgcggccgcggccgtcccggtggcgtgcgccgtcgagatgatccacaccgcgtcgctcatccacgacgacatgccgtgcatggacgacgacgcgctccgccgcggccgcccctccaaccacgtcgcgttcggcgagcccacggcgctgctcgccggcgacgcgctgctggcgctcgctttcgagcacgtcgcccgcggcagcgcgggcgccggcgtccccgcggaccgcgcgctccgcgccgtcgtggagctcgggagcgtagctggcgtcggcggcatcgccgcggggcaggtcgccgacatggcgagcgagggagccccctccggctccgtgagcctgggcgcgctggagtacatccatgtgcacaagactgcgcggctcgtggaggccgcggccgtgtcgggcgccgtcgtcgggggcgggggcgacggcgaggtcgagcgcgtccgtcggtacgcgcacttcttagggctcctgggccaggtggtggacgacgttctggacgtgacgggcacgtcggagcagctcgggaagacggcgggcaaggacgttgccgccggcaaggccacgtacccacggctgatgggcttaaagggagcgcgcgcatacatgggcgagctcctggcgaaggccgaggcggagctcgacgggttggacgccgcgcgcacggcgccgctgcggcacctcgcgcggttcatggcgcacagacagcattgagatggggtggaagtggaactatggaagtggatctggccggctcatccggaacacttgataaaagtgatgcgttgactattagtttctcagacctcaacatcgagtgattactttgccccggcccaaaaggatttatgggcttccgagttgagtgacactgcagtttgccagtggcatgtggcaacctacctaatgggccgttcacgccttcacggacaagtagcctttataagtgcggttcttacttcagcttcccttactcctatcgttaaataaatctctattatataaaaagaccagtttttccaattccacgtttccgcgtgcttctccacatttaaatggcaaaaaactaaacttatacaaaaattaagatttaaactatgattattgactctaagacacacattcacatctaactagccaacagagcacacatgtctttgtgttttatattttatatttataaatggaatctatagcaacgtgcatgcactttgctaatactagtataatgcatatgcactacgatggcacacaataatatttaatactaataaaaaataatttaatgtcacagtgagcgggtccacatattagatattaaactaataaaaataaatgttacaccttatcttagccaaaaggtcgataaaaggtataggttgaaaaggagtctgaccctttttaatagctcgctcgatcgttcatcctccttcaggtagcgaggtggtactatgtgagagttgttgggagcctttattgccgaaggtcctcaaagtacaatattgtcaattaagtatgtttcgggtgctctcaaaggatgtgaaactcaccttcgtaagggttggtgtctgaaggaaaaacgaagccatgaagcttaggctccatggaggcaatgcaccaacaaaatccaaaggagaaagcttcgacttcctgaatgccgaacgtgatctacgaagctaaagcagaagagaaggatctagaagattgaccagatggtcaagaaggagaaaagaacgatgttgtcctcatgaggcctgtaattcatatgtatagggtgtgcgagtatttttgtaatttcatacgaagttgtacctcaccactataaatatgagaacagtgtcatgcataaggacacttttcgaacacaa

SEQ ID NO: 75325 - DNA, 530 bp, Zea Mays
gtccctcagaaaaccaagtcgctgaaacagtagcagtgtattttgaaataatgtacggagagatcacagcctggagtggcatgcccaccgtgaaggttgctgtcaccgtcgatgcccctgccgtggtagagctgatgatgcagaggttgatgactgatgactagcagcaataccagttaattggcagcgccaccattaagacaatttccagttcttaagggagaaacaaatgttggaacatggaagtgcatttgttgttcaccagaaatttggtcgtcttgtcatcaaaacaccagaattgcattattgcacgctagatactcatttctttggttgttatgtgcgtgcttggtgtttatgtacagttttatgtgcttgataatgggcacatgaccagttcgacaatgtcatacagttatactatactagtacattgcttatgcttgtgagagaacagaattaagttaaatgaagagccacctgatgccagaaattggtccgccagttgttgcacgatgttattatatggc

SEQ ID NO: 75326 - DNA, 752 bp, Zea Mays
ctttctgctcaagatgtatgctgcatcaagatgctgacagggagaagcttgaacagtgtgatagcaaatatgcccgctacttatgcaagataatgggcatttattttgattaccacaaggatgcctacttcattaaaggagtgtatcttcatgatccaacaacggttattgctgctgtgaatccatcgctgctgacttacacagaaggtgttgtgagggtacagacggttggaatcacaaagggccttactgtttttgataacaccaagaaaaggtacggagagatcacagcctggagtggcatgcccaccgtgaaggttgctgtcaccgtcgatgcccctgccgtggtagagctgatgatgcagaggttgatgactgatgactagcagcaataccagttaattggcagcgccaccattaagacaatttccagttcttaagggagaaacaaatgttggaacatggaagtgcatttgttgttcaccagaaatttggtcgtcttgtcatcaaaacaccagaattgcattattgcacgctagatactcatttctttggttgttatgtgcgtgcttggtgtttatgtacagttttatgtgcttgataatgggcacatgaccagttcgacaatgtcatacagttatactatactagtacattgcttatgcttgtgagagaacagaattaagttaaatgaagagccacctgatgccagaaattggtccgccagttgttgcacgatgttattatatggc

SEQ ID NO: 75327 - DNA, 1508 bp, Zea Mays
cggcagccaaatccgctttatcaggtcgagaattgtttctcatccaccgatccacgcgtgctgccgagccggggtctgctcagcctgctgtagcatttgtcgggttggattgggttgttccgcttgggtagcctggtgggatcgaaatctgtgtgggatccatggcggcggtcgaggggacgacgaagaagaaggtaatcatcgacaccgaccccggaattgacgacgcgatggccatcttcgtggcactgcggtcgccggagctggaggtgctgggcctcaccactaccttcggcaacgtccacaccgccctcgccacgcgcaatgcgctccacctgttggaggctgttggaaggactgacatccccgtcgcagagggatcccatgtaacaatcaagaaagccaccaagctgaggatcgcaagctttgtccacggttctgacggcctgggaaaccaggatttccctccaccggctaccaagcctatagatcagtcggctgctgccttcctagttgagcaagcaaatctgtaccctggacaagttaccattgtcgccctcggtccactaaccaaccttgctctggcagtggagcttgacccttcgttcccgaagaagatagggcagattattattcttggaggtgcatattcagttaatggaaatgtgaaccctgcagccgaggcaaatatctttggggatcctgatgcggcagatattgtgttcacctgcggtgctgatattttggccgtgggactaaatgtaacccaccaagtagttctaaccgatgctgacagggagaagcttgaacagtgtgatagcaaatatgcccgctacttatgcaagataatgggcatttattttgattaccacaaggatgcctacttcattaaaggagtgtatcttcatgatccaacaacggttattgctgctgtgaatccatcgctgctgacttacacagaaggtgttgtgagggtacagacggttggaatcacaaagggccttactgtttttgataacaccaagaaaaggtacggagagatcacagcctggagtggcatgcccaccgtgaaggttgctgtcaccgtcgatgcccctgccgtggtagagctgatgatgcagaggttgatgactgatgactagcagcaataccagttaattggcagcgccaccattaagacaatttccagttcttaagggagaaacaaatgttggaacatggaagtgcatttgttgttcaccagaaatttggtcgtcttgtcatcaaaacaccagaattgcattattgcacgctagatactcatttctttggttgttatgtgcgtgcttggtgtttatgtacagttttatgtgcttgataatgggcacatgaccagttcgacaatgtcatacagttatactatactagtacattgcttatgcttgtgagagaacagaattaagttaaatgaagagccacctgatgccagaaattggtccgccagttgttgcacgatgttattatatggc

SEQ ID NO: 75328 - DNA, 480 bp, Zea Mays
atttactacattgtggctacctcaaaatggtttctgcataaaaaacactattaggaagctagagcagacttcagttacacgtaaaagaaacgaaagcatttcaagtactcatattcaagtgattctcaaaagtagacaagtggttacttgaaaccataggggtgtaagccgctgtaaataaacaaatgcttagtgtactgcggtgttttttaagcgctgccaacttctcctaagttatactgattagatcgttgaagtccaagggtcgatgaaaccccctgtgaccgggaccgggccttagacctatgctttggcgtgggacagatgatggatttttttaaccacggcctgaaattcgctcccacggggagtcgaatctaggacctgaggagtgctattcagaccacctaaccaactcggctagaggccctttgtgtatgggtagggcaggggttcgggggttttctcgacctgcgtgag

SEQ ID NO: 75329 - DNA, 1596 bp, Zea Mays
gtcccattctttattatctttgttgagaaaggacttgagaaatggcagtttgcagtcatttctcggtggatcatcctatgtatccaatcctcctgctgtagcaccaaattctattagtatggtgatgtgcagtttttttactaatccctcatactgaaaattctattcgcatggtgatgtatagttgttttactaatctctcgtacagtcatactctttaatttttatgtctttttcttcaccttgtcttgcgaattacatctgaattgtccccatgcaattttgacattgtattgacttcatcatagataagtatatgtgttctatggctgttcctactgatgtcttaggagacatgatcagaaggatgagtgtgctttttacattggcatcttgactgctcctgcttgtgtcatgagttttaattgatttagtttgagaagttttactagagataagttagttggcttgattgaattaagcatacgttttggaatttagttatagttcttttgtaccttcattaatcacactttgttgtatttgaggatccctttacattcatgggtttcttagagtattgctgattttgtgtagtattttgtcaaacttgcaggtatctgtctgctagaactctcggtctgaatggtgcttttagcaaggttgccaaggtcggtcatgtttgctggctcaagaaccagagaaaagttacaatttggctgtatcagatctagcagccaaagtgaatcgtcaagcgattttgtttcaagtaaaaaggcaaacttgttttgcgtgcagctgggaactcatgatgttggtgcatcctgctgattgcaaaagcatgttagatgctttcatagctggctgtgattttcattccaggacaaccatgagcatgtatcagcatattcgtgagactgttgaagaagagaaagtaattcttgagtagcatcctcaacctgatcaagagaaatctcccatgctattgttgaaggtatgctacctttaatggtgtttttgagaattctattgattccttctaaatgttaaaattatgttcactaccaggttattagcttttgtactgcacttccacacacatacaattttttttcttttttcttataccttccatgtcgtctggtccagaacttgtacactgtgggggttaattatggatatggatctatgaaatattattagcatgaaaatatacatggcgtgtatggaacaaaatggactctaatgctttttcttgtgatgtaggatgcttttggcgctgagaggaggaaagctataagatgctaaatctctccattgcatgcggaaaaacgtaggaagggcactgcagctgatgttgctgtgtgcaatgcttgagatagacagaaatactcgtcttaaggagcttggttgggcgctactcatgtgggtagtttatgcataaagttatgcctgttcgctgcttaaatgttgccatattttgtttttctctttgaaactgtgaagggcacaactttttaatgacttctgtaacttgtgtatctaacatctgtattcggtattctgagttaaaataggcacatttaattatatttt

SEQ ID NO: 75330 - DNA, 771 bp, Zea Mays
ctaaaaaatcccagctttcttcagaccgatttttcgtcccttgagatttcagaaacaccagcatgagcaacagagagacagagggggggaaaagttagatcgtggcgcaacagtttttatgagtgactcacgcaaacatccatatccaaaaaataatactggaggtccctttcagcaatctgcagagagagcggttcttccctttggtcccgcagctgcgatccctctccttcctcgtgggacctggaagctcgttttccacaaccaccatgtgaactgccctgtgtctgtgtgtgctttagttgcatccatgaccatgaatgagaatgaacctgtggttggttggttggctggttggctggcatggcatgcaggggagttcgcggcgttcctgacgggggtgaacctgatcatggagtacgtcttctccaacgtcgtcgtggcgcgcagcttcacggcgtacctcggcacggcggtgggcgtggacgcacccagcaagtggaggatccccgtgctgggcctgccccaggtgttcaaccaggtggaccttgtcgccgtcggcgtcatcctcctactctccgtctgcatctgctataggcatgccccatctgtgctacaagggtcggaatggacttgataggacatttgactatgcaacatggaagttatttcaagatatccttttttaactatgctgtcgttgctgatcatttgcatttttacatttttcacattatactacagttgaagatacataggtgtcatggtcgg

SEQ ID NO: 75331 - DNA, 1433 bp, Zea Mays
caaactgatagcctgtccccacatgtcaagcactcaagcagcccttcctgtgctggtactagttgtcgctgctgccctgttgcggcgacgactccgtgactcctagtccctacccagatcggcgcccgacgcaaggccgagcaggcgatggccgcagcggcgtcaatggggcacccttacgcgccagccgagctggaccttccgggtttcgtgccgctgaagctgtcccaggtcgagatcctcgtgtcctacctcggcgcctccgtcttcgttttcctcgccgtctggctcgtctccggaagatgtgtcagattatccaagaccgaccgtctgctcatgtgctggtgggcattcacagggttgacccacataatgatcgaggggcccttcgtcttcactcctgatttcttcaagaaggagaaccccaatttctttgatgaagttttaagggagactctaggtatgttgctagggacactgcaactgttacggtcgaagggatcaccgctgtattggaaggccctgcatcactacttgctgtctacgctattgcatccaggaagtccttcagccacattctccagttcgccgtctgtctgggccagctctacggatgcctggtttacttcatcaccgcgtacttggacggcttcaacttctgggtcggcccgttctacttctgggcgtatttcattggcgcaaacagcttctggatctggataccgatgctcatcgccataaggtcctggaagaaaacttgcgccgcgtttcaagctgagaaggtgaagaagaccaaataaaagctgtctttagctaccgttttattggagaccgtcattttgatggcttaaattcttgtgttggttggtactggaaactgcatgatgtactctttgctcaaacaaatgaagaccggtttacaaattcaaggaatcgagcgctggggaaaaaacgatttttttgcttaccaggtaaccaagagaaaaacaacaatcagaggaagcatgggtgaacaatcagaagatgaaaacttaaggaagatatctcctcttacttttctgcagaaaggttcagtgcatataggataaatgaaacttataataatttgaaacaaaatttgttatcacgttctcttaatttagaaaatgtacaaaggagtcctggagccgaaaccgttttttttttaacattagagcatctccaagagagactctaaacatgatcctattttaaatatagagctcaaaactataaaacatccttccaacagcggccctattttataaaatttcatcaaatggttatagggctcggtctctcgggtcctaaatatagtacccatatactagagccctatcctcatttccacttaatctccaaccatttatttcctaatatcatgatttatttcttaaatagcattatttaaggcc

SEQ ID NO: 75332 - DNA, 1317 bp, Zea Mays
caaactgatagcctgtccccacatgtcaagcactcaagcagcccttcctgtgctggtactagttgtcgctgctgccctgttgcggcgacgactccgtgactcctagtccctacccagatcggcgcccgacgcaaggccgagcaggcgatggccgcagcggcgtcaatggggcacccttacgcgccagccgagctggaccttccgggtttcgtgccgctgaagctgtcccaggtcgagatcctcgtgtcctacctcggcgcctccgtcttcgttttcctcgccgtctggctcgtctccggaagatgtgtcagattatccaagaccgaccgtctgctcatgtgctggtgggcattcacagggttgacccacataatgatcgaggggcccttcgtcttcactcctgatttcttcaagaaggagaaccccaatttctttgatgaagtttggaaagagtatagtaagggagactctaggtatgttgctagggacactgcaactgttacggtcgaagggatcaccgctgtattggaaggccctgcatcactacttgctgtctacgctattgcatccaggaagtccttcagccacattctccagttcgccgtctgtctgggccagctctacggatgcctggtttacttcatcaccgcgtacttggacggcttcaacttctgggtcggcccgttctacttctgggcgtatttcattggcgcaaacagcttctggatctggataccgatgctcatcgccataaggtcctggaagaaaacttgcgccgcgtttcaagctgagaagaccggtttacaaattcaaggaatcgagcgctggggaaaaaacgatttttttgcttaccaggtaaccaagagaaaaacaacaatcagaggaagcatgggtgaacaatcagaagatgaaaacttaaggaagatatctcctcttacttttctgcagaaaggttcagtgcatataggataaatgaaacttataataatttgaaacaaaatttgttatcacgttctcttaatttagaaaatgtacaaaggagtcctggagccgaaaccgttttttttttaacattagagcatctccaagagagactctaaacatgatcctattttaaatatagagctcaaaactataaaacatccttccaacagcggccctattttataaaatttcatcaaatggttatagggctcggtctctcgggtcctaaatatagtacccatatactagagccctatcctcatttccacttaatctccaaccatttatttcctaatatcatgatttatttcttaaatagcattatttaaggcc

SEQ ID NO: 75333 - DNA, 288 bp, Zea Mays
atgggagagcaggcgattcgagctgttgattgggaatctcaacgagctgctcacctgcagattggaattggatcgatggatggacggtggacgcctgcacgccgattggatctcctcctccttggacggctgctgggttgggatgggacaggacaagagccttcctcgccacagctgccgtgccgtgctgctcctcttctccgagacgctgggagctccgattggagacgtctggaagacggccagacgggaggcgcataggaatgacgtgacggagtttcgtcgtcg

SEQ ID NO: 75334 - DNA, 1398 bp, Zea Mays
aacgggagcgaagacggccctccccgcaatcccatcgcatctgctccaccaccggcacatcgccgccgaccttattcctccgccgctcgaggagtcagccgagccaacggagggagaccatatgggcgcggaggcagcgcatccgcagcaacagcctccctcctccgtccgaccctgcagggaggcggcggcgcccgcggtgctggggctgcagctctcggcgctgatcgaccacgtcgcgcgcgtcgactggtccctcctcgaccgcgtccctggcgaccgcggcggctcgcagcaggtgtccattgtggagttgaatcatattcttaatgaagtgaatacccacatccttccttcccacaatgatctcaccccaataactacaatagccggtggaagtgttgccaacacaatccgtgggctctcagctggttttggaatatcaactggaataattggagcttgtggggatgacaaccagggacttttgtttgtcaacaatatgagctttagtggtgtagatctcacaaggttaagggccaaaaaagggcacaccgctcagaacatggaacagattattgaagctattaggattgctaaacaggaaggcctttcagtatcattagatttggccagttttgagatggtccgtgactctaggtctaagcttattaaccttttggagaccggtaacattgacctttgcttcgccaatgaggatgaagctagagaggttatagggggaggtctggaatcagatccagaggaggcgcttgcgttcttgggcaagtattgcaaatgggctgtggtcacacttgcttcaaagggatgcatggcaaagcatggcaaacaggtcgttcaagtgccggccatcggggagagcaacgcggtggacacaactggagcgggcgacctgttcgcgagcgggttcctgtacgggctggtgaaggggttgccgctggaggagtgctgcatggttggggcgtgcagcggcgggtcggtgacgcgggcgctcggcggagaggtgcggccggagaactggcagtggatgtacaagcagatgcacgccaggggcatgctgctccctgagctcaagaactgaactaatcatgctgcagctggtgttagctgcatgctgcaccagctgttgtatctctcagcactcctacctttcccctgctagaatattgaaccactcctgagattgaaccaatcagatggagtgtattgataattgcacttcatatgtgtgctagtgtactattcccttggtctaaaatatcatgtcattttatcttttcaagactagactagacacacaattattattattattatgtaaattgatacaaaccatatgtagatatatagacgaatttgtttttggaaaaacgaaaa

SEQ ID NO: 75335 - DNA, 1609 bp, Zea Mays
gatacgtttgtcagccgtagatccatgcgtgaacctcgcaacaaactggtgtcgtacatacttacagttcgacacggttcgatcgcagcacgctctcagcctataaaacgggagcgaagacggccctccccgcaatcccatcgcatctgctccaccaccggcacatcgccgccgaccttattcctccgccgctcgaggagtcagccgagccaacggagggagaccatatgggcgcggaggcagcgcatccgcagcaacagcctccctcctccgtccgaccctgcagggaggcggcggcgcccgcggtgctggggctgcagctctcggcgctgatcgaccacgtcgcgcgcgtcgactggtccctcctcgaccgcgtccctggcgaccgcggcggctcgcagcaggtgtccattgtggagttgaatcatattcttaatgaagtgaatacccacatccttccttcccacaatgatctcaccccaataactacaatagccggtggaagtgttgccaacacaatccgtgggctctcagctggttttggaatatcaactggaataattggagcttgtggggatgacaaccagggacttttgtttgtcaacaatatgagctttagtggtgtagatctcacaaggttaagggccaaaaaagggcacaccgctcagtgtgtgtgcttggttgatgcaagcggcaaccgcaccatgcgtccgtgcctatctagcgcagtcaagatacaggccaatgaatttagaaaggaggatttcaaaggctccaagtggcttattgtgagatatgcacaacagaacatggaacagattattgaagctattaggattgctaaacaggaaggcctttcagtatcattagatttggccagttttgagatggtccgtgactctaggtctaagcttattaaccttttggagaccggtaacattgacctttgcttcgccaatgaggatgaagctagagaggttatagggggaggtctggaatcagatccagaggaggcgcttgcgttcttgggcaagtattgcaaatgggctgtggtcacacttgcttcaaagggatgcatggcaaagcatggcaaacaggtcgttcaagtgccggccatcggggagagcaacgcggtggacacaactggagcgggcgacctgttcgcgagcgggttcctgtacgggctggtgaaggggttgccgctggaggagtgctgcatggttggggcgtgcagcggcgggtcggtgacgcgggcgctcggcggagaggtgcggccggagaactggcagtggatgtacaagcagatgcacgccaggggcatgctgctccctgagctcaagaactgaactaatcatctgttgtatctctcagcactcctacctttcccctgctagaatattgaaccactcctgagattgaaccaatcagatggagtgtattgataattgcacttcatatgtgtgctagtgtactattcccttggtctaaaatatcatgtcattttatcttttcaagactagactagacacacaattattattattattatgtaaattgatacaaaccatatgtagatatatagacgaatttgtttttggaaaaacgaaaa

SEQ ID NO: 75336 - DNA, 665 bp, Zea Mays
ctttccaatccagactgatcccggccgaagcgaacaaggcctaggtgggatctggagctcgttgcggccgcggactccacgcccctataaaaccagacctcgccattgagagagggagggaaccgttgggagcttggaccgtcgtcgccgacgtacctcatcctcagaagctgttcagggaccaaggagggacgccgggtttgcgctcggcgtgcggcgtgtgtacgtgggatagccgagccaagacctcgacccaagcgtgggcaattgctcaccagcgcgtgtcaccgtcgtggatttgccactcaccgtgggtcggcttctctatcgcctctgaaccctagtcatgaacatgtaccacaagattaggagcatgaaggaggtcacgatgagttcgtgagaggtctagaccgtcgtctccgagttaactatggttgctggattgttgtcttcgtatgatataattatttaactattttgtataaaactccattatatattaaaaatgttacattcgtttctgtaacatgagtcatcatatgtgtgagacttgatactaacacacatttgagatgcacctaggtttgacctttaaatccggttgtgaccgatgtgtactgtgtaaacttgtttgaattatgttacagaattgttgtgagcaggca

SEQ ID NO: 75337 - DNA, 2926 bp, Zea Mays
gcacaccacagaactctgcaggacctcaatcaaatgtcactggtcagaaaggctggtctgccacttcaggagttcatgttaataccagttctcatcatgctaatgtgaatacaaagcggaaagctgatggtaacgcaggtggactgaaaaacaaaatgaaatctgcacagtccaccaggaaaccttcaaaagcttcatcaagtgctggattgaaaaggggcaggagggcggcatttgaatccagtgaatctagcatatcagaaaccagtagcgacagtgaggaagagattctaaaacatggtccttctgaaaatagggcagggccaggtcaacaaactcgcagatctagcaggcagaagcaagaagttaagtataatgaggatagtgatgatgataattatgatgctgaagatggtaacacagttgaggatgatttttttggctctcctgctttgaaaaggttgagaaaaggtggcctgttccatggcgatcacagtactaaaacagcaaagctgaatgaagacaccactggacataatggtgtgagtagctgcagtaacataaaaggtaaaaagaatggtggtttgccatgtgaagagaaaacttccaattgtgttgagcagatgaagagagaaccaatgcatgttggagaaaatagtgatggcaaagaagagctatttcattctatcaggaacaatggtcttggtctaaacgatgatgatgcttcagatgataacaaattcactttcccagatcctgaattttttgattttgacaaacttcgagatgcaagtcaatttagagccaaccaggtctgggctgtctatgatgatcaaggttgtatgcctagattttatgctcgaatcacaaaggggtctgcctgttgcatgtggacactttacgcatggacagtcagagacaacgagtgaaattggtatgttctcccagattatatcattagagagaagcaagacaaacaacttctatgaaatatatccaaggaaaggtgaggtttgggccctttttaagggatgggatattggttggagctcagatgctggcaatcacaaaaaaatgaaccatcgttatgaagttgttcaagttctttctgatctcatcacgagcactagcattattgtcatgccacttgtgaagttaaaaggctatgttagcttatttgtgcagtctggagaggcagctccgtatgtgatacctcagggtgacacactaagattttctcattgtgtcccgcattatttgatgagcggaactgaaaaagaaggcattccagaaggatctcttgaacttgatcctgcagcgcttccctccaacttggaagaggcttttccttctgctaacccagaatgcagttctgtaagaagtaaggagcataactccaaacatgctggtttgtccagtgaagattgcaaagaaaccatgaatgtggggcagcggcaacagacaaaatctgtgaatgcagggatcgctacaaaaacaccaaatgaagagaaaatcaagcataacactcatctgcctgaagttacagatgtcgatgacgataacatttgccaaacagagtatgtatgcgctgaatcagaattctatgatttttcaagaataagatttctccaaaagttttcatctgggcaaatctgggctctctatagtgatatagataaattccccaattactatgcattcatacagaaagtcgatcttaaaaatggtacagtacaagttagatggctggatgtctgtcctcgaggagaagtggagaaaagattgtcccaagaagaacggaccattggcattggaacctttaggcttggctatatcttcgatatgatgacttacactggtacagatcccttttctcatcctgttaaggccagagctactggcagaaaaggtgaatatgaaatacttcctcgtcatggtgagatatgggcggtttacaaaaactgggaggctgtatggactgcacaggattttgaaaaatgtgagtatgaactggtggagatacttggccatactgattcctccatacaagttcagcttctaaggaaggtcgatggttataagatggtatttatgtcatacagagcagagggttctgtgatgacaataaggaacgatgagtaccccaagttctctcaccagattccttgctttcgtctcacacatgaaaaaggtggcaagcttcgaggctatttggagcttgaccccttatcagtaccagaggaatttctcgactgattccatctgagataaactttatcaaccacaaatctggaaccttcttgtgatgaagtttctgtaactgaggctcagttaatgttaaggtcgacaggtcaacattgttcaaatgacactgacataagatgtctggatttcagcattcgtagcactaacgttcttaaggctctgttcgtttagtccggattggaggccagaaccattccaactcatcaagctaatacaaatttgtgaactattctaatccggaaccaatccagtaaagtattccggaagaaccgaacgggcactaaaggtggactaccaatctgcacaatgaaggcattgactgttggactctttgctgggtggctgtcctgcagctgtaattcacaagccgagtaaattgtttgtagttagcttcagctgtatctggggtttatggtgtaaaaactgccacttctcttgtagtgtactctggtagtgctgtatttgagctgtggggtgccatcctgattaattatcagagttctattggccacccttacaggaactgaaacatgaaatggagtcagccaggtcaggctcatcgatcaatgtgttatgattgtgttgttttgcaggggacaaggcctctttctattcgcatttctctgtatatacaagttacacttacacgtcatgatttttt

SEQ ID NO: 75338 - DNA, 322 bp, Zea Mays
cccttccgttcacgccttcacggtcgtctcagcaaccagctcggacccgtttcgctctccgagtctccgacggctcacgactggtgtgtctcaccccacactcgctcgctctccgacgactggtgggccgccgctgccctgcgccagccgccaggtgctgaggccttcgttgatctattcgccagcgacgagcgcccaccaggcaagcttctgctgctctgcatgcaatgatgaactaatgattgttgttgataacagaaacttgctgttggtttttgttcccatattactattggcagccaaagagttctacaacctgcaa

SEQ ID NO: 75339 - DNA, 427 bp, Zea Mays
cccgtttcgctctccgagtctccgacggctcacgactggtgtgtctcaccccacactcgctcgctctccgacgactggtgggccgccgctgccctgcgccagccgccaggtgctgaggccttcgttgatctattcgccagcgacgagcgcccaccaggcaagcttctgctgctctgcatgcaatgatgaactaatgattgttgttgataacaggtaagtattctttttgccatgttacagctcttgtaagcctgcacgtgctctttattttcttctaatttgtcaccctgtctctgaagtaagtccatatttggccccttaactctccattttgtctaatccccctcccccacccatcccgactccatgaccattagtgtgtaggaacctcaactttgcttttcataatgttaaactttagcactag

SEQ ID NO: 75340 - DNA, 3944 bp, Zea Mays
tttgctctccgccgcctggtgcttcgcccccctcgctctccgacgactggtgggccgccggcgccggtgccgccctacggcagttgggccttcgttggcctcttcgccggccttttcgccggtgacgagcagccactaggaaagcttctgttgctctgcatgcaacgatgaactgatgattattgttgataacagaaatgtgctgttaggttttgttcacatgtgaccatgggcagtcaaagatttctgcaacctgcattgcacctcttattcttagagaactactgcagtggttactaatatattgtgctagccactaggtaatctaacatttctgcaacgataccagcttctcttcttgtttacatggagtgcaacagagatgaggctgctagagcgaaagttcttgcggaaagaaaaatgctggacaaggattttgttggtgcaaaaaagttgattatcaaggtgcagcaactcctcaaagaagtggaagatattgacattccaaaaatgttaactgtttgtgatgttcattgtgctgctggagctaaggtaaatactgagattgattggtacggaatactgcaagtacctgtaaatgctgacgacgcactgataaagaagcagtatcgtaagcttgcccttttgctacaccctgacaagaacaaatttggaggtgcggaggcagcattcaaattagttggagaagcaaacataactctcacagacccatcaaaacgttatgtgcatgacatgaaaagaaacaccttcagaagcgttacggcaagacccaatcgtcagccaccaaaaagacctgcacctgctagatctagttctactcctgtgaatctctacaatatgcatcagcaacatcagcgtcaagcctcaaatcctacagggacgcaaacaacattttggactatttgtccagcttgtggcatgagatatcagtattacctctcgatcttgaagaaagctttgcgctgtcagaattgtttgaagccatttattgcacatgatttgaaggaccaagctattccttccggggcaaatcagcgatctgctggggtttggaaaaatgcaggcacaccacagaactctgcaggacctcaatcaaatgtcactggtcagaaaggctggtctgccacttcaggagttcatgttaataccggttctcatcatgctaatgtgaatacaaagaggaaaactgatggtaacgcaggtggactgaaaaacaaaatgaaatctgcccaggccaccaggaaaccttcaaaagcttcatcaactgctggattgaaaaggggcaggagggcggtgtttgaatctagtgaatctagcatatcagaaactgacagcgacggtgaggtagagattccaaaacatggtcctgctgaaaatagtgcagggccaggtcaacaaactcgcagatctagcaggcagaagcaagaagttaagtataatgaggatagtgatgatgataatgatgatgtggaagatgatgataacacggttgaggatgattttgttgattctcctgcgttgaaaaggctgagaaaaggtggcatgttccatggtgatcacagtactaaaacagcaaagctgaatgaagacaccgctggccataatagtgtgaatagctggggtaacataaaagataaaaagaacggtggtatgccatgtgaagagaaaacttccaatggggttgagcagatgaagagagaaacaatgcatgttggagaaaatagtgatggcaaagaagagctatttcattctgtcagcaacaatggccttggtctaaacgatgatgatgcttcagatgataacaaattcactttcccagatcctgaattttttgattttgacaaacttcgagatgcaagtcaatttagagccaaccaggtctgggctgtctatgatgatcaaggttgtatgcctagattttatgctcgaatcacaagggtaaaaatggttccaaagtttatgctacaatttgtttggttggagttcaatcctgcaaataaagcggaggaggcatggtcttacaggggtctgcctgttgcatgtggacactttacgcatggactgtcagagacaactagtgaaactggtatgttctcccggattatatcattagagagaagcaagacaaagaacttctatgaaatatatccaaggaaaggtgaagtttgggccctttttaagggatgggatattggttggagctcagatgctggcattcacaaaaaaatgaaccatcgctatgaagttgttcaagttctttctgatctcaccacgagcactagcattattgtcatgccacttgtgaagttaaaaggctatgttagcttatttgtgcagtctggagaggcagctccatatgtgatacctcaggttgacacactaaggttttctcattgtgtcccacattatttgacgagcggaactgaaaaagaaggcattccagaaggatctcttgaacttgatcctgcagcgcttccctccaacttggaagaggcttttccttctgctaacccagaatgcagttcagcaagaagccaggagtctgactccaaaaatgctggtttgtccagtggaaatcgcaaaggatccatgaatgtggggcaggggcaacataaaatagccgcgaatggaagggtttgtacaaagacaacaaaggtagagaatatcaagcataacattgatctgtctgaagttacagatgtcgttgacgatagcatttgccaaacagagtatgtatgcgccgattcagaattctacgatttttcagtaagaagatcgctccaaaggttttcacctgggcagatctgggctctctacagtgatatagataaattccccaattactatgcatttatacagaaagtagatctcaagaatgataaagtacaagttagatggcttgatgtctgtcctcaaggagaagtggagaaaagattgtcccaagatcggaccattggcattggaacctttagggttggctacatccacgacatgatgacttacactggtacagatgccttttctcatcttgttgaggccagacctactggcagaaaaggtgaatatgaaatacttcctcgtctcggtgagatatgggcagtttacaaaaattggagcgctggatggactgcgcaggattttgaaaaatgtgaatacgaactggtggagatatttggctatactgattcctccatacaagttcagcttgtgaggaaggtggatggttataagatggtatttatgtcatatagagcagggggtgtgaagacaatacggagggatgagtacccgaagttctctcaccagattccatgctttcacttgacacatgaaaaaggtggcaagcttcgaggctatttggagctcgatcccctatcactaccagaggaatttctctgctgattcgatctgagataaaccttatctacatcaaatctggagcctccgtgtactctaaattgcagtactgtgtttgaactgtgagatgctagcctgattaatttcctggaactgaaaaatgaaatcgagctggagcaaggttaggctgatcaatcaatgtgtcatgcttgtgttgctgtgcggggacatagatggcatccttcagcgtattatcagaatttatttctattcgcatctctctgtgtataaatgttacacgtcctaattttgatatgaccatgccttttcttgaactctttttatttgctgacaagtattaaagccttgtttgttcctatttgttttatgattaaagtttagttctaggactttagtctctacctgtttgtttgatctcagggactaaacaggttcagagcacattaaatacactatagaaagactaaaatacctcttatatgcttaagttgtctaagagagagaatgttaaaaacacattaatgcactatagaaaactgaaatac

SEQ ID NO: 75341 - DNA, 4040 bp, Zea Mays
cggctcggctcttgcacccccttttgctctccgccgcctggtgcttcgcccccctcgctctccgacgactggtgggccgccggcgccggtgccgccctacggcagttgggccttcgttggcctcttcgccggccttttcgccggtgacgagcagccactaggaaagcttctgttgctctgcatgcaacgatgaactgatgattattgttgataacagcttctcttcttgtttacatggagtgcaacagagatgaggctgctagagcgaaagttcttgcggaaagaaaaatgctggacaaggattttgttggtgcaaaaaagttgattatcaaggtgcagcaactcctcaaagaagtggaagatattgacattccaaaaatgttaactgtttgtgatgttcattgtgctgctggagctaaggtaaatactgagattgattggtacggaatactgcaagtacctgtaaatgctgacgacgcactgataaagaagcagtatcgtaagcttgcccttttgctacaccctgacaagaacaaatttggaggtgcggaggcagcattcaaattagttggagaagcaaacataactctcacagacccatcaaaacgttatgtgcatgacatgaaaagaaacaccttcagaagcgttacggcaagacccaatcgtcagccaccaaaaagacctgcacctgctagatctagttctactcctgtgaatctctacaatatgcatcagcaacatcagcgtcaagcctcaaatcctacagggacgcaaacaacattttggactatttgtccagcttgtggcatgagatatcagtattacctctcgatcttgaagaaagctttgcgctgtcagaattgtttgaagccatttattgcacatgatttgaaggaccaagctattccttccggggcaaatcagcgatctgctggggtttggaaaaatgcaggcacaccacagaactctgcaggacctcaatcaaatgtcactggtcagaaaggctggtctgccacttcaggagttcatgttaataccggttctcatcatgctaatgtgaatacaaagaggaaaactgatggtaacgcaggtggactgaaaaacaaaatgaaatctgcccaggccaccaggaaaccttcaaaagcttcatcaactgctggattgaaaaggggcaggagggcggtgtttgaatctagtgaatctagcatatcagaaactgacagcgacggtgaggtagagattccaaaacatggtcctgctgaaaatagtgcagggccaggtcaacaaactcgcagatctagcaggcagaagcaagaagttaagtataatgaggatagtgatgatgataatgatgatgtggaagatgatgataacacggttgaggatgattttgttgattctcctgcgttgaaaaggctgagaaaaggtggcatgttccatggtgatcacagtactaaaacagcaaagctgaatgaagacaccgctggccataatagtgtgaatagctggggtaacataaaagataaaaagaacggtggtatgccatgtgaagagaaaacttccaatggggttgagcagatgaagagagaaacaatgcatgttggagaaaatagtgatggcaaagaagagctatttcattctgtcagcaacaatggccttggtctaaacgatgatgatgcttcagatgataacaaattcactttcccagatcctgaattttttgattttgacaaacttcgagatgcaagtcaatttagagccaaccaggtctgggctgtctatgatgatcaaggttgtatgcctagattttatgctcgaatcacaagggtaaaaatggttccaaagtttatgctacaatttgtttggttggagttcaatcctgcaaataaagcggaggaggcatggtcttacaggggtctgcctgttgcatgtggacactttacgcatggactgtcagagacaactagtgaaactggtatgttctcccggattatatcattagagagaagcaagacaaagaacttctatgaaatatatccaaggaaaggtgaagtttgggccctttttaagggatgggatattggttggagctcagatgctggcattcacaaaaaaatgaaccatcgctatgaagttgttcaagttctttctgatctcaccacgagcactagcattattgtcatgccacttgtgaagttaaaaggctatgttagcttatttgtgcagtctggagaggcagctccatatgtgatacctcaggttgacacactaaggttttctcattgtgtcccacattatttgacgagcggaactgaaaaagaaggcattccagaaggatctcttgaacttgatcctgcagcgcttccctccaacttggaagaggcttttccttctgctaacccagaatgcagttcagcaagaagccaggagtctgactccaaaaatgctggtttgtccagtggaaatcgcaaaggatccatgaatgtggggcaggggcaacataaaatagccgcgaatggaagggtttgtacaaagacaacaaaggtagagaatatcaagcataacattgatctgtctgaagttacagatgtcgttgacgatagcatttgccaaacagagtatgtatgcgccgattcagaattctacgatttttcagtaagaagatcgctccaaaggttttcacctgggcagatctgggctctctacagtgatatagataaattccccaattactatgcatttatacagaaagtagatctcaagaatgataaagtacaagttagatggcttgatgtctgtcctcaaggagaagtggagaaaagattgtcccaagatcggaccattggcattggaacctttagggttggctacatccacgacatgatgacttacactggtacagatgccttttctcatcttgttgaggccagacctactggcagaaaaggtgaatatgaaatacttcctcgtctcggtgagatatgggcagtttacaaaaattggagcgctggatggactgcgcaggattttgaaaaatgtgaatacgaactggtggagatatttggctatactgattcctccatacaagttcagcttgtgaggaaggtggatggttataagatggtatttatgtcatatagagcagggggtgtgaagacaatacggagggatgagtacccgaagttctctcaccagattccatgctttcacttgacacatgaaaaaggtggcaagcttcgaggctatttggagctcgatcccctatcactaccagaggaatttctctgctgattcgatctgagataaaccttatctacatcaaatctggagcctccggtaatgaagtttctggaacatccacaatttcgtagcactgacgttgttacggtggactcaatctgcacaactaaggcattggcttttggacttttttgctggatggctgtcctgcagctgcaattcacatgtctagtattttttttgcagtaactatttgttgttagcattagctgtatctacggtttgagttctagtgtaaaaattgctacttttaacatcttgcagtgtactctaaattgcagtactgtgtttgaactgtgagatgctagcctgattaatttcctggaactgaaaaatgaaatcgagctggagcaaggttaggctgatcaatcaatgtgtcatgcttgtgttgctgtgcggggacatagatggcatccttcagcgtattatcagaatttatttctattcgcatctctctgtgtataaatgttacacgtcctaattttgatatgaccatgccttttcttgaactctttttatttgctgacaagtattaaagccttgtttgttcctatttgttttatgattaaagtttagttctaggactttagtctctacctgtttgtttgatctcagggactaaacaggttcagagcacattaaatacactatagaaagactaaaatacctcttatatgcttaagttgtctaagagagagaatgttaaaaacacattaatgcactatagaaaactgaaatac

SEQ ID NO: 75342 - DNA, 1345 bp, Zea Mays
ctgacagactacagaggagggggcttgatcaccctgatcagtgccccctttgtgaccaggaaatggaaaccattgaccatctcctcgtgagctatgtgtttgcaagaaattactggttcaagctgctgacaaaggctgttgaactcatgcttgtcgatgcactcattgaggctaatgactacttggggatatcattgcatgcacacgacccagaagatttttggaagttggatgacacaatcatcaaaaccattgagactgctcccaacaatgaactgaaaaaagcaaaagaaatcattcaacgtattcgccgaagagaactttacaagatccatcatcacctcattccttatagttatttagttagtactaatatgaggaatggagtcaacctaccaaatttgaggaatggacccatgatgcatcaccacattttggatgggttttgcaaccagtattctgttccaaaggacaaactggagcatttcaaaaatattactgcacaggacatagtttgttcgcagaaatcttctgaggtgctgctgaaggaagaggatgttgcagtaagcaatgttaagatagatcttactcgtggaaaagataacccccttgaaagcatcaagttctttaaggattttgggtgcgacgagaagttccccatcacagatgatagggttagccacttgctacctgcatacaacgaggatagaattgtgagggtctatgccaagaagcctgagttggttgatgtggtgtcagaagcctttgagaatctccagatgagaatgtatggtgagaaaactcaagtgcatgagacgcccaagagaaagaggattagatccaactaggcagttggattttgtctaatcgcactttagataacatacaaatacaacacaggaaaatagcttcacaaacaagaagctatatagataacaggtttcagatggtagtctgaactggtaaggtgtaggtattttgtgtacaggagaaaatacaaacaacattgcatgaagtctaaaaactcacgttgacgtacgagatgctgcatgtgcgtagattggatagctagtcaaatactttatgatgtggatggattttaattactttatgatgtgtctggatttgtaagtacttgtcattttaatcttaatttatatggatctaagagaattaagtgggtttaaatccctattaagtcaaaatctctcctagtttcttttctccgatctttgtgggatgggaatagctaaacaagatctcagtacacatggttgactctatggaccatatctcattttgttttggtgtgatcaactatttatctctttgattttgttttgtt

SEQ ID NO: 75343 - DNA, 1275 bp, Zea Mays
caaatttttcctatggcttgtagcgctgcagaggtgttggacagctgacagactacagaggagggggcttgatcaccctgatcagtgccccctttgtgaccaggaaatggaaaccattgaccatctcctcgtgagctatgtgtttgcaagaaattactggttcaagctgctgacaaaggctgttgaactcatgcttgtcgatgcactcattgaggctaatgactacttggggatatcattgcatgcacacgacccagaagatttttggaagttggatgacacaatcatcaaaaccattgagactgctcccaacaatgaactgaaaaaagcaaaagaaatcattcaacgtattcgccgaagagaactttacaagttttgcaaccagtattctgttccaaaggacaaactggagcatttcaaaaatattactgcacaggacatagtttgttcgcagaaatcttctgaggtgctgctgaaggaagaggatgttgcagtaagcaatgttaagatagatcttactcgtggaaaagataacccccttgaaagcatcaagttctttaaggattttgggtgcgacgagaagttccccatcacagatgatagggttagccacttgctacctgcatacaacgaggatagaattgtgagggtctatgccaagaagcctgagttggttgatgtggtgtcagaagcctttgagaatctccagatgagaatgtatggtgagaaaactcaagtgcatgagacgcccaagagaaagaggattagatccaactaggcagttggattttgtctaatcgcactttagataacatacaaatacaacacaggaaaatagcttcacaaacaagaagctatatagataacaggtttcagatggtagtctgaactggtaaggtgtaggtattttgtgtacaggagaaaatacaaacaacattgcatgaagtctaaaaactcacgttgacgtacgagatgctgcatgtgcgtagattggatagctagtcaaatactttatgatgtggatggattttaattactttatgatgtgtctggatttgtaagtacttgtcattttaatcttaatttatatggatctaagagaattaagtgggtttaaatccctattaagtcaaaatctctcctagtttcttttctccgatctttgtgggatgggaatagctaaacaagatctcagtacacatggttgactctatggaccatatctcattttgttttggtgtgatcaactatttatctctttgattttgttttgtt

SEQ ID NO: 75344 - DNA, 1544 bp, Zea Mays
atggatgacccccgctggcgacgctgcggcggaccgagagggagcgtgccgaagttagtcgatccggagcagggcgtggatgctggagcaggtcgggcgtgtgcatcgacgacgcgaacacggggtggtggtggtggggagggagtgagggaggcgcgtagtgggggcagagctggagaagaagggcagctcgtgttggccaccgaggtatcctcccggagagagggagacgggacgggcgacggcggcgttcgggtcggctccgaagaggatgcaggagcgacgcagcgtgccccttcgaggtcatcgtgcggcgccgtgcaacttccacgcggccacgccatccccacctccgaaaggcacaacccccacgacgcaggagcgctggctccgggcgttcgggtactcggagacggcgttgggagaggagaaccgcaccgcggcgcagacatgggcgagttctgcccctccccgcagggggactccgcgctggcggcgccgcccttgacgctctcctccccgtccccagcaacggcggttaggccgagctacgggagctgcgaccgccgctacgtgaagctggtcttcgacaacctccacgggagcatctccgtagacccgttggccctgcagtttgttgataccgaagagtttcagaggttgcgggacttgaaacaacttggtcttacatatctcgtctatcctggagcggttcacacacgcttcgaacactcattaggtgtatattcgttggctggaaaggctataaataatcttaagacatatcagggagaagaacttggaattgatcatgttgacatgcagactgtaaaacttgcaggtctcttgcatgatatcggacatggacccttcagtcatttgtttgagcatgagtttcttcctcgagttgatcctggctcatcctggtctcatgaagatatgtcagtgctccttttggacagtattgttgacaaacatgcaatagatattgaaaatggttatctcaaaatggtcaaggagatgataactgccagcgctaagcctaccagcacaaaaagtgcaaacgagaagcattttctttatgacattgttgctaatggtcgtaatggtatagatgttgacaagtttgactacgttggccgtgactgcagagcatgtggtcttggctgtaatttccagtattggaggttgtagtgctggtctcgccccatgaaaattatggattatcggttaaaagtggttttggggatgaaagactctaggagatgaactggagatgtgttagaaaataggtttattttcctattctgtcatcattattaattcgagtacgcatgagagttgcgtatcattgtattaatagaagaagagtgtacaaagtacacaaggccaataggccgcaacagagtatgaggggtacttaagaaaagagacaacaacagaaacgaccaccacataacaccctaaggcctttaaccatgatcactaggcaacgacaggcccttcgccccaacggaccaattttaggcatttaaatatgtgat

SEQ ID NO: 75345 - DNA, 288 bp, Zea Mays
tggtctacacatccagggtctcatgaagatatgtcagtgctccttttggacagtattgttgacaaacatgcaatagatattgaaaatggttatctcaaaatggtcaaggagatgataactgccagcgctaagcctaccagcacaaaaagtgcaaacgagaagcattttctttatgacattgttgctaatggtcgtaatggtatagatgttgacaagtttgactacgttggccgtgactgcagagcatgtggtcttggctgtaatttccagtattggagccctgcttga

SEQ ID NO: 75346 - DNA, 1163 bp, Zea Mays
atggatgacccccgctggcgacgctgcggcggaccgagagggagcgtgccgaagttagtcgatccggagcagggcgtggatgctggagcaggtcgggcgtgtgcatcgacgacgcgaacacggggtggtggtggtggggagggagtgagggaggcgcgtagtgggggcagagctggagaagaagggcagctcgtgttggccaccgaggtatcctcccggagagagggagacgggacgggcgacggcggcgttcgggtcggctccgaagaggatgcaggagcgacgcagcgtgccccttcgaggtcatcgtgcggcgccgtgcaacttccacgcggccacgccatccccacctccgaaaggcacaacccccacgacgcaggagcgctggctccgggcgttcgggtactcggagacggcgttgggagaggagaaccgcaccgcggcgcagacatgggcgagttctgcccctccccgcagggggactccgcgctggcggcgccgcccttgacgctctcctccccgtccccagcaacggcggttaggccgagctacgggagctgcgaccgccgctacgtgaagctggtcttcgacaacctccacgggagcatctccgtagacccgttggccctgcagtttgttgataccgaagagtttcagaggttgcgggacttgaaacaacttggtcttacatatctcgtctatcctggagcggttcacacacgcttcgaacactcattaggtgtatattcgttggctggaaaggctataaataatcttaagacatatcagggagaagaacttggaattgatcatgttgacatgcagactgtaaaacttgcagtcatttgtttgagcatgagtttcttcctcgagttgatcctggctcatcctggtctcatgaagatatgtcagtgctccttttggacagtattgttgacaaacatgcaatagatattgaaaatggttatctcaaaatggtcaaggagatgataactgccagcgctaagcctaccagcacaaaaagtgcaaacgagaagcattttctttatgacattgttgctaatggtcgtaatggtatagatgttgacaagtttgactacgttggccgtgactgcagagcatgtggtcttggctgtaatttccagtattggagccctgcttga

SEQ ID NO: 75347 - DNA, 2062 bp, Zea Mays
cgggcgagctaaatgaagccaacaaggcaacatgtgcccacgaatgttgtggcatttgagatgaacagattatgtcatctatccggaaatgtcctgaaaatgaataccaaagttagaataagaaagaaggttggtttacatttgctgaaacaaaaggttgctgctggggtatggcatacaaaataatcttagaacaaatgcggctgccatctataaataaaataacaaagataagaacgttcgacatctaggccatttgtgtttttctagcttgcggtcaggtgtatgtatgcatgcttgctatctttgatctcttaaagcaatcgtttaggaaacattgcccttcactccttgtcgtgatgtcgctatctatctggccctttcaattctctcctgtaatatttgtcatctagctttgtgcttattccacataacccctgggtcatctgtgttatgtgagttatgttactgttatcaacctttccttcttcatgtcattagttaccctggtatttctggacttgtcatttttctttccaccgcttctccggataggatttctttactgttagttggccaaacccattatagccaatcaatatatgctaccattctacacacatatatatatatatatatatgtcacttagagaataaatgatatgccttggcttctgaacttgtccttattgtttgacgacacgtgagagaggagctagctgctcttatttttttccttgaacatttagacaaattactattcctataaatatttaattacataagttaatgatcaaaagctaagcacgagtaggcggtgatcatgcatgagcctctccttaactcctagtgaagtacatatgtgctaataactatatatatgcatgattaagttgagttttagttggttcttctttctttgcattggcctgttatgttcatgatgataagtttttaatacagtttccttctatattctccatacgttttctttttcttgtatacttggaatcacatgagctaatcttatttccactacaaatgtagtgcgtacatcccactctagaaataattgttagttgcttatcaattaggctctcgtcctttgcattgctcatatacattgggcgagggcacaccaggttattgagtttgatctgtgttaggatttcttattgatgtgaccattggtattacttatgatacatatagcacatatataccattgtagtaataagtattgtgctcagataatcattaggtaaccattgtaggaaaaaagagttgtacggcttcataagaatgtgcagtacataaaaatgaaccatgcaataggaaattcaagttctagctagtctttgacgccagacaggggcaagaactcaaaattggtgtagattgaatcatccaagcatggacgaaggaggaagggagccgagcaaagggccactacctagagcagatgcacacaggatctgcaggatctgcagaacagagaaatcaaacaagatccaatcgatgggcaggggcaacatcaacctagggattctagggaacttggcagaggcggaagaatcatttggaacttttggggagcgtttgtaggaaataaacagatcgataggcgtctgagctgagaaatccctcgcgtcaccgggcattcccttgacccagatttgcttgccggcctgggtgagccggatgagctcgtccatggcacacgtcgccatgtgaactatcaaggggcgctccattttcgtcacgagcgctggcatctggtacggtagcccgaacgagcatccactgaggaggtagaggtccagcgacgaccgagggagctctactcaggagtccttcccacggacaggtccaagacatggacatggtaacgctctccgtagctcccaaacaatttcacacccgtgtccataatgcgaagggcaggggggaagggatggggtctcacctggatctggatgatgatggcgatgatacccgtacaccgtaatggcaggtaccgccagcgcgagctcacagtcacagacgggatcccgcctctgtc

SEQ ID NO: 75348 - DNA, 327 bp, Zea Mays
atgacaaaacaacctctcttcacgtcgaagacgtctgacccacgacagaaacaatggacccacgagagaaacaatggaccagatagcggatattgcctagattgtcaattgctctggtctagttacattggggccatgtttcgacctcatctcgacaaacctcctatgctctcatcataccacattgctccattgctcgagtgcttaaggttgtacagcttctaggagcttatcattcacttgttgtgtagacaaatcctcaaccttacaacaaatcccaagtatattttttagaagagaaacaatagtaaatacatgtaagaaatt

SEQ ID NO: 75349 - DNA, 2186 bp, Zea Mays
atggcgctcctatctcttaggacccctccctggggatacccgcaaggagacagtggcggccgcagtcgtggccggaagcttcgcgggccccgccgcctcgacgtcgtcgccatccgaagcgccgctttcttccttcggcgagatcgacagccatttgaaactttaaagtctcgattacaaataggtgtaaaccctggtacaatcgtgattaatttgtcagctaggattgctccagcagcagccccctctatgttcctggccccttcatcttcacctgcagaaattttttatgatggttcaatggaggaacccgaacatcctgatataaagcttctaatgacacttcagagaaatccgccaaaggagtcatccccttttctcaaagaagtggtttgcctacaatgagttctgatgtcaatggagaaaatgtcatggataccaaatctgttctccctgtaacgccagaggcgcctctttggtcaacagcagctgatgaagagcttatatatgcaaagaaagaaatcactaatgcaccattgacctcagatgaccctgatctttatgcacccttgttccggaatgtatccatctttaaaaggagttatgaactgatggagagacttcttaaggttttcatatatcatgatggagcaaaacctattttccattccccagagttgaaaggtatctatgcgtctgagggatggtttatgaaattgatggagacaaaccagaattttgttgtgagagatccaaatacagcccatttattctatcttccatatagctctcgtcaactggagcataacctttatgtgcctggctcaaatacaattgagccactgtctatctttgttaaaaattacattgaccttatctcggccaagtacccatattggaataggacaaaaggagctgatcatttctttgttgcttgccatgactgggggccttacacaacaaaattgcatgatgaattgcggaagaacactattaaagctctctgcaatgcagatctctctgaaggattttttatccgtggaaaagatgtttcccttccagaaacattccttaggtcaccaagaagacctctaagagatattggaggaagaccagctgcgcagaggactatcctggccttctttgcagggcagatgcatggtcgagttcgacctgtacttctcaagtattggggaaacaaggatgatgatatgagaatatatagtaggctgccacaccgaatcaccaggaagagaaattacgttcagcatatgaagtcaagcaagtattgcatctgtcccatgggaaagcgatgtacctaagctgaagcaaatcttgttggcaatacccgagagtcgatacataacccttcaggcaaacgtgaaaagggtgcagaagcattttatgtggcatccgaatcctgtcaagtatgacattttccacatgatactacactcagtctggtttagcagggtgaaccagatccgttagagcagcacctgtggttcacatgcctgaattacatatggagggttgtttgctgacccgtttttggtgtgctcgtctgaggaagctgctcatgtggtgggatttggattgtaatcttgtcgacacagctgttccgtgctcaaggtgctgaatggagatgttgatctgacagtagaactggcagtctgtggataaaatacagtttatataggagcaggcttatgactgagttctcattactggtaatttccctcatggatagtttggtgtaaagcgttgacaaaagccgatgaggtgttgtgacgactgacgatgtccctttctgtaagattgtaattttcgttactctttttaacctgggcacgggaaaagatctggaatagggatgcacggggaattctctgtcaggttttagctctccattcccgtttccgcgacaaaaaaaatccttgcaggatccccacaaatgcttgcggggtatttcttctccatccctattttccatggggataaatccccttcggggatcaccgttttcgcttaaattataattagaacatacttattatgttattaatgcaaagcattgtcacttctacacattgtcagatttaagaaatcagtgtgtacattaaaataaatatatatgttatttatataatgagtgatctctttacaatgtaattatttatttttat

SEQ ID NO: 75350 - DNA, 2234 bp, Zea Mays
atggcgctcctatctcttaggacccctccctggggatacccgcaaggagacagtggcggccgcagtcgtggccggaagcttcgcgggccccgccgcctcgacgtcgtcgccatccgaagcgccgctttcttccttcggcgagctaggattgctccagcagcagccccctctatgttcctggccccttcatcttcacctgcagaaattttttatgatggttcaatggaggaacccgaacatcctgatataaagagaaatccgccaaaggagtcatccccttttctcaaagaagagcccatttttagtggtttgcctacaatgagttctgatgtcaatggagaaaatgtcatggataccaaatctgttctccctgtaacgccagaggcgcctctttggtcaacagcagctgatgaagagcttatatatgcaaagaaagaaatcactaatgcaccattgacctcagatgaccctgatctttatgcacccttgttccggaatgtatccatctttaaaaggagttatgaactgatggagagacttcttaaggttttcatatatcatgatggagcaaaacctattttccattccccagagttgaaaggtatctatgcgtctgagggatggtttatgaaattgatggagacaaaccagaattttgttgtgagagatccaaatacagcccatttattctatcttccatatagctctcgtcaactggagcataacctttatgtgcctggctcaaatacaattgagccactgtctatctttgttaaaaattacattgaccttatctcggccaagtacccatattggaataggacaaaaggagctgatcatttctttgttgcttgccatgactgggggccttacacaacaaaattgcatgatgaattgcggaagaacactattaaagctctctgcaatgcagatctctctgaaggattttttatccgtggaaaagatgtttcccttccagaaacattccttaggtcaccaagaagacctctaagagatattggaggaagaccagctgcgcagaggactatcctggccttctttgcagggcagatgcatggtcgagttcgacctgtacttctcaagtattggggaaacaaggatgatgatatgagaatatatagtaggctgccacaccgaatcaccaggaagagaaattacgttcagcatatgaagtcaagcaagtattgcatctgtcccatggggtatgaggtaaatagcccgagaatagtggaggcaatatattatgagtgtgttccagtaataatcgctgaccattttgttctcccgtttgatgccgcactcaactggagtacgttctctgttgtcgtaccagaaagcgatgtacctaagctgaagcaaatcttgttggcaatacccgagagtcgatacataacccttcaggcaaacgtgaaaagggtgcagaagcattttatgtggcatccgaatcctgtcaagtatgacattttccacatgatactacactcagtctggtttagcagggtgaaccagatccgttagagcagcacctgtggttcacatgcctgaattacatatggagggttgtttgctgacccgtttttggtgtgctcgtctgaggaagctgctcatgtggtgggatttggattgtaatcttgtcgacacagctgttccgtgctcaaggtgctgaatggagatgttgatctgacagtagaactggcagtctgtggataaaatacagtttatataggagcaggcttatgactgagttctcattactggtaatttccctcatggatagtttggtgtaaagcgttgacaaaagccgatgaggtgttgtgacgactgacgatgtccctttctgtaagattgtaattttcgttactctttttaacctgggcacgggaaaagatctggaatagggatgcacggggaattctctgtcaggttttagctctccattcccgtttccgcgacaaaaaaaatccttgcaggatccccacaaatgcttgcggggtatttcttctccatccctattttccatggggataaatccccttcggggatcaccgttttcgcttaaattataattagaacatacttattatgttattaatgcaaagcattgtcacttctacacattgtcagatttaagaaatcagtgtgtacattaaaataaatatatatgttatttatataatgagtgatctctttacaatgtaattatttatttttat

SEQ ID NO: 75351 - DNA, 2414 bp, Zea Mays
gtgcccgcagcgtacgcaatgccgcaccaccaccacaccaatccgtcgcatcctcctgcggcgcgcaagctcctctcctggcgccgcgtagtcgccgcctgcgccgttgtcgcggcgctcgcgctcctcctggccgccgcccctgccacggaggaccccagccgatggcgctcctatctcttaggacccctccctggggatacccgcaaggagacagtggcggccgcagtcgtggccggaagcttcgcgggccccgccgcctcgacgtcgtcgccatccgaagcgccgctttcttccttcggcgagattaatttgtcagctaggattgctccagcagcagccccctctatgttcctggccccttcatcttcacctgcagaaattttttatgatggttcaatggaggaacccgaacatcctgatataaagagaaatccgccaaaggagtcatccccttttctcaaagaagagcccatttttagtggtttgcctacaatgagttctgatgtcaatggagaaaatgtcatggataccaaatctgttctccctgtaacgccagagcaggcgcctctttggtcaacagcagctgatgaagagcttatatatgcaaagaaagaaatcactaatgcaccattgacctcagatgaccctgatctttatgcacccttgttccggaatgtatccatctttaaaaggagttatgaactgatggagagacttcttaaggttttcatatatcatgatggagcaaaacctattttccattccccagagttgaaaggtatctatgcgtctgagggatggtttatgaaattgatggagacaaaccagaattttgttgtgagagatccaaatacagcccatttattctatcttccatatagctctcgtcaactggagcataacctttatgtgcctggctcaaatacaattgagccactgtctatctttgttaaaaattacattgaccttatctcggccaagtacccatattggaataggacaaaaggagctgatcatttctttgttgcttgccatgactgggggccttacacaacaaaattgcatgatgaattgcggaagaacactattaaagctctctgcaatgcagatctctctgaaggattttttatccgtggaaaagatgtttcccttccagaaacattccttaggtcaccaagaagacctctaagagatattggaggaagaccagctgcgcagaggactatcctggccttctttgcagggcagatgcatggtcgagttcgacctgtacttctcaagtattggggaaacaaggatgatgatatgagaatatatagtaggctgccacaccgaatcaccaggaagagaaattacgttcagcatatgaagtcaagcaagtattgcatctgtcccatggggtatgaggtaaatagcccgagaatagtggaggcaatatattatgagtgtgttccagtaataatcgctgaccattttgttctcccgtttgatgccgcactcaactggagtacgttctctgttgtcgtaccagaaagcgatgtacctaagctgaagcaaatcttgttggcaatacccgagagtcgatacataacccttcaggcaaacgtgaaaagggtgcagaagcattttatgtggcatccgaatcctgtcaagtatgacattttccacatgatactacactcagtctggtttagcagggtgaaccagatccgttagagcagcacctgtggttcacatgcctgaattacatatggagggttgtttgctgacccgtttttggtgtgctcgtctgaggaagctgctcatgtggtgggatttggattgtaatcttgtcgacacagctgttccgtgctcaaggtgctgaatggagatgttgatctgacagtagaactggcagtctgtggataaaatacagtttatataggagcaggcttatgactgagttctcattactggtaatttccctcatggatagtttggtgtaaagcgttgacaaaagccgatgaggtgttgtgacgactgacgatgtccctttctgtaagattgtaattttcgttactctttttaacctgggcacgggaaaagatctggaatagggatgcacggggaattctctgtcaggttttagctctccattcccgtttccgcgacaaaaaaaatccttgcaggatccccacaaatgcttgcggggtatttcttctccatccctattttccatggggataaatccccttcggggatcaccgttttcgcttaaattataattagaacatacttattatgttattaatgcaaagcattgtcacttctacacattgtcagatttaagaaatcagtgtgtacattaaaataaatatatatgttatttatataatgagtgatctctttacaatgtaattatttatttttat

SEQ ID NO: 75352 - DNA, 2313 bp, Zea Mays
ctctcctccaagcaccgccgtccgtaccacttctcccgtgcccgcagcgtacgcaatgccgcaccaccaccacaccaatccgtcgcatcctcctgcggcgcgcaagctcctctcctggcgccgcgtagtcgccgcctgcgccgttgtcgcggcgctcgcgctcctcctggccgccgcccctgccacggaggaccccagccgatggcgctcctatctcttaggacccctccctggggatacccgcaaggagacagtggcggccgcagtcgtggccggaagcttcgcgggccccgccgcctcgacgtcgtcgccatccgaagcgccgctttcttccttcggcgagattaatttgtcagctaggattgctccagcagcagccccctctatgttcctggccccttcatcttcacctgcagaaattttttatgatggttcaatggaggaacccgaacatcctgatataaagagaaatccgccaaaggagtcatccccttttctcaaagaagagtggtttgcctacaatgagttctgatgtcaatggagaaaatgtcatggataccaaatctgttctccctgtaacgccagaggcgcctctttggtcaacagcagctgatgaagagcttatatatgcaaagaaagaaatcactaatgcaccattgacctcagatgaccctgatctttatgcacccttgttccggaatgtatccatctttaaaaggagttatgaactgatggagagacttcttaaggttttcatatatcatgatggagcaaaacctattttccattccccagagttgaaaggtatctatgcgtctgagggatggtttatgaaattgatggagacaaaccagaattttgttgtgagagatccaaatacagcccatttattctatcttccatatagctctcgtcaactggagcataacctttatgtgcctggctcaaatacaattgagccactgtctatctttgttaaaaattacattgaccttatctcggccaagtacccatattggaataggacaaaaggagctgatcatttctttgttgcttgccatgactgggggccttacacaacaaaattgcatgatgaattgcggaagaacactattaaagctctctgcaatgcagatctctctgaaggattttttatccgtggaaaagatgtttcccttccagaaacattccttaggtcaccaagaagacctctaagagatattggaggaagaccagctgcgcagaggactatcctggccttctttgcagggcagatgcatggtcgagttcgacctgtacttctcaagtattggggaaacaaggatgatgatatgagaatatatagtaggctgccacaccgaatcaccaggaagagaaattacgttcagcatatgaagtcaagcaagtattgcatctgtcccatggggtatgagaaagcgatgtacctaagctgaagcaaatcttgttggcaatacccgagagtcgatacataacccttcaggcaaacgtgaaaagggtgcagaagcattttatgtggcatccgaatcctgtcaagtatgacattttccacatgatactacactcagtctggtttagcagggtgaaccagatccgttagagcagcacctgtggttcacatgcctgaattacatatggagggttgtttgctgacccgtttttggtgtgctcgtctgaggaagctgctcatgtggtgggatttggattgtaatcttgtcgacacagctgttccgtgctcaaggtgctgaatggagatgttgatctgacagtagaactggcagtctgtggataaaatacagtttatataggagcaggcttatgactgagttctcattactggtaatttccctcatggatagtttggtgtaaagcgttgacaaaagccgatgaggtgttgtgacgactgacgatgtccctttctgtaagattgtaattttcgttactctttttaacctgggcacgggaaaagatctggaatagggatgcacggggaattctctgtcaggttttagctctccattcccgtttccgcgacaaaaaaaatccttgcaggatccccacaaatgcttgcggggtatttcttctccatccctattttccatggggataaatccccttcggggatcaccgttttcgcttaaattataattagaacatacttattatgttattaatgcaaagcattgtcacttctacacattgtcagatttaagaaatcagtgtgtacattaaaataaatatatatgttatttatataatgagtgatctctttacaatgtaattatttatttttat

SEQ ID NO: 75353 - DNA, 2513 bp, Zea Mays
ctctcctccaagcaccgccgtccgtaccacttctcccgtgcccgcagcgtacgcaatgccgcaccaccaccacaccaatccgtcgcatcctcctgcggcgcgcaagctcctctcctggcgccgcgtagtcgccgcctgcgccgttgtcgcggcgctcgcgctcctcctggccgccgcccctgccacggaggaccccagccgatggcgctcctatctcttaggacccctccctggggatacccgcaaggagacagtggcggccgcagtcgtggccggaagcttcgcgggccccgccgcctcgacgtcgtcgccatccgaagcgccgctttcttccttcggcgagatcgacagccatttgaaactttaaagtctcgattacaaataggtgtaaaccctggtacaatcgtgattaatttgtcagctaggattgctccagcagcagccccctctatgttcctggccccttcatcttcacctgcagaaattttttatgatggttcaatggaggaacccgaacatcctgatataaagagaaatccgccaaaggagtcatccccttttctcaaagaagagcccatttttagtggtttgcctacaatgagttctgatgtcaatggagaaaatgtcatggataccaaatctgttctccctgtaacgccagaggcgcctctttggtcaacagcagctgatgaagagcttatatatgcaaagaaagaaatcactaatgcaccattgacctcagatgaccctgatctttatgcacccttgttccggaatgtatccatctttaaaaggagttatgaactgatggagagacttcttaaggttttcatatatcatgatggagcaaaacctattttccattccccagagttgaaaggtatctatgcgtctgagggatggtttatgaaattgatggagacaaaccagaattttgttgtgagagatccaaatacagcccatttattctatcttccatatagctctcgtcaactggagcataacctttatgtgcctggctcaaatacaattgagccactgtctatctttgttaaaaattacattgaccttatctcggccaagtacccatattggaataggacaaaaggagctgatcatttctttgttgcttgccatgactgggggccttacacaacaaaattgcatgatgaattgcggaagaacactattaaagctctctgcaatgcagatctctctgaaggattttttatccgtggaaaagatgtttcccttccagaaacattccttaggtcaccaagaagacctctaagagatattggaggaagaccagctgcgcagaggactatcctggccttctttgcagggcagatgcatggtcgagttcgacctgtacttctcaagtattggggaaacaaggatgatgatatgagaatatatagtaggctgccacaccgaatcaccaggaagagaaattacgttcagcatatgaagtcaagcaagtattgcatctgtcccatggggtatgaggtaaatagcccgagaatagtggaggcaatatattatgagtgtgttccagtaataatcgctgaccattttgttctcccgtttgatgccgcactcaactggagtacgttctctgttgtcgtaccagaaagcgatgtacctaagctgaagcaaatcttgttggcaatacccgagagtcgatacataacccttcaggcaaacgtgaaaagggtgcagaagcattttatgtggcatccgaatcctgtcaagtatgacattttccacatgatactacactcagtctggtttagcagggtgaaccagatccgttagagcagcacctgtggttcacatgcctgaattacatatggagggttgtttgctgacccgtttttggtgtgctcgtctgaggaagctgctcatgtggtgggatttggattgtaatcttgtcgacacagctgttccgtgctcaaggtgctgaatggagatgttgatctgacagtagaactggcagtctgtggataaaatacagtttatataggagcaggcttatgactgagttctcattactggtaatttccctcatggatagtttggtgtaaagcgttgacaaaagccgatgaggtgttgtgacgactgacgatgtccctttctgtaagattgtaattttcgttactctttttaacctgggcacgggaaaagatctggaatagggatgcacggggaattctctgtcaggttttagctctccattcccgtttccgcgacaaaaaaaatccttgcaggatccccacaaatgcttgcggggtatttcttctccatccctattttccatggggataaatccccttcggggatcaccgttttcgcttaaattataattagaacatacttattatgttattaatgcaaagcattgtcacttctacacattgtcagatttaagaaatcagtgtgtacattaaaataaatatatatgttatttatataatgagtgatctctttacaatgtaattatttatttttat

SEQ ID NO: 75354 - DNA, 2401 bp, Zea Mays
acacggaaacgtcagaggaacacctcgccgacgtcaccgtccttttacagttctacacttctactacggccgcacgactctcctccaagcaccgccgtccgtaccacttctcccgtgcccgcagcgtacgcaatgccgcaccaccaccacaccaatccgtcgcatcctcctgcggcgcgcaagctcctctcctggcgccgcgtagtcgccgcctgcgccgttgtcgcggcgctcgcgctcctcctggccgccgcccctgccacggaggaccccagccgatggcgctcctatctcttaggacccctccctggggatacccgcaaggagacagtggcggccgcagtcgtggccggaagcttcgcgggccccgccgcctcgacgtcgtcgccatccgaagcgccgctttcttccttcggcgagattaatttgtcagctaggattgctccagcagcagccccctctatgttcctggccccttcatcttcacctgcagaaattttttatgatggttcaatggaggaacccgaacatcctgatataaagagaaatccgccaaaggagtcatccccttttctcaaagaagagcccatttttagtggtttgcctacaatgagttctgatgtcaatggagaaaatgtcatggataccaaatctgttctccctgtaacgccagaggcgcctctttggtcaacagcagctgatgaagagcttatatatgcaaagaaagaaatcactaatgcaccattgacctcagatgaccctgatctttatgcacccttgttccggaatgtatccatctttaaaaggagttatgaactgatggagagacttcttaaggttttcatatatcatgatggagcaaaacctattttccattccccagagttgaaaggtatctatgcgtctgagggatggtttatgaaattgatggagacaaaccagaattttgttgtgagagatccaaatacagcccatttattctatcttccatatagctctcgtcaactggagcataacctttatgtgcctggctcaaatacaattgagccactgtctatctttgttaaaaattacattgaccttatctcggccaagtacccatattggaataggacaaaaggagctgatcatttctttgttgcttgccatgactgggggccttacacaacaaaattgcatgatgaattgcggaagaacactattaaagctctctgcaatgcagatctctctgaaggattttttatccgtggaaaagatgtttcccttccagaaacattccttaggtcaccaagaagacctctaagagatattggaggaagaccagctgcgcagaggactatcctggccttctttgcagggcagatgcatggtcgagttcgacctgtacttctcaagtattggggaaacaaggatgatgatatgagaatatatagtaggctgccacaccgaatcaccaggaagagaaattacgttcagcatatgaagtcaagcaagtattgcatctgtcccatggggtatgagaaagcgatgtacctaagctgaagcaaatcttgttggcaatacccgagagtcgatacataacccttcaggcaaacgtgaaaagggtgcagaagcattttatgtggcatccgaatcctgtcaagtatgacattttccacatgatactacactcagtctggtttagcagggtgaaccagatccgttagagcagcacctgtggttcacatgcctgaattacatatggagggttgtttgctgacccgtttttggtgtgctcgtctgaggaagctgctcatgtggtgggatttggattgtaatcttgtcgacacagctgttccgtgctcaaggtgctgaatggagatgttgatctgacagtagaactggcagtctgtggataaaatacagtttatataggagcaggcttatgactgagttctcattactggtaatttccctcatggatagtttggtgtaaagcgttgacaaaagccgatgaggtgttgtgacgactgacgatgtccctttctgtaagattgtaattttcgttactctttttaacctgggcacgggaaaagatctggaatagggatgcacggggaattctctgtcaggttttagctctccattcccgtttccgcgacaaaaaaaatccttgcaggatccccacaaatgcttgcggggtatttcttctccatccctattttccatggggataaatccccttcggggatcaccgttttcgcttaaattataattagaacatacttattatgttattaatgcaaagcattgtcacttctacacattgtcagatttaagaaatcagtgtgtacattaaaataaatatatatgttatttatataatgagtgatctctttacaatgtaattatttatttttat

SEQ ID NO: 75355 - DNA, 2551 bp, Zea Mays
acacggaaacgtcagaggaacacctcgccgacgtcaccgtccttttacagttctacacttctactacggccgcacgactctcctccaagcaccgccgtccgtaccacttctcccgtgcccgcagcgtacgcaatgccgcaccaccaccacaccaatccgtcgcatcctcctgcggcgcgcaagctcctctcctggcgccgcgtagtcgccgcctgcgccgttgtcgcggcgctcgcgctcctcctggccgccgcccctgccacggaggaccccagccgatggcgctcctatctcttaggacccctccctggggatacccgcaaggagacagtggcggccgcagtcgtggccggaagcttcgcgggccccgccgcctcgacgtcgtcgccatccgaagcgccgctttcttccttcggcgagctaggattgctccagcagcagccccctctatgttcctggccccttcatcttcacctgcagaaattttttatgatggttcaatggaggaacccgaacatcctgatataaaggaagccatgttttctcaatagcttctaatgacacttcagagaaatccgccaaaggagtcatccccttttctcaaagaagagcccatttttagtggtttgcctacaatgagttctgatgtcaatggagaaaatgtcatggataccaaatctgttctccctgtaacgccagaggcgcctctttggtcaacagcagctgatgaagagcttatatatgcaaagaaagaaatcactaatgcaccattgacctcagatgaccctgatctttatgcacccttgttccggaatgtatccatctttaaaaggagttatgaactgatggagagacttcttaaggttttcatatatcatgatggagcaaaacctattttccattccccagagttgaaaggtatctatgcgtctgagggatggtttatgaaattgatggagacaaaccagaattttgttgtgagagatccaaatacagcccatttattctatcttccatatagctctcgtcaactggagcataacctttatgtgcctggctcaaatacaattgagccactgtctatctttgttaaaaattacattgaccttatctcggccaagtacccatattggaataggacaaaaggagctgatcatttctttgttgcttgccatgactgggggccttacacaacaaaattgcatgatgaattgcggaagaacactattaaagctctctgcaatgcagatctctctgaaggattttttatccgtggaaaagatgtttcccttccagaaacattccttaggtcaccaagaagacctctaagagatattggaggaagaccagctgcgcagaggactatcctggccttctttgcagggcagatgcatggtcgagttcgacctgtacttctcaagtattggggaaacaaggatgatgatatgagaatatatagtaggctgccacaccgaatcaccaggaagagaaattacgttcagcatatgaagtcaagcaagtattgcatctgtcccatggggtatgaggtaaatagcccgagaatagtggaggcaatatattatgagtgtgttccagtaataatcgctgaccattttgttctcccgtttgatgccgcactcaactggagtacgttctctgttgtcgtaccagaaagcgatgtacctaagctgaagcaaatcttgttggcaatacccgagagtcgatacataacccttcaggcaaacgtgaaaagggtgcagaagcattttatgtggcatccgaatcctgtcaagtatgacattttccacatgatactacactcagtctggtttagcagggtgaaccagatccgttagagcagcacctgtggttcacatgcctgaattacatatggagggttgtttgctgacccgtttttggtgtgctcgtctgaggaagctgctcatgtggtgggatttggattgtaatcttgtcgacacagctgttccgtgctcaaggtgctgaatggagatgttgatctgacagtagaactggcagtctgtggataaaatacagtttatataggagcaggcttatgactgagttctcattactggtaatttccctcatggatagtttggtgtaaagcgttgacaaaagccgatgaggtgttgtgacgactgacgatgtccctttctgtaagattgtaattttcgttactctttttaacctgggcacgggaaaagatctggaatagggatgcacggggaattctctgtcaggttttagctctccattcccgtttccgcgacaaaaaaaatccttgcaggatccccacaaatgcttgcggggtatttcttctccatccctattttccatggggataaatccccttcggggatcaccgttttcgcttaaattataattagaacatacttattatgttattaatgcaaagcattgtcacttctacacattgtcagatttaagaaatcagtgtgtacattaaaataaatatatatgttatttatataatgagtgatctctttacaatgtaattatttatttttat

SEQ ID NO: 75356 - DNA, 2573 bp, Zea Mays
caaccggctgtctggccgagtcccggagacacacggaaacgtcagaggaacacctcgccgacgtcaccgtccttttacagttctacacttctactacggccgcacgactctcctccaagcaccgccgtccgtaccacttctcccgtgcccgcagcgtacgcaatgccgcaccaccaccacaccaatccgtcgcatcctcctgcggcgcgcaagctcctctcctggcgccgcgtagtcgccgcctgcgccgttgtcgcggcgctcgcgctcctcctggccgccgcccctgccacggaggaccccagccgatggcgctcctatctcttaggacccctccctggggatacccgcaaggagacagtggcggccgcagtcgtggccggaagcttcgcgggccccgccgcctcgacgtcgtcgccatccgaagcgccgctttcttccttcggcgagattaatttgtcagctaggattgctccagcagcagccccctctatgttcctggccccttcatcttcacctgcagaaattttttatgatggttcaatggaggaacccgaacatcctgatataaagcttctaatgacacttcagagaaatccgccaaaggagtcatccccttttctcaaagaagagcccatttttagtggtttgcctacaatgagttctgatgtcaatggagaaaatgtcatggataccaaatctgttctccctgtaacgccagaggcgcctctttggtcaacagcagctgatgaagagcttatatatgcaaagaaagaaatcactaatgcaccattgacctcagatgaccctgatctttatgcacccttgttccggaatgtatccatctttaaaaggagttatgaactgatggagagacttcttaaggttttcatatatcatgatggagcaaaacctattttccattccccagagttgaaaggtatctatgcgtctgagggatggtttatgaaattgatggagacaaaccagaattttgttgtgagagatccaaatacagcccatttattctatcttccatatagctctcgtcaactggagcataacctttatgtgcctggctcaaatacaattgagccactgtctatctttgttaaaaattacattgaccttatctcggccaagtacccatattggaataggacaaaaggagctgatcatttctttgttgcttgccatgactgggggccttacacaacaaaattgcatgatgaattgcggaagaacactattaaagctctctgcaatgcagatctctctgaaggattttttatccgtggaaaagatgtttcccttccagaaacattccttaggtcaccaagaagacctctaagagatattggaggaagaccagctgcgcagaggactatcctggccttctttgcagggcagatgcatggtcgagttcgacctgtacttctcaagtattggggaaacaaggatgatgatatgagaatatatagtaggctgccacaccgaatcaccaggaagagaaattacgttcagcatatgaagtcaagcaagtattgcatctgtcccatggggtatgaggtaaatagcccgagaatagtggaggcaatatattatgagtgtgttccagtaataatcgctgaccattttgttctcccgtttgatgccgcactcaactggagtacgttctctgttgtcgtaccagaaagcgatgtacctaagctgaagcaaatcttgttggcaatacccgagagtcgatacataacccttcaggcaaacgtgaaaagggtgcagaagcattttatgtggcatccgaatcctgtcaagtatgacattttccacatgatactacactcagtctggtttagcagggtgaaccagatccgttagagcagcacctgtggttcacatgcctgaattacatatggagggttgtttgctgacccgtttttggtgtgctcgtctgaggaagctgctcatgtggtgggatttggattgtaatcttgtcgacacagctgttccgtgctcaaggtgctgaatggagatgttgatctgacagtagaactggcagtctgtggataaaatacagtttatataggagcaggcttatgactgagttctcattactggtaatttccctcatggatagtttggtgtaaagcgttgacaaaagccgatgaggtgttgtgacgactgacgatgtccctttctgtaagattgtaattttcgttactctttttaacctgggcacgggaaaagatctggaatagggatgcacggggaattctctgtcaggttttagctctccattcccgtttccgcgacaaaaaaaatccttgcaggatccccacaaatgcttgcggggtatttcttctccatccctattttccatggggataaatccccttcggggatcaccgttttcgcttaaattataattagaacatacttattatgttattaatgcaaagcattgtcacttctacacattgtcagatttaagaaatcagtgtgtacattaaaataaatatatatgttatttatataatgagtgatctctttacaatgtaattatttatttttat

SEQ ID NO: 75357 - DNA, 956 bp, Zea Mays
cttctttgcaaaatagctgtagcaccgttggatgtggtggtgtggtctggattgattttgctatgggagcagcagcgctccttgcgcacaagatacggtgcctttacacatatcaccgatgctttgatgatgacagacaattcattctctattcttaagcaatcatcgtggctaaacgcctcgcgttgtccgtgcccccattcgaggcgagagaattctgggtccgcgaatttggaaaatcataggctgactgtctgttcctcctatccgtttctcgagagatggattcatcctttccttgggtccatcaagcaaaaaaaaaaaaaaaaaaaaaacggagaaagcctaggatcagtgagtacttcttcagttcccctccatgtctcagtacttcttcagtcagatctcccccttgtgacctccccatacctcttcttctcttctggcaactcgcagcggccgagttctaccgtcgccatggacgaaatccatctgggttgcagacctagtgccgagcaatcatctcctcgtacgctgaccaatctccagctcgatttagtggaaggagggccacccagttcgcggagcttcaacaaggagtccttgttggctcttatccccttcgattgcagtgagtcagttggtagatgcaacaaatcaagtcgattgggacgctatgatattgtcggatgcatgggacgacgaaagaagacatgacatgccacgtgaaagtgagatatattgtgaacttggattaatgcaagaggacgaggccgagcaaagaagaagggaggaagcatttgcaggtggatgtagcagcgtggaagatagtgttaaaaaatgtgctaggtgaccggtggcggaggacgccagaaaatttaggtgttgctaacgcaacgaagaataaaaatttatgacatattttaaaataatttatagctacaaaattgatttat

SEQ ID NO: 75358 - DNA, 961 bp, Zea Mays
cttctttgcaaaatagctgtagcaccgttggatgtggtggtgtggtctggattgattttgctatgggagcagcagcgctccttgcgcacaagatacggtgcctttacacatatcaccgatgctttgatgatgacagacaattcattctctattcttaagcaatcatcgtggctaaacgcctcgcgttgtccgtgcccccattcgaggcgagagaattctgggtccgcgaatttggaaaatcataggctgactgtctgttcctcctatccgtttctcgagagatggattcatcctttccttgggtccatcaagcaaaaaaaaaaaaaaaaaaaaaacggagaaagcctaggatcagtgagtacttcttcagttcccctccatgtctcagtacttcttcagtcagatctcccccttgtgacctccccatacctcttcttctcttctggcaactcgcagcggccgagttctaccgtcgccatggacgaaatccatctgggttgcagacctagtgccgagcaatcatctcctcgtacgctgaccaatctccagctcgatttagtggaaggagggccacccagttcgcggagcttcaacaaggagtccttgttggctcttatccccttcgattgcagtgaggatagtcagttggtagatgcaacaaatcaagtcgattgggacgctatgatattgtcggatgcatgggacgacgaaagaagacatgacatgccacgtgaaagtgagatatattgtgaacttggattaatgcaagaggacgaggccgagcaaagaagaagggaggaagcatttgcaggtggatgtagcagcgtggaagatagtgttaaaaaatgtgctaggtgaccggtggcggaggacgccagaaaatttaggtgttgctaacgcaacgaagaataaaaatttatgacatattttaaaataatttatagctacaaaattgatttat

SEQ ID NO: 75359 - DNA, 613 bp, Zea Mays
gtcaacaaggaccggggcttccgtagtgccgttatctgaggctggttgctgcaggactggggatagggaactatgcaacgaatgttggagttgaacacaggtgtctgtaatcatgcttttcacttccactgcatcagcaggtggcttaagactcgccaagtgtgcccattagataacagtgagtgggagttccagaaatatggccactagttcctgggcaccgtcatgtgatgttggggctttgctgccactcaagtgtttttgtctgccaaacagctccatctcttactgctttcgatgcttgcatctatcacccgtcaattataactagctagcagtacgtacacctgggactgtatttggacgatccattgagaggatagtaggcccattttatcaatggtatgtggatcttcataagtgagcttgtattgtgctgtggtaccattttctgaagtcatgtttttttatacgtgcctgtcttgatgttatgaagtgggtttgcctttcggccgcatgtatataggttactgaatgttgcggacaatgccctgaaattatgttgggcactatatcctgtcttgcaagtgataacctggtctcattatgttcc

SEQ ID NO: 75360 - DNA, 543 bp, Zea Mays
gccactgtttacagtgtaaatatgtaccaggtgtctgtaatcatgcttttcacttccactgcatcagcaggtggcttaagactcgccaagtgtgcccattagataacagtgagtgggagttccagaaatatggccactagttcctgggcaccgtcatgtgatgttggggctttgctgccactcaagtgtttttgtctgccaaacagctccatctcttactgctttcgatgcttgcatctatcacccgtcaattataactagctagcagtacgtacacctgggactgtatttggacgatccattgagaggatagtaggcccattttatcaatggtatgtggatcttcataagtgagcttgtattgtgctgtggtaccattttctgaagtcatgtttttttatacgtgcctgtcttgatgttatgaagtgggtttgcctttcggccgcatgtatataggttactgaatgttgcggacaatgccctgaaattatgttgggcactatatcctgtcttgcaagtgataacctggtctcattatgttcc

SEQ ID NO: 75361 - DNA, 555 bp, Zea Mays
gcggcatatcctcgggaaggacacaaaagacatacagttaaggtgtctgtaatcatgcttttcacttccactgcatcagcaggtggcttaagactcgccaagtgtgcccattagataacagtgagtgggagttccagaaatatggccactagttcctgggcaccgtcatgtgatgttggggctttgctgccactcaagtgtttttgtctgccaaacagctccatctcttactgctttcgatgcttgcatctatcacccgtcaattataactagctagcagtacgtacacctgggactgtatttggacgatccattgagaggatagtaggcccattttatcaatggtatgtggatcttcataagtgagcttgtattgtgctgtggtaccattttctgaagtcatgtttttttatacgtgcctgtcttgatgttatgaagtgggtttgcctttcggccgcatgtatataggttactgaatgttgcggacaatgccctgaaattatgttgggcactatatcctgtcttgcaagtgataacctggtctcattatgttcc

SEQ ID NO: 75362 - DNA, 5391 bp, Zea Mays
cccgcccgcctcccgccccgctccccaccgcgctcgctgcgctgcctgtcctggcgctgcgtcctgcggcgccgcgagagttggagggtgctcgtggcgggcagatccggcgtcggcgtcggcgtcggcagacaggctcggaggtgagatcggcgtcggtggcggcggcggagcgcgcgaggtggtcgagggaggaatcggtggcgcgcggaggcgaggacgaggctgaggaggacgtcgagctcggctggtgctgcatgggggtatgaagcgcggcgccagagacgacgcactcatggggtcacagctcaagcgcccgaacgttggccgatccgatccgtcggctcagccacaacacatgcctgtgcccggtttagcgtctgcagccgcaccgccgcctcaagctggtgctgctccgccggcgcagccgcaacagacatccggcgcggccttgaccaaccagaagctgacgacaaatgatgcgctcgtctaccttaaggcagttaaggataagttccaggacaagcgggagaagtacgaggagttcctcgaggtcatgcgcgacttcaagagcgagaggatcgacaccaatggagtgattggccgtgtcaaaacgctgttcaacgggtaccctgaactaatccttgggttcaacgccttcttgccgaagggctatgcgatcaagctacaagaagagaagaagcctgttgattttgtggaagctatcaatttcgtgaacaagataaagaatcgatttcagcatgatgaacgagtttacaaggcattcttggacatcctcaacatgtaccgcaaggataataagtctatccaagatgtttaccatgaggttgctgggctgttcaaggaccataaagatttgcttgaagaattccagcacttcctgcctgatacctcagtggccccacaagcagtggcatcttcaaggggtggtttggttaagcgggaggacaggagctctttgccacctgcaaataggacccttcacaatgagaagagggagagagcttgtctatcacatgctgaccgtgactttagtgttgaccgtcctgatgtggatcatgatcgccagagaagacgtcttgataaagaaaaagaacggaaggtggaaagggatagaagggattatgagagagaagacaaggatggtgaacatgacagtagagacctggagataggacagcgtaagcgaaagccttttccaaggaagatggaggataatgcaggtgcggagacacaccaaggaggccccagtgagaatcatggaatccatagcgtttcttcttcatcatatgacgataaggatgcgctgaagagtgtatacacgcacgagttccatttctgtgagaaggtgaaggaaaaactggagcatgaagcttaccaggagtttttgaaatgtctacacatctacagccaagagattatcacgagaagtgaactgaagaacttggtgaatgatatactccagcattatccagatcttatggaagggtttaatgaattcttggaacattgtgaaaatatagatggatttcttgctggtgtcttcaacaaacgcccaacaacaaggattgttaaaactgaggataaagaaaaggatagagatcgggacagggaggacagggatagagatcgggaaaaggaaagagagaaggaacgagaaagactcgataaagggtcaacattcaattcaaaggacggttcttgtcacaaacctcctatgttttctggcaaagagaagtacaacctatccaaaccaatatcagagcttgatctctcaaactgtcaacgttgcactccgagttaccggcttctacctaaaaattatcccatgccccctgccagcaacaggactgatcttggagcctctgttcttaatgatcactgggtatcagtgacatccggaagtgaagattattcatttaagcacatgcggaagaatcagtatgaggaaagcttatttagatgcgaggatgacaggtttgagttggatatgctgttggaatcagttaatgcagcgactaagcgtgttgaagagctgatagaaaagatgcaagacaactcagtcaaacctgagagtccaatacgcatggatgagcatttaactccgttgaacctgaggtgcattgaacgactgtacggtgatcatggtcttgatgtgatggatgttcttcgcaaaaatgctagtgttgctttgccagttattctaactaggctcaaacagaagcaggaggagtggtcaaggtgccgatcagatttcaacaaagtttgggctgaaatatatgccaagaattatcacaagtcacttgaccatcgtagtttctatttcaagcagcaagatacgaagaacctgagcacaaagtctctcctgacggagataaaagaaattaatgagaagaaaagaaaggaagatgatgtgctccttgccattgctgctggaaataggcgacctatagttcccaatatgtcattcgagtatgtagactcagaaatccatgaagatctacataagatcattaagtactcctgcggtgaaatctgcaattcttcagatcaattagataaagtgatgagaatatggacaacttttgtggagccaattttgggtgttcagcgaaaacatggctccgaggatcctgacctagttaagccaaagagccgaacaacaaaatcgggtattgcaaatgttggggaaagcaacactggagctgggattgtctccaagcataacaacgatgatgaaagtgaacaagggctgccgtctcgggctagaatagcaaatggagttgcagccaacgctcaaaatggtttccatgatgcagatcgaattgcccgtagaggtgaagaatcattaaatgttacacttaatggaagagtgcatggtgctgcctctgcagacgaaacaccttcactaagcacacaaaatattgcttctactgagcgatcagcagagaatgcagctgttgttaggactgaacaacataaggcaaatttggaacttacgccaggcgtgaatggttctagaagttctcatggtgcagttgaggtggctggtgaaggcaaggctgtcaatgaaacattgccttctgctgtgggaggggaaacaggtaggttgggaccatcttttaatggcatcagtgagggaattaaagggcgcctaaataatgatggttctgcaccccatatttcaaaagttgaaagagaagagggtgaattatcgccaaacggagattttgatgaggaccattttgttccttttgaagatggaacatctaaaggaaaggaaggttctacaagcagatcattccagggtaggcatggggaagtggtgccatctgctgaggcagctggtgagaatgatgctgatgctgatgatgaaggtgaggaaagtgctcagaggtctactgaggacagtgaaaatgcttccgaggctggtgaagatgcgtcgggcagtgaatctggtgatggtgaggaatgctttcgtgaagaccacgatgaagaagaagaggatatggatcatgatgatcaggatacaaaagctgaaagtgagggcgaggcagaaggaacaactgagacacatgatgtggaaggaggaatatcactaccactttcagaacgctctctgtactcagtaaaaccacttgccaagcatgtacctacagctttacatgatcgagagaagttctcacgtatattttatggaaacgattcattttatgtcttgttcaggctacatcagatcttatatgagagactactttcagcaaaaactaactcttttaccgctgaaaagaaatggaggaattccaaggatacaaaccctcctgatctatatgcaaagtttatgagtgcgctttacaacttgctcgatggttcttctgacaacacaaaatttgaggacgactgccgagctattattgggactcaatcatatgttctctttactttagataaattgatttataaagttgtgaagcagcttcaagcaatagcaacagatgaaatggacaataagcttctgcagctatatttatatgaaaaatcaagatctcccgggaggttttttgacctagtttatcatgaaaatgcccgtgttctactgcatgatgagagcatataccgatttgaatgttgctcaagtccgacaaggttgtctattcagctgatggaatatggtcacgaaaagccagaagttaccgcagtatcaattgatccaaatttttcttcgtatctttttggcgagtatttatgtagtacgtcagacaagaaattatctgaaggcgtctaccttgcaagattttttgaaggcaatggatggtatcaaagttgtgaatggtctcgaatgcaagatatcctgcaagacctctaaggtctcgtatgtcctagacactgaagatttcttgtcccggcttcggaagagaaggaaaattttgcggggtgggagtgtgtctgacagttcgcagttttcaaaaatatatgctgcaaaagtgcagcgcttcaataggttcctatccaaagcataggatcatttggcatacaaaatgtctcatcattgtatctaaacctggagatattgctgggaccccagttgctttgcttcttcagtgataatatgcaggagttggaagatggtgacgtcatcgacaattcgtcgcagaatgccctttttgaataacagatggggagatctatagggtaaatacagcaaaacgaagcgagcatgtaggccacagcagtcagctctgttgtgcggaaagatgtgtatatatgtattagcaacatgtttgttctgatgacctttttaatgcttttcgatggtaggtctgttccatcaagtatttaactaatcatcatttgttgcagttggtataggtcttctgttctttttttttttgccgtcgtttttcattgaggatgttgccaaaattaaaacctgtgtcaaacagttatgtagtcttgtcttggttaatcttacagacgccgtaatttctcagcctcttgagtgaggtgcttgtacaccctttcattaagcttttgaggcgtggttgacagcaatattctcttgtgtgcatacaattcaattgaagtataggatgtgtttcttctgatcttctcggtgatgtgtatacagtgttcagaagaaactatcttggaagtccaaagtctgctaccgtgtgaggtcgcagtttttccttgcaagtacttgggacttcctctttccttgcacaagctgtccaagcaacagttccagccgtatgttgataaatttgctgatcaactacctaattggaaagctgatttgatgaccagagcaggcaggagaatactagtgcaacatgtgctcacaggtatgactgtgtatctggcaatggc

SEQ ID NO: 75363 - DNA, 5115 bp, Zea Mays
cccgcccgcctcccgccccgctccccaccgcgctcgctgcgctgcctgtcctggcgctgcgtcctgcggcgccgcgagagttggagggtgctcgtggcgggcagatccggcgtcggcgtcggcgtcggcagacaggctcggaggtgagatcggcgtcggtggcggcggcggagcgcgcgaggtggtcgagggaggaatcggtggcgcgcggaggcgaggacgaggctgaggaggacgtcgagctcggctggtgctgcatgggggtatgaagcgcggcgccagagacgacgcactcatggggtcacagctcaagcgcccgaacgttggccgatccgatccgtcggctcagccacaacacatgcctgtgcccggtttagcgtctgcagccgcaccgccgcctcaagctggtgctgctccgccggcgcagccgcaacagacatccggcgcggccttgaccaaccagaagctgacgacaaatgatgcgctcgtctaccttaaggcagttaaggataagttccaggacaagcgggagaagtacgaggagttcctcgaggtcatgcgcgacttcaagagcgagaggatcgacaccaatggagtgattggccgtgtcaaaacgctgttcaacgggtaccctgaactaatccttgggttcaacgccttcttgccgaagggctatgcgatcaagctacaagaagagaagaagcctgttgattttgtggaagctatcaatttcgtgaacaagataaagaatcgatttcagcatgatgaacgagtttacaaggcattcttggacatcctcaacatgtaccgcaaggataataagtctatccaagatgtttaccatgaggttgctgggctgttcaaggaccataaagatttgcttgaagaattccagcacttcctgcctgatacctcagtggccccacaagcagtggcatcttcaaggggtggtttggttaagcgggaggacaggagctctttgccacctgcaaataggacccttcacaatgagaagagggagagagcttgtctatcacatgctgaccgtgactttagtgttgaccgtcctgatgtggatcatgatcgccagagaagacgtcttgataaagaaaaagaacggaaggtggaaagggatagaagggattatgagagagaagacaaggatggtgaacatgacagtagagacctggagataggacagcgtaagcgaaagccttttccaaggaagatggaggataatgcaggtgcggagacacaccaaggaggccccagtgagaatcatggaatccatagcgtttcttcttcatcatatgacgataaggatgcgctgaagagtgtatacacgcacgagttccatttctgtgagaaggtgaaggaaaaactggagcatgaagcttaccaggagtttttgaaatgtctacacatctacagccaagagattatcacgagaagtgaactgaagaacttggtgaatgatatactccagcattatccagatcttatggaagggtttaatgaattcttggaacattgtgaaaatatagatggatttcttgctggtgtcttcaacaaacgcccaacaacaaggattgttaaaactgaggataaagaaaaggatagagatcgggacagggaggacagggatagagatcgggaaaaggaaagagagaaggaacgagaaagactcgataaagggtcaacattcaattcaaaggacggttcttgtcacaaacctcctatgttttctggcaaagagaagtacaacctatccaaaccaatatcagagcttgatctctcaaactgtcaacgttgcactccgagttaccggcttctacctaaaaattatcccatgccccctgccagcaacaggactgatcttggagcctctgttcttaatgatcactgggtatcagtgacatccggaagtgaagattattcatttaagcacatgcggaagaatcagtatgaggaaagcttatttagatgcgaggatgacaggtttgagttggatatgctgttggaatcagttaatgcagcgactaagcgtgttgaagagctgatagaaaagatgcaagacaactcagtcaaacctgagagtccaatacgcatggatgagcatttaactccgttgaacctgaggtgcattgaacgactgtacggtgatcatggtcttgatgtgatggatgttcttcgcaaaaatgctagtgttgctttgccagttattctaactaggctcaaacagaagcaggaggagtggtcaaggtgccgatcagatttcaacaaagtttgggctgaaatatatgccaagaattatcacaagtcacttgaccatcgtagtttctatttcaagcagcaagatacgaagaacctgagcacaaagtctctcctgacggagataaaagaaattaatgagaagaaaagaaaggaagatgatgtgctccttgccattgctgctggaaataggcgacctatagttcccaatatgtcattcgagtatgtagactcagaaatccatgaagatctacataagatcattaagtactcctgcggtgaaatctgcaattcttcagatcaattagataaagtgatgagaatatggacaacttttgtggagccaattttgggtgttcagcgaaaacatggctccgaggatcctgacctagttaagccaaagagccgaacaacaaaatcgggtattgcaaatgttggggaaagcaacactggagctgggattgtctccaagcataacaacgatgatgaaagtgaacaagggctgccgtctcgggctagaatagcaaatggagttgcagccaacgctcaaaatggtttccatgatgcagatcgaattgcccgtagaggtgaagaatcattaaatgttacacttaatggaagagtgcatggtgctgcctctgcagacgaaacaccttcactaagcacacaaaatattgcttctactgagcgatcagcagagaatgcagctgttgttaggactgaacaacataaggcaaatttggaacttacgccaggcgtgaatggttctagaagttctcatggtgcagttgaggtggctggtgaaggcaaggctgtcaatgaaacattgccttctgctgtgggaggggaaacaggtaggttgggaccatcttttaatggcatcagtgagggaattaaagggcgcctaaataatgatggttctgcaccccatatttcaaaagttgaaagagaagagggtgaattatcgccaaacggagattttgatgaggaccattttgttccttttgaagatggaacatctaaaggaaaggaaggttctacaagcagatcattccagggtaggcatggggaagtggtgccatctgctgaggcagctggtgagaatgatgctgatgctgatgatgaaggtgaggaaagtgctcagaggtctactgaggacagtgaaaatgcttccgaggctggtgaagatgcgtcgggcagtgaatctggtgatggtgaggaatgctttcgtgaagaccacgatgaagaagaagaggatatggatcatgatgatcaggatacaaaagctgaaagtgagggcgaggcagaaggaacaactgagacacatgatgtggaaggaggaatatcactaccactttcagaacgctctctgtactcagtaaaaccacttgccaagcatgtacctacagctttacatgatcgagagaagttctcacgtatattttatggaaacgattcattttatgtcttgttcaggctacatcagatcttatatgagagactactttcagcaaaaactaactcttttaccgctgaaaagaaatggaggaattccaaggatacaaaccctcctgatctatatgcaaagtttatgagtgcgctttacaacttgctcgatggttcttctgacaacacaaaatttgaggacgactgccgagctattattgggactcaatcatatgttctctttactttagataaattgatttataaagttgtgaagcagcttcaagcaatagcaacagatgaaatggacaataagcttctgcagctatatttatatgaaaaatcaagatctcccgggaggttttttgacctagtttatcatgaaaatgcccgtgttctactgcatgatgagagcatataccgatttgaatgttgctcaagtccgacaaggttgtctattcagctgatggaatatggtcacgaaaagccagaagttaccgcagtatcaattgatccaaatttttcttcgtatctttttggcgagtatttatgtagtacgtcagacaagaaattatctgaaggcgtctaccttgcaaggaataagcggaaatattcagataatgatgaaccttcagattttttgaaggcaatggatggtatcaaagttgtgaatggtctcgaatgcaagatatcctgcaagacctctaaggtctcgtatgtcctagacactgaagatttcttgtcccggcttcggaagagaaggaaaattttgcggggtgggagtgtgtctgacagttcgcagttttcaaaaatatatgctgcaaaagtgcagcgcttcaataggttcctatccaaagcataggatcatttggcatacaaaatgtctcatcattgtatctaaacctggagatattgctgggaccccagttgctttgcttcttcagtgataatatgcaggagttggaagatggtgacgtcatcgacaattcgtcgcagaatgccctttttgaataacagatggggagatctatagggtaaatacagcaaaacgaagcgagcatgtaggccacagcagtcagctctgttgtgcggaaagatgtgtatatatgtattagcaacatgtttgttctgatgacctttttaatgcttttcgatgtgttcagaagaaactatcttggaagtccaaagtctgctaccgtgtgaggtcgcagtttttccttgcaagtacttgggacttcctctttccttgcacaagctgtccaagcaacagttccagccgtatgttgataaatttgctgatcaactacctaattggaaagctgatttgatgaccagagcaggcaggagaatactagtgcaacatgtgctcacaggtatgactgtgtatctggcaatggc

SEQ ID NO: 75364 - DNA, 5464 bp, Zea Mays
tctcctgtcgttcccccctcccctggcgattagctcccgcccgcctcccgccccgctccccaccgcgctcgctgcgctgcctgtcctggcgctgcgtcctgcggcgccgcgagagttggagggtgctcgtggcgggcagatccggcgtcggcgtcggcgtcggcagacaggctcggaggtgagatcggcgtcggtggcggcggcggagcgcgcgaggtggtcgagggaggaatcggtggcgcgcggaggcgaggacgaggctgaggaggacgtcgagctcggctggtgctgcatgggggtatgaagcgcggcgccagagacgacgcactcatggggtcacagctcaagcgcccgaacgttggccgatccgatccgtcggctcagccacaacacatgcctgtgcccggtttagcgtctgcagccgcaccgccgcctcaagctggtgctgctccgccggcgcagccgcaacagacatccggcgcggccttgaccaaccagaagctgacgacaaatgatgcgctcgtctaccttaaggcagttaaggataagttccaggacaagcgggagaagtacgaggagttcctcgaggtcatgcgcgacttcaagagcgagaggatcgacaccaatggagtgattggccgtgtcaaaacgctgttcaacgggtaccctgaactaatccttgggttcaacgccttcttgccgaagggctatgcgatcaagctacaagaagagaagaagcctgttgattttgtggaagctatcaatttcgtgaacaagataaagaatcgatttcagcatgatgaacgagtttacaaggcattcttggacatcctcaacatgtaccgcaaggataataagtctatccaagatgtttaccatgaggttgctgggctgttcaaggaccataaagatttgcttgaagaattccagcacttcctgcctgatacctcagtggccccacaagcagtggcatcttcaaggggtggtttggttaagcgggaggacaggagctctttgccacctgcaaataggacccttcacaatgagaagagggagagagcttgtctatcacatgctgaccgtgactttagtgttgaccgtcctgatgtggatcatgatcgccagagaagacgtcttgataaagaaaaagaacggaaggtggaaagggatagaagggattatgagagagaagacaaggatggtgaacatgacagtagagacctggagataggacagcgtaagcgaaagccttttccaaggaagatggaggataatgcaggtgcggagacacaccaaggaggccccagtgagaatcatggaatccatagcgtttcttcttcatcatatgacgataaggatgcgctgaagagtgtatacacgcacgagttccatttctgtgagaaggtgaaggaaaaactggagcatgaagcttaccaggagtttttgaaatgtctacacatctacagccaagagattatcacgagaagtgaactgaagaacttggtgaatgatatactccagcattatccagatcttatggaagggtttaatgaattcttggaacattgtgaaaatatagatggatttcttgctggtgtcttcaacaaacgcccaacaacaaggattgttaaaactgaggataaagaaaaggatagagatcgggacagggaggacagggatagagatcgggaaaaggaaagagagaaggaacgagaaagactcgataaagggtcaacattcaattcaaaggacggttcttgtcacaaacctcctatgttttctggcaaagagaagtacaacctatccaaaccaatatcagagcttgatctctcaaactgtcaacgttgcactccgagttaccggcttctacctaaaaattatcccatgccccctgccagcaacaggactgatcttggagcctctgttcttaatgatcactgggtatcagtgacatccggaagtgaagattattcatttaagcacatgcggaagaatcagtatgaggaaagcttatttagatgcgaggatgacaggtttgagttggatatgctgttggaatcagttaatgcagcgactaagcgtgttgaagagctgatagaaaagatgcaagacaactcagtcaaacctgagagtccaatacgcatggatgagcatttaactccgttgaacctgaggtgcattgaacgactgtacggtgatcatggtcttgatgtgatggatgttcttcgcaaaaatgctagtgttgctttgccagttattctaactaggctcaaacagaagcaggaggagtggtcaaggtgccgatcagatttcaacaaagtttgggctgaaatatatgccaagaattatcacaagtcacttgaccatcgtagtttctatttcaagcagcaagatacgaagaacctgagcacaaagtctctcctgacggagataaaagaaattaatgagaagaaaagaaaggaagatgatgtgctccttgccattgctgctggaaataggcgacctatagttcccaatatgtcattcgagtatgtagactcagaaatccatgaagatctacataagatcattaagtactcctgcggtgaaatctgcaattcttcagatcaattagataaagtgatgagaatatggacaacttttgtggagccaattttgggtgttcagcgaaaacatggctccgaggatcctgacctagttaagccaaagagccgaacaacaaaatcgggtattgcaaatgttggggaaagcaacactggagctgggattgtctccaagcataacaacgatgatgaaagtgaacaagggctgccgtctcgggctagaatagcaaatggagttgcagccaacgctcaaaatggtttccatgatgcagatcgaattgcccgtagaggtgaagaatcattaaatgttacacttaatggaagagtgcatggtgctgcctctgcagacgaaacaccttcactaagcacacaaaatattgcttctactgagcgatcagcagagaatgcagctgttgttaggactgaacaacataaggcaaatttggaacttacgccaggcgtgaatggttctagaagttctcatggtgcagttgaggtggctggtgaaggcaaggctgtcaatgaaacattgccttctgctgtgggaggggaaacaggtaggttgggaccatcttttaatggcatcagtgagggaattaaagggcgcctaaataatgatggttctgcaccccatatttcaaaagttgaaagagaagagggtgaattatcgccaaacggagattttgatgaggaccattttgttccttttgaagatggaacatctaaaggaaaggaaggttctacaagcagatcattccagggtaggcatggggaagtggtgccatctgctgaggcagctggtgagaatgatgctgatgctgatgatgaaggtgaggaaagtgctcagaggtctactgaggacagtgaaaatgcttccgaggctggtgaagatgcgtcgggcagtgaatctggtgatggtgaggaatgctttcgtgaagaccacgatgaagaagaagaggatatggatcatgatgatcaggatacaaaagctgaaagtgagggcgaggcagaaggaacaactgagacacatgatgtggaaggaggaatatcactaccactttcagaacgctctctgtactcagtaaaaccacttgccaagcatgtacctacagctttacatgatcgagagaagttctcacgtatattttatggaaacgattcattttatgtcttgttcaggctacatcagatcttatatgagagactactttcagcaaaaactaactcttttaccgctgaaaagaaatggaggaattccaaggatacaaaccctcctgatctatatgcaaagtttatgagtgcgctttacaacttgctcgatggttcttctgacaacacaaaatttgaggacgactgccgagctattattgggactcaatcatatgttctctttactttagataaattgatttataaagttgtgaagcagcttcaagcaatagcaacagatgaaatggacaataagcttctgcagctatatttatatgaaaaatcaagatctcccgggaggttttttgacctagtttatcatgaaaatgcccgtgttctactgcatgatgagagcatataccgatttgaatgttgctcaagtccgacaaggttgtctattcagctgatggaatatggtcacgaaaagccagaagttaccgcagtatcaattgatccaaatttttcttcgtatctttttggcgagtatttatgtagtacgtcagacaagaaattatctgaaggcgtctaccttgcaaggaataagcggaaatattcagataatgatgaaccttcagattttttgaaggcaatggatggtatcaaagttgtgaatggtctcgaatgcaagatatcctgcaagacctctaaggtctcgtatgtcctagacactgaagatttcttgtcccggcttcggaagagaaggaaaattttgcggggtgggagtgtgtctgacagttcgcagttttcaaaaatatatgctgcaaaagtgcagcgcttcaataggttcctatccaaagcataggatcatttggcatacaaaatgtctcatcattgtatctaaacctggagatattgctgggaccccagttgctttgcttcttcagtgataatatgcaggagttggaagatggtgacgtcatcgacaattcgtcgcagaatgccctttttgaataacagatggggagatctatagggtaaatacagcaaaacgaagcgagcatgtaggccacagcagtcagctctgttgtgcggaaagatgtgtatatatgtattagcaacatgtttgttctgatgacctttttaatgcttttcgatggtaggtctgttccatcaagtatttaactaatcatcatttgttgcagttggtataggtcttctgttctttttttttttgccgtcgtttttcattgaggatgttgccaaaattaaaacctgtgtcaaacagttatgtagtcttgtcttggttaatcttacagacgccgtaatttctcagcctcttgagtgaggtgcttgtacaccctttcattaagcttttgaggcgtggttgacagcaatattctcttgtgtgcatacaattcaattgaagtataggatgtgtttcttctgatcttctcggtgatgtgtatacagtgttcagaagaaactatcttggaagtccaaagtctgctaccgtgtgaggtcgcagtttttccttgcaagtacttgggacttcctctttccttgcacaagctgtccaagcaacagttccagccgtatgttgataaatttgctgatcaactacctaattggaaagctgatttgatgaccagagcaggcaggagaatactagtgcaacatgtgctcacaggtatgactgtgtatctggcaatggc

SEQ ID NO: 75365 - DNA, 3751 bp, Zea Mays
atgtttactattggagaacttatgctctcaggtgtatacacgcacgagttccatttctgtgagaaggtgaaggaaaaactggagcatgaagcttaccaggagtttttgaaatgtctacacatctacagccaagagattatcacgagaagtgaactgaagaacttggtgaatgatatactccagcattatccagatcttatggaagggtttaatgaattcttggaacattgtgaaaatatagatggatttcttgctggtgtcttcaacaaacgcccaacaacaaggattgttaaaactgaggataaagaaaaggatagagatcgggacagggaggacagggatagagatcgggaaaaggaaagagagaaggaacgagaaagactcgataaagggtcaacattcaattcaaaggacggttcttgtcacaaacctcctatgttttctggcaaagagaagtacaacctatccaaaccaatatcagagcttgatctctcaaactgtcaacgttgcactccgagttaccggcttctacctaaaaattatcccatgccccctgccagcaacaggactgatcttggagcctctgttcttaatgatcactgggtatcagtgacatccggaagtgaagattattcatttaagcacatgcggaagaatcagtatgaggaaagcttatttagatgcgaggatgacaggtttgagttggatatgctgttggaatcagttaatgcagcgactaagcgtgttgaagagctgatagaaaagatgcaagacaactcagtcaaacctgagagtccaatacgcatggatgagcatttaactccgttgaacctgaggtgcattgaacgactgtacggtgatcatggtcttgatgtgatggatgttcttcgcaaaaatgctagtgttgctttgccagttattctaactaggctcaaacagaagcaggaggagtggtcaaggtgccgatcagatttcaacaaagtttgggctgaaatatatgccaagaattatcacaagtcacttgaccatcgtagtttctatttcaagcagcaagatacgaagaacctgagcacaaagtctctcctgacggagataaaagaaattaatgagaagaaaagaaaggaagatgatgtgctccttgccattgctgctggaaataggcgacctatagttcccaatatgtcattcgagtatgtagactcagaaatccatgaagatctacataagatcattaagtactcctgcggtgaaatctgcaattcttcagatcaattagataaagtgatgagaatatggacaacttttgtggagccaattttgggtgttcagcgaaaacatggctccgaggatcctgacctagttaagccaaagagccgaacaacaaaatcgggtattgcaaatgttggggaaagcaacactggagctgggattgtctccaagcataacaacgatgatgaaagtgaacaagggctgccgtctcgggctagaatagcaaatggagttgcagccaacgctcaaaatggtttccatgatgcagatcgaattgcccgtagaggtgaagaatcattaaatgttacacttaatggaagagtgcatggtgctgcctctgcagacgaaacaccttcactaagcacacaaaatattgcttctactgagcgatcagcagagaatgcagctgttgttaggactgaacaacataaggcaaatttggaacttacgccaggcgtgaatggttctagaagttctcatggtgcagttgaggtggctggtgaaggcaaggctgtcaatgaaacattgccttctgctgtgatggaacatctaaaggaaaggaaggttctacaagcagatcattccagggtaggcatggggaagtggtgccatctgctgaggcagctggtgagaatgatgctgatgctgatgatgaaggtgaggaaagtgctcagaggtctactgaggacagtgaaaatgcttccgaggctggtgaagatgcgtcgggcagtgaatctggtgatggtgaggaatgctttcgtgaagaccacgatgaagaagaagaggatatggatcatgatgatcaggatacaaaagctgaaagtgagggcgaggcagaaggaacaactgagacacatgatgtggaaggaggaatatcactaccactttcagaacgctctctgtactcagtaaaaccacttgccaagcatgtacctacagctttacatgatcgagagaagttctcacgtatattttatggaaacgattcattttatgtcttgttcaggctacatcagatcttatatgagagactactttcagcaaaaactaactcttttaccgctgaaaagaaatggaggaattccaaggatacaaaccctcctgatctatatgcaaagtttatgagtgcgctttacaacttgctcgatggttcttctgacaacacaaaatttgaggacgactgccgagctattattgggactcaatcatatgttctctttactttagataaattgatttataaagttgtgaagcagcttcaagcaatagcaacagatgaaatggacaataagcttctgcagctatatttatatgaaaaatcaagatctcccgggaggttttttgacctagtttatcatgaaaatgcccgtgttctactgcatgatgagagcatataccgatttgaatgttgctcaagtccgacaaggttgtctattcagctgatggaatatggtcacgaaaagccagaagttaccgcagtatcaattgatccaaatttttcttcgtatctttttggcgagtatttatgtagtacgtcagacaagaaattatctgaaggcgtctaccttgcaagattttttgaaggcaatggatggtatcaaagttgtgaatggtctcgaatgcaagatatcctgcaagacctctaaggtctcgtatgtcctagacactgaagatttcttgtcccggcttcggaagagaaggaaaattttgcggggtgggagtgtgtctgacagttcgcagttttcaaaaatatatgctgcaaaagtgcagcgcttcaataggttcctatccaaagcataggatcatttggcatacaaaatgtctcatcattgtatctaaacctggagatattgctgggaccccagttgctttgcttcttcagtgataatatgcaggagttggaagatggtgacgtcatcgacaattcgtcgcagaatgccctttttgaataacagatggggagatctatagggtaaatacagcaaaacgaagcgagcatgtaggccacagcagtcagctctgttgtgcggaaagatgtgtatatatgtattagcaacatgtttgttctgatgacctttttaatgcttttcgatggtaggtctgttccatcaagtatttaactaatcatcatttgttgcagttggtataggtcttctgttctttttttttttgccgtcgtttttcattgaggatgttgccaaaattaaaacctgtgtcaaacagttatgtagtcttgtcttggttaatcttacagacgccgtaatttctcagcctcttgagtgaggtgcttgtacaccctttcattaagcttttgaggcgtggttgacagcaatattctcttgtgtgcatacaattcaattgaagtataggatgtgtttcttctgatcttctcggtgatgtgtatacaggtgcatacatagatttttctctagaatatatctataaaatctagacaatgtctaaaccgttttaagtattcctt

SEQ ID NO: 75366 - DNA, 3909 bp, Zea Mays
atgtttactattggagaacttatgctctcaggtgtatacacgcacgagttccatttctgtgagaaggtgaaggaaaaactggagcatgaagcttaccaggagtttttgaaatgtctacacatctacagccaagagattatcacgagaagtgaactgaagaacttggtgaatgatatactccagcattatccagatcttatggaagggtttaatgaattcttggaacattgtgaaaatatagatggatttcttgctggtgtcttcaacaaacgcccaacaacaaggattgttaaaactgaggataaagaaaaggatagagatcgggacagggaggacagggatagagatcgggaaaaggaaagagagaaggaacgagaaagactcgataaagggtcaacattcaattcaaaggacggttcttgtcacaaacctcctatgttttctggcaaagagaagtacaacctatccaaaccaatatcagagcttgatctctcaaactgtcaacgttgcactccgagttaccggcttctacctaaaaattatcccatgccccctgccagcaacaggactgatcttggagcctctgttcttaatgatcactgggtatcagtgacatccggaagtgaagattattcatttaagcacatgcggaagaatcagtatgaggaaagcttatttagatgcgaggatgacaggtttgagttggatatgctgttggaatcagttaatgcagcgactaagcgtgttgaagagctgatagaaaagatgcaagacaactcagtcaaacctgagagtccaatacgcatggatgagcatttaactccgttgaacctgaggtgcattgaacgactgtacggtgatcatggtcttgatgtgatggatgttcttcgcaaaaatgctagtgttgctttgccagttattctaactaggctcaaacagaagcaggaggagtggtcaaggtgccgatcagatttcaacaaagtttgggctgaaatatatgccaagaattatcacaagtcacttgaccatcgtagtttctatttcaagcagcaagatacgaagaacctgagcacaaagtctctcctgacggagataaaagaaattaatgagaagaaaagaaaggaagatgatgtgctccttgccattgctgctggaaataggcgacctatagttcccaatatgtcattcgagtatgtagactcagaaatccatgaagatctacataagatcattaagtactcctgcggtgaaatctgcaattcttcagatcaattagataaagtgatgagaatatggacaacttttgtggagccaattttgggtgttcagcgaaaacatggctccgaggatcctgacctagttaagccaaagagccgaacaacaaaatcgggtattgcaaatgttggggaaagcaacactggagctgggattgtctccaagcataacaacgatgatgaaagtgaacaagggctgccgtctcgggctagaatagcaaatggagttgcagccaacgctcaaaatggtttccatgatgcagatcgaattgcccgtagaggtgaagaatcattaaatgttacacttaatggaagagtgcatggtgctgcctctgcagacgaaacaccttcactaagcacacaaaatattgcttctactgagcgatcagcagagaatgcagctgttgttaggactgaacaacataaggcaaatttggaacttacgccaggcgtgaatggttctagaagttctcatggtgcagttgaggtggctggtgaaggcaaggctgtcaatgaaacattgccttctgctgtgggaggggaaacaggtaggttgggaccatcttttaatggcatcagtgagggaattaaagggcgcctaaataatgatggttctgcaccccatatttcaaaagttgaaagagaagagggtgaattatcgccaaacggagattttgatgaggaccattttgttccttttgaagatggaacatctaaaggaaaggaaggttctacaagcagatcattccagggtaggcatggggaagtggtgccatctgctgaggcagctggtgagaatgatgctgatgctgatgatgaaggtgaggaaagtgctcagaggtctactgaggacagtgaaaatgcttccgaggctggtgaagatgcgtcgggcagtgaatctggtgatggtgaggaatgctttcgtgaagaccacgatgaagaagaagaggatatggatcatgatgatcaggatacaaaagctgaaagtgagggcgaggcagaaggaacaactgagacacatgatgtggaaggaggaatatcactaccactttcagaacgctctctgtactcagtaaaaccacttgccaagcatgtacctacagctttacatgatcgagagaagttctcacgtatattttatggaaacgattcattttatgtcttgttcaggctacatcagatcttatatgagagactactttcagcaaaaactaactcttttaccgctgaaaagaaatggaggaattccaaggatacaaaccctcctgatctatatgcaaagtttatgagtgcgctttacaacttgctcgatggttcttctgacaacacaaaatttgaggacgactgccgagctattattgggactcaatcatatgttctctttactttagataaattgatttataaagttgtgaagcagcttcaagcaatagcaacagatgaaatggacaataagcttctgcagctatatttatatgaaaaatcaagatctcccgggaggttttttgacctagtttatcatgaaaatgcccgtgttctactgcatgatgagagcatataccgatttgaatgttgctcaagtccgacaaggttgtctattcagctgatggaatatggtcacgaaaagccagaagttaccgcagtatcaattgatccaaatttttcttcgtatctttttggcgagtatttatgtagtacgtcagacaagaaattatctgaaggcgtctaccttgcaaggcaatggatggtatcaaagttgtgaatggtctcgaatgcaagatatcctgcaagacctctaaggtctcgtatgtcctagacactgaagatttcttgtcccggcttcggaagagaaggaaaattttgcggggtgggagtgtgtctgacagttcgcagttttcaaaaatatatgctgcaaaagtgcagcgcttcaataggttcctatccaaagcataggatcatttggcatacaaaatgtctcatcattgtatctaaacctggagatattgctgggaccccagttgctttgcttcttcagtgataatatgcaggagttggaagatggtgacgtcatcgacaattcgtcgcagaatgccctttttgaataacagatggggagatctatagggtaaatacagcaaaacgaagcgagcatgtaggccacagcagtcagctctgttgtgcggaaagatgtgtatatatgtattagcaacatgtttgttctgatgacctttttaatgcttttcgatggtaggtctgttccatcaagtatttaactaatcatcatttgttgcagttggtataggtcttctgttctttttttttttgccgtcgtttttcattgaggatgttgccaaaattaaaacctgtgtcaaacagttatgtagtcttgtcttggttaatcttacagacgccgtaatttctcagcctcttgagtgaggtgcttgtacaccctttcattaagcttttgaggcgtggttgacagcaatattctcttgtgtgcatacaattcaattgaagtataggatgtgtttcttctgatcttctcggtgatgtgtatacaggtgcatacatagatttttctctagaatatatctataaaatctagacaatgtctaaaccgttttaagtattcctt

SEQ ID NO: 75367 - DNA, 2202 bp, Zea Mays
ccagcccccgagccgtttctcttctatttcgtcttccgcctcggtcccttctctcctgtcgttcccccctcccctggcgattagctcccgcccgcctcccgccccgctccccaccgcgctcgctgcgctgcctgtcctggcgctgcgtcctgcggcgccgcgagagttggagggtgctcgtggcgggcagatccggcgtcggcgtcggcgtcggcagacaggctcggaggtgagatcggcgtcggtggcggcggcggagcgcgcgaggtggtcgagggaggaatcggtggcgcgcggaggcgaggacgaggctgaggaggacgtcgagctcggctggtgctgcatgggggtatgaagcgcggcgccagagacgacgcactcatggggtcacagctcaagcgcccgaacgttggccgatccgatccgtcggctcagccacaacacatgcctgtgcccggtttagcgtctgcagccgcaccgccgcctcaagctggtgctgctccgccggcgcagccgcaacagacatccggcgcggccttgaccaaccagaagctgacgacaaatgatgcgctcgtctaccttaaggcagttaaggataagttccaggacaagcgggagaagtacgaggagttcctcgaggtcatgcgcgacttcaagagcgagaggatcgacaccaatggagtgattggccgtgtcaaaacgctgttcaacgggtaccctgaactaatccttgggttcaacgccttcttgccgaagggctatgcgatcaagctacaagaagagaagaagcctgttgattttgtggaagctatcaatttcgtgaacaagataaagaatcgatttcagcatgatgaacgagtttacaaggcattcttggacatcctcaacatgtaccgcaaggataataagtctatccaagatgtttaccatgaggttgctgggctgttcaaggaccataaagatttgcttgaagaattccagcacttcctgcctgatacctcagtggccccacaagcagtggcatcttcaaggggtggtttggttaagcgggaggacaggagctctttgccacctgcaaataggacccttcacaatgagaagagggagagagcttgtctatcacatgctgaccgtgactttagtgttgaccgtcctgatgtggatcatgatcgccagagaagacgtcttgataaagaaaaagaacggaaggtggaaagggatagaagggattatgagagagaagacaaggatggtgaacatgacagtagagacctggagataggacagcgtaagcgaaagccttttccaaggaagatggaggataatgcaggtgcggagacacaccaaggaggccccagtgagaatcatggaatccatagcgtttcttcttcatcatatgacgataaggatgcgctgaagagtgtatacacgcacgagttccatttctgtgagaaggtgaaggaaaaactggagcatgaagcttaccaggagtttttgaaatgtctacacatctacagccaagagattatcacgagaagtgaactgaagaacttggtgaatgatatactccagcattatccagatcttatggaagggtttaatgaattcttggaacattgtgaaaatataggtaatttacaaactttatacatttgtatgatcatattgtaacatttcaattgtccaagtttcatggttttacctagtttggccccttgttgcagatggatttcttgctggtgtcttcaacaaacgcccaacaacaaggattgttaaaactgaggataaagaaaaggatagagatcgggacagggaggacagggatagagatcgggaaaaggaaagagagaaggaacgagaaagactcgataaagggtcaacattcaattcaaaggacggttcttgtcacaaacctcctatgttttctggcaaagagaagtacaacctatccaaaccaatatcagagcttgatctctcaaactgtcaacgttgcactccgagttaccggcttctacctaaaaattatcccatgccccctgccagcaacaggactgatcttggagcctctgttcttaatgatcactgggtatcagtgacatccggaagtgaagattattcatttaagcacatgcggaagaatcagtatgaggaaagcttatttagatgcgaggatgacaggctgcagcaatatctaaacctttg

SEQ ID NO: 75368 - DNA, 1777 bp, Zea Mays
accaccgccactccgccacagttcgaatattcctagcttgagattgcaagaggtctccaagaggagggtaggggagccgagcgctcagctctaattttctccatctattgctaacaggtgcgccgctttcttcgccttccgccttatctttgcctggtccatccttaaatccgggcattctggctgttgcgttcgagggctgctgcgcccgccgattggagtcactcttcttgacgctctccactgtcattgccttgtgctagtttcgtgagcagtatttggttcaagctaactgccagctgttatgcgaaggctgttatttttccttatccagttgtgaactgtgtttgtgttccgattggggatatataacctgcggccctgcgccttctgaatcgtatcccaatgcatttcgatgcaacggccgttgttctgcagtggcagcacagtgttgccatcattattaccgtgattcagtatgcgttctgccgttctttagtttcggcattcatcattatgccatcatcggttgcgattcgttctagtgaaaaaaaaatctgccttgcttacattcaaaggcttctattggctggaattcttttcaacccttgtttcgcaatacgctcagccaatcagttgattggctcttcctaacgaaatcgtttgcttcgcacggtttacctgggcttcttttttttctgtctggagaatacctgttgattttagaaaaaaaaatggaaatgattgcccttacatcataatggaaagcaggcgtggttggtgcttttgttattgtgtttggtgttgtggttggcatgaactgaaattccactctaatctgttagctctggccaatcatataaaaaaacgttggttacaagccaaatggcacttcctggtagctgctgattttctatcgacaagatcagagcagctcagacctcaggcaagggaggtacaatgccaagagcaaatgagatgttgagggcagattcaagaatgatggtggtctttggtgccttgtcatcgaaaccagagcaactgacatttgaagaatccctcatatttgtcaagaaagttaaagcccgtgactacatgctgtacctgtcattattcgacgttctcggcagaacggaattaccccagctcgacgcctaccgagagttacagcagatgtttcaaaaccacccagatctgcgcgaagagctcgagaggttcagaccgccgccgccgccgccggtgcctacctcaaagcaggcagcaaacaacaacatctggccctgggtcatcgtgtgcgctgctgtcccgttggtcgcagccagcctgctcccgtcactttgaaacccagtgctgtggcttgctcaacaccctgttggccaaaaaatggccgtctgatcgaagaaccgctgcatgcagtacatacattacatgtgcagtggaccgaaccggcctcctgttgctattcgtgccatcacaactgaatcacagtattgtctgtgtatatatattagagtagtgttctggaagggaacctgcgttcttggtcatcaggtaccactgggcaagaaatgtagtcggtacttgctggcggcgcggtgcaacggtttggccatttgggttgggctttaactgctaaaaatcaagcttgcattgtttgaatctccttttggcagccatgactgagcccaggtttgttgttgtgctgtgagttatgggatcatctcctgctgctgctgctgcttcttttttttttttccaaatcaatggtctgatcaac

SEQ ID NO: 75369 - DNA, 1884 bp, Zea Mays
accaccgccactccgccacagttcgaatattcctagcttgagattgcaagaggtctccaagaggagggtaggggagccgagcgctcagctctaattttctccatctattgctaacaggtgcgccgctttcttcgccttccgccttatctttgcctggtccatccttaaatccgggcattctggctgttgcgttcgagggctgctgcgcccgccgattggagtcactcttcttgacgctctccactgtcattgccttgtgctagtttcgtgagcagtatttggttcaagctaactgccagctgttatgcgaaggctgttatttttccttatccagttgtgaactgtgtttgtgttccgattggggatatataacctgcggccctgcgccttctgaatcgtatcccaatgcatttcgatgcaacggccgttgttctgcagtggcagcacagtgttgccatcattattaccgtgattcagtatgcgttctgccgttctttagtttcggcattcatcattatgccatcatcggttgcgattcgttctagtgaaaaaaaaatctgccttgcttacattcaaaggcttctattggctggaattcttttcaacccttgtttcgcaatacgctcagccaatcagttgattggctcttcctaacgaaatcgtttgcttcgcacggtttacctgggcttcttttttttctgtctggagaatacctgttgattttagaaaaaaaaatggaaatgattgcccttacatcataatggaaagcaggcgtggttggtgcttttgttattgtgtttggtgttgtggttggcatgaactgaaattccactctaatctgttagctctggccaatcatataaaaaaacgttggttacaagccaaatggcacttcctggtagctgctgattttctatcgacaagatcagaggtaaactgtatggggttgtttgttggtttttagttgagactgcttatttctgagaatggtgtggttatattcctttaatgatggcaatttcttcttctatagcagctcagacctcaggcaagggaggtacaatgccaagagcaaatgagatgttgagggcagattcaagaatgatggtggtctttggtgccttgtcatcgaaaccagagcaactgacatttgaagaatccctcatatttgtcaagaaagttaaagcccgtgactacatgctgtacctgtcattattcgacgttctcggcagaacggaattaccccagctcgacgcctaccgagaggtacgttacagcagatgtttcaaaaccacccagatctgcgcgaagagctcgagaggttcagaccgccgccgccgccgccggtgcctacctcaaagcaggcagcaaacaacaacatctggccctgggtcatcgtgtgcgctgctgtcccgttggtcgcagccagcctgctcccgtcactttgaaacccagtgctgtggcttgctcaacaccctgttggccaaaaaatggccgtctgatcgaagaaccgctgcatgcagtacatacattacatgtgcagtggaccgaaccggcctcctgttgctattcgtgccatcacaactgaatcacagtattgtctgtgtatatatattagagtagtgttctggaagggaacctgcgttcttggtcatcaggtaccactgggcaagaaatgtagtcggtacttgctggcggcgcggtgcaacggtttggccatttgggttgggctttaactgctaaaaatcaagcttgcattgtttgaatctccttttggcagccatgactgagcccaggtttgttgttgtgctgtgagttatgggatcatctcctgctgctgctgctgcttcttttttttttttccaaatcaatggtctgatcaac

SEQ ID NO: 75370 - DNA, 1111 bp, Zea Mays
gacccgcaacccatgggtccagatgtcatacatcaaaatcgctttctgctgtgtcgaaggatacctcgccgcttcgtcttccccgtcccctttcgcctttcccctcctatcgacaccaccatgtccaccaccaccgccactccgccacagttcgaatattcctagcttgagattgcaagaggtctccaagaggagggtaggggagccgagcgctcagctctaattttctccatctattgctaacagctcagacctcaggcaagggaggtacaatgccaagagcaaatgagatgttgagggcagattcaagaatgatggtggtctttggtgccttgtcatcgaaaccagagcaactgacatttgaagaatccctcatatttgtcaagaaagttaaagcccgtgactacatgctgtacctgtcattattcgacgttctcggcagaacggaattaccccagctcgacgcctaccgagaggtacggtacgagtaccatcctctccctggccacacttgctgaaagcatgaatctgcgcgaagagctcgagaggttcagaccgccgccgccgccgccggtgcctacctcaaagcaggcagcaaacaacaacatctggccctgggtcatcgtgtgcgctgctgtcccgttggtcgcagccagcctgctcccgtcactttgaaacccagtgctgtggcttgctcaacaccctgttggccaaaaaatggccgtctgatcgaagaaccgctgcatgcagtacatacattacatgtgcagtggaccgaaccggcctcctgttgctattcgtgccatcacaactgaatcacagtattgtctgtgtatatatattagagtagtgttctggaagggaacctgcgttcttggtcatcaggtaccactgggcaagaaatgtagtcggtacttgctggcggcgcggtgcaacggtttggccatttgggttgggctttaactgctaaaaatcaagcttgcattgtttgaatctccttttggcagccatgactgagcccaggtttgttgttgtgctgtgagttatgggatcatctcctgctgctgctgctgcttcttttttttttttccaaatcaatggtctgatcaac

SEQ ID NO: 75371 - DNA, 1073 bp, Zea Mays
cagccctgacccgcaacccatgggtccagatgtcatacatcaaaatcgctttctgctgtgtcgaaggatacctcgccgcttcgtcttccccgtcccctttcgcctttcccctcctatcgacaccaccatgtccaccaccaccgccactccgccacagttcgaatattcctagcttgagattgcaagaggtctccaagaggagggtaggggagccgagcgctcagctctaattttctccatctattgctaacagctcagacctcaggcaagggaggtacaatgccaagagcaaatgagatgttgagggcagattcaagaatgatggtggtctttggtgccttgtcatcgaaaccagagcaactgacatttgaagaatccctcatatttgtcaagaaagttaaagcccgtgactacatgctgtacctgtcattattcgacgttctcggcagaacggaattaccccagctcgacgcctaccgagaggtacgatctgcgcgaagagctcgagaggttcagaccgccgccgccgccgccggtgcctacctcaaagcaggcagcaaacaacaacatctggccctgggtcatcgtgtgcgctgctgtcccgttggtcgcagccagcctgctcccgtcactttgaaacccagtgctgtggcttgctcaacaccctgttggccaaaaaatggccgtctgatcgaagaaccgctgcatgcagtacatacattacatgtgcagtggaccgaaccggcctcctgttgctattcgtgccatcacaactgaatcacagtattgtctgtgtatatatattagagtagtgttctggaagggaacctgcgttcttggtcatcaggtaccactgggcaagaaatgtagtcggtacttgctggcggcgcggtgcaacggtttggccatttgggttgggctttaactgctaaaaatcaagcttgcattgtttgaatctccttttggcagccatgactgagcccaggtttgttgttgtgctgtgagttatgggatcatctcctgctgctgctgctgcttcttttttttttttccaaatcaatggtctgatcaac

SEQ ID NO: 75372 - DNA, 510 bp, Zea Mays
atccttcgtcagtccctactccctagccgaatcgaattcctctcctcggcctcgagacccaagtagatcgatcggctagccggacgcggacggcggtggcgcgaaaaacccgccggggccgtcgccgtcgccgtcggtggaggacgcgatgagcttcgtgcagatggtgaaggaggcgttcaaggagcgacagccggacaagtacggcctcttcctccgcgtcatggaggacttcaggaatcagcggctcgacatcgccgaggtggcctccaccgccaaggccctgttccaggacaaccctgacctggcgctgaggttcaacgtctttctgcccaagggccaccagatccagctcgggcttgatgagctcgccgcctatctcgtcagggacataaacctgggcgccgacaacaacgacgacgacagcgatggcggccaatgatgactctatcagttactctttctgcgtgtgctacactcggcagctagatctaagttatggtttagttc

SEQ ID NO: 75373 - DNA, 3443 bp, Zea Mays
ttttttcccaacccactggcgggaatagtgacacgctgacagtgcacgatctctctgtcgcctagaactagacgagacggtggaaatcggaatccattcccacttacaagcaggacgcaggagaaatttctgcaaaggtgcagagtcacatgcgccggatttcggggtgaggaaggcaggaggtggaagacaggaaaaagagggggaaagaaacaagtgagggacaggagagcgaggtccttcttgccttctcgttcgtttgctctcctcgctgttcttgcggttacttcctccttttgctttcaatgctaccgcgttactgctggatctggcacacccaccgcgtccgccgcctcctcagctaatcttggtcccggcctccccaagattctcttgttcttttggaattgcgtcttcctttgctgcctctgcttcgcagcagcatccgcgtgcggcggcgtggaacaaggtgggatcttggctcagtttctagagtgttggaattctttctatccatcattgttttgtgttcaagagaggctatctttgtctgcgaatgcagtgctgtgcgtgccaatttgaacttctcgtgcggtactcgaggtgagatttcacctcgtccacgttcttcctcaccgccaaagacccaagggggagaaggaagggaagaggcggaatttcgattggttggttgctgcgtgaatccgcgggattcaggctcgagtctcccttgaattgcggcgtgggccatggttctctcctccaattccaccaccaaggcagcagctcagctgtgaaagtgacagcccgcagtgtagtgctctctagcagcctgctgctggcctgggctccaatggcgtcctcaccttcgccttccccgatcaccatcagagccacctcgccgccttccaccgcaaccccgtcgccggcaaccaccacgcccaagccggattccccggccccggtgacgcagcccaatgctaccccggccgaccctccctcatcgccggccgcgcctcctcccctcccgcctcccgcgtccacgccaccgccacagctcccttctccaccgccctccttgcctccgccccctccggacgccgtgccaccaccgccggttgtcgttgccactccgccacccgccccagcagccgtagtgcctccaccctcgtcgcctgctgcagtacccccaccgcctacacctgctgccccgccaaaggcgtcgcctatacgcccccctgcggccgcgtcgccacccccatccaatctgccagcgcccaacccgccggcggacccaacgccgccgacagtagcacagccacctccgccacggcgccggccaccaagatcgcctcagacagaacctccacccctggcaccaccaccttctggaattcctgtcgaaccttccccaaccagtccctcaccgacgtccgcagatccttcgatccccactccctctagcccctcgtctccagggacgacaccgtctacaccaggctctgatggcactccatcggtgccagccccagcaacgccaggtgactcagttagcccggtaacaaccgggggccaaggttccaacaagtcgtcgagtccagcctcgcagagcagcagctcctcagtagacagtggtggactgtcttctggtgcaaaggcaggcattggggtagtcgttgccattattgtgcttagtttggttggagcagcattttggtacaagaagaaacggaggagagtgcatggataccatgctggttttgtaatgccttcaccggcctcgactcctacacaagtgttagggtattcggccaaaacaaacttcagtgccgggagtcctgaatcgaaagattcaatgccagagttcagtatgagcaattgtcggttcttcacttatgaggaattgtatcagatcacaaatggcttctcatcacagaacctgctaggggaaggtgggttcggatcagtgtataagggttgcttggctgatggaagagaggttgcggttaagaaactgaaagatggcggcgggcagggggaacgtgagttccatgctgaggtggatattatcagtcgtgtgcatcatcgccatctagtttctcttgtggggtattgcatttcagatgaccagagattgcttgtctacgattttgtgcccaacgacacacttcactatcatcttcatggacgtggagtaccagttttggagtggccagctagggttaaaattgcggctggttcggctcgtggaatagcctatcttcacgaagattgtcaacccagaataatccacagggatataaagtcctccaatatcttgctggataataactttgaagcactgctatggatgcttgcactcatgtaaccacacgagtgatgggaactttcgggtaccttgctccagagtacgcgtcaagcggcaagttgactgagagatctgatgtattctcattcggtgtcgtcctcttggagcttattactggtagaaagcctgtcgacgcatcaaagccattgggtgacgagagccttgttgagtggcaatttttgtgacagcacagttatttgcaggctaggccattgctcacgcaggcgcttgagaccggcaacgccggggagctggtggacgcccggcttaacaagaactacaacgaagtcgagatgttccgtatgatcgaagctgctgcagcttgcattcggcattcagcatccaggagaccgaggatgagccaggtcgtgcgggtgctcgacagtctcgctgatgtcgatctaactaacggcgtgcagccaggcaagagcgagatgttcaacgtcgcgaacacggctgagatcaggctgttccagcggatggcgttcggcagccaagatttcacgacggatttcagccagtccagctggaacaacagccagagcagaggtcttgatgcctctggttcaaggccattgtaatcctcctcctcgtcgtcgtcgtaaatttcgtagatctaactagctagggtgtttcgtgatgatttttttacctcgtgtaattctttctgagtggatcaatagtgattgttctttcgccatccctgtcttctacccactaacatagatcatggattgaggtctgcttgcttgtgcaaatactcgttgaccgatgaagagagaccgctgcgtttagtccctactagtgaattgctgtatcgattttttctctttcaaggttttgcaatagtcatgtaatcagcagttcgctttgaaatcggggttttggcaagaaactcttagttcgagttgaacttttgggcaaagtttattcagatgtgcgcctttcagttttttttttaccttgttgtctgaaaaagatgcgcatgagcttcttggctacttggttaggtatcacgtatccaatctgtttggaatctgaagtctccgggcgaattcgcctctctagatccgac

SEQ ID NO: 75374 - DNA, 2155 bp, Zea Mays
ggccgcgtggggcgcccattgcggctttgctgtggcattttcctctcccgtcgtcactctcactcggggcgtgcgttccacaccagtacacccccggtaggctgtctctaggtgtcaagcctgtcaggctgccaccgtcctcccgccggatgccgacaagcttctctttcctcgacatgccaccggaataccggatgccgattgccaagcacgcgcgcttgagctttcatttcatatgccacgcactgtcacaccgacacccgtcccctgtgcgtctccttatctctggccaccgccacagaactggccgcgcgcgtcgcaaggctctctcgctcacttcttcccagcggagtgcgcagtcgtcatggctaacgctagccgtggtcgtgtcggcggcggcgggcgaagttccgtgctcgcgctgcttctcctgctttccgccggaggagcccgagcgtcctacgacggcgagggcgaggcagcacgggcaggggcagaggagaaggagaaggctgcggcgtggacgggcgggctgagccggcggagctttcccaaggggttcgtgttcgggacggcggcgtcggcctaccaggtggagggcatggcgcacaaggacggccgcgggccgagcatttgggacgccttcatcaagatccccggcgagatcgcaaacaacgccaccgcggacgtgactgttgacgagtaccatcgctacaaggaggacgtgaatatcatgaagaatatggggttcgacgcttaccggttttcgatctcttggtcaagaatattcccaaatggaaccggagaagtgaactggaaaggagtggcgtactacaacaggctgataaactacatggtgaagaaaggcatcacaccctacgcaaacctgtaccactacgacctaccggaggcgctggaggtccggtacggagggctgttgagcagagaagtggtatcgttcgcagactacgccgacttctgcttcggggcgttcggcgacagggtgaagaactggctgacgttcaacgagccgcgggtggtggccgccctagggtacgacgacggcaggttcgcgccggggaggtgcacggggtgcgaggccgggggggactcgggcaccgagccctacgtcgtggcgcaccacctcatcctctcccacgccgccgccgtccagaggtaccgccgcaggcaccagccgacgcagaggggcagggtcgggatcctgctggatttcgtgtggtacgagcccctcacggcggactcagccgccgaccgggccgccgctcaaaggtccagagacttccacgtcggatggttcctgcaccccatcgtctacggcgagtaccccaagtcggtccggagaagcgtcaagggcaggctccccaagttcacggctgaggaggccggtctagtccgaggctccatcgactacgtcggagtcaaccagtacactgcctactacgtgcgtgatcgacggccaaacgctacggcggcgccgcccagctactcgtccgactggcacgctgagttcgtctatgaacgcgacggtgtgccgattggaccaagggcgaactcagactggctctacatcgtgccttggggactgtacaaagccgtcacctacgtcaaggagaagtacggcaaccccacgatgctcctgtcagagaacggtatggacgacccgggcaacgtcacggtgggccagggcgtgcgcgacgcggccagggtggcctactaccggagctacgtcgccgagctgaaggcggcgatcgacggcggcgccaactgcgtgggatacttcgcctggtcgttgctcgacaacttcgagtggaagctggggtacacgtcccggttcggcctcgtctacgtcgacttcaggacgctccggcgctaccccaagagctcggcgtactggttcagggatgtcatcgccggcaccaactgagatcacgtacagtggcctcagtcgatctgatggcttgtttacgttagttcatcagcttcgtccccatgccatgcatcaagtaaaacatcatatatatcacggtgtgcatgaagtcaaaaaaataataataacgtgatgtcacgtatgggttctgagacgaatgctgcctctctctctctctctctctctttatatatatatatatatata

SEQ ID NO: 75375 - DNA, 2158 bp, Zea Mays
ggccgcgtggggcgcccattgcggctttgctgtggcattttcctctcccgtcgtcactctcactcggggcgtgcgttccacaccagtacacccccggtaggctgtctctaggtgtcaagcctgtcaggctgccaccgtcctcccgccggatgccgacaagcttctctttcctcgacatgccaccggaataccggatgccgattgccaagcacgcgcgcttgagctttcatttcatatgccacgcactgtcacaccgacacccgtcccctgtgcgtctccttatctctggccaccgccacagaactggccgcgcgcgtcgcaaggctctctcgctcacttcttcccagcggagtgcgcagtcgtcatggctaacgctagccgtggtcgtgtcggcggcggcgggcgaagttccgtgctcgcgctgcttctcctgctttccgccggaggagcccgagcgtcctacgacggcgagggcgaggcagcacgggcaggggcagaggagaaggagaaggctgcggcgtggacgggcgggctgagccggcggagctttcccaaggggttcgtgttcgggacggcggcgtcggcctaccaggtggagggcatggcgcacaaggacggccgcgggccgagcatttgggacgccttcatcaagatccccggcgagatcgcaaacaacgccaccgcggacgtgactgttgacgagtaccatcgctacaaggaggacgtgaatatcatgaagaatatggggttcgacgcttaccggttttcgatctcttggtcaagaatattcccaaatggaaccggagaagtgaactggaaaggagtggcgtactacaacaggctgataaactacatggtgaagaaaggcatcacaccctacgcaaacctgtaccactacgacctaccggaggcgctggaggtccggtacggagggctgttgagcagagaagtggtgagatcgttcgcagactacgccgacttctgcttcggggcgttcggcgacagggtgaagaactggctgacgttcaacgagccgcgggtggtggccgccctagggtacgacgacggcaggttcgcgccggggaggtgcacggggtgcgaggccgggggggactcgggcaccgagccctacgtcgtggcgcaccacctcatcctctcccacgccgccgccgtccagaggtaccgccgcaggcaccagccgacgcagaggggcagggtcgggatcctgctggatttcgtgtggtacgagcccctcacggcggactcagccgccgaccgggccgccgctcaaaggtccagagacttccacgtcggatggttcctgcaccccatcgtctacggcgagtaccccaagtcggtccggagaagcgtcaagggcaggctccccaagttcacggctgaggaggccggtctagtccgaggctccatcgactacgtcggagtcaaccagtacactgcctactacgtgcgtgatcgacggccaaacgctacggcggcgccgcccagctactcgtccgactggcacgctgagttcgtctatgaacgcgacggtgtgccgattggaccaagggcgaactcagactggctctacatcgtgccttggggactgtacaaagccgtcacctacgtcaaggagaagtacggcaaccccacgatgctcctgtcagagaacggtatggacgacccgggcaacgtcacggtgggccagggcgtgcgcgacgcggccagggtggcctactaccggagctacgtcgccgagctgaaggcggcgatcgacggcggcgccaactgcgtgggatacttcgcctggtcgttgctcgacaacttcgagtggaagctggggtacacgtcccggttcggcctcgtctacgtcgacttcaggacgctccggcgctaccccaagagctcggcgtactggttcagggatgtcatcgccggcaccaactgagatcacgtacagtggcctcagtcgatctgatggcttgtttacgttagttcatcagcttcgtccccatgccatgcatcaagtaaaacatcatatatatcacggtgtgcatgaagtcaaaaaaataataataacgtgatgtcacgtatgggttctgagacgaatgctgcctctctctctctctctctctctttatatatatatatatatata

SEQ ID NO: 75376 - DNA, 1877 bp, Zea Mays
ctcacctgcacccacaccagctcgtgtcagcgcgctcctgtgtcgacgcttggcgtgcgctggaggaggcagcgacacgtgcgccgtgcagcgtgcatggcggcacaggccaggccgggcgtgctgccaccaactcgcgggaacggcgcggcgcgatgacggcgtgctcacatggaagtttgtgccatgcaggtgtgggcgcggcgcatgcattgcacacgcagatgcagatgaagatcattcagggtatgcacaagtatagatgcgccgtagccgtaccggagaaatacaagccaagattcgtgtctacgtacatatatattaccagaaaaaagaagaagatatatacacgccaggattttgtagttttctcgttcgttgattgataggcaaaattctacatataattaattattccgaatagagtaccatactctacacatatatagcattggatcaggcaggtataactgacagcagatatatataactattggaatggaacagattgtgaatctcgtccagtgttctttccattttaatttgaaactttttttcatgtatttatgttttgtctttttgttaatgattatgcaaataaagaaattatttttctgaaaaaaagggaaactcaatggaaccatttccgtaaagaattaaggtgacatgtggattgtttagggcgaaaatttgaacttttaatatataccatgtattttaggacgaatgaagcaatatatatttcacataattcttagtgctgccctaactccttagaaagcttgagtaaaacaaaagtgaagttatatatgtaccactccttccattttcaaattataagtcgtgatagctattctagataattgcttttgctatacaaacctagtagatatatatacattatgtctaacatatagattatatctagatacatattatattaataaagcaaaaccaatgcgaaaagtcaggataatttataataagttggaattaagagaataagaaatagtatatacacatgcatgtgttttcatctatctccttggtttatcacctcaatttgtgtgataatattagagcattaatccggatactataactgaaacgaaacattactatactatattagttttgagggtcgtttctttttttctttatatatttatgaggacaagcatatataaatacatactatacacttaaatttgctatttggtatataattcatgagtcactttcttttaaaaaaaactcacctttagtagcatctgttcctcctggtatgttaatcactatcctgcacacgtacgccgccgcgaattgacgcaaggagaaacgtaccagtggaggtactccctcatggtcgggttgctggggctaggcgcatcggggtccgtcatgatctgcgacgacatgcacgccagcgtgtagaggtcgttgcggcggccggagatgcggacgagcggcggcgcggcggtggcggacggcttgaggaggcagccgttgctgatgtccttggggccatcataggcgacggtcatggagatggaaggcacgaacaggtccaccacctcgccgatcacccgccccaccaccagcggatccacgaagcgcgccatgctagctgatcgtcgtcggtcggtcgatctcgatctcgatccttagctctagctagcttgcttgcttctgtttattttgctagctaaaccctcgttcggtttcttcttcttctgctgtgtgtgtgtgactgtgatgcatgcacacactacggatgtgctctgccgcgttgctgcagcgtgcttaacttcttccgtcgcgcgcgtgacacgatcgatgacgtacacggttccgagagggcgctagctgtgcacagg

SEQ ID NO: 75377 - DNA, 1320 bp, Zea Mays
gccaccaactcgcgggaacggcgcggcgcgatgacggcgtgctcacatggaagtttgtgccatgcaggtgtgggcgcggcgcatgcattgcacacgcagatgcagatgaagatcattcagggtatgcacaagtatagatgcgccgtagccgtaccggagaaatacaagccaagattcgtgtctacgtacatatatattaccagaaaaaagaagaagatatatacacgccaggattttgtagttttctcgttcgttgattgataggcaaaattctacatataattaattattccgaatagagtaccatactctacacatatatagcattggatcaggcaggtataactgacagcagatatatataactattggaatggaacagattgtgaatctcgtccagtgttctttccattttaatttgaaactttttttcatgtatttatgttttgtctttttgttaatgattatgcaaataaagaaattatttttctgaaaaaaagggaaactcaatggaaccatttccgtaaagaattaaggtgacatgtggattgtttagggcgaaaatttgaacttttaatatataccatgtattttaggacgaatgaagcaatatatatttcacataattcttagtgctgccctaactccttagaaagcttgagtaaaacaaaagtgaagttatatatgtaccactccttccattttcaaattataagtcgtgatagctattctagataattgcttttgctatacaaacctagtagatatatatacattatgtctaacatatagattatatctagatacatattatattaataaagcaaaaccaatgcgaaaagtcaggataatttataataagttggaattaagagaataagaaatagtatatacacatgcatgtgttttcatctatctccttggtttatcacctcaatttgtgtgataatattagagcattaatccggatactataactgaaacgaaacattactatactatattagttttgagggtcgtttctttttttctttatatatttatgaggacaagcatatataaatacatactatacacttaaatttgctatttggtatataattcatgagtcactttcttttaaaaaaaactcacctttagtagcatctgttcctcctggtatgttaatcactatcctgcacacgtacgccgccgcgaattgacgcaaggagaaacgtaccgtaccagtggaggtactccctcatggtcgggttgctggggctaggcgcatcggggtccgtcatgatctgcgacgacatgcacgcatgcagcaagttgcag

SEQ ID NO: 75378 - DNA, 1478 bp, Zea Mays
cgaaacagcgcattcatgcaccagcagtagtagtacacagtaactagctaaacggaagaaggagaaaaaaaagacacccgacgggaacggaacggaacggaacggaacggagttaggaaaacgcagctctacaaccgtcgccgtcagttaacctcccgtcgccgtcgcccggccttgtcctgatctgacggcaataagaagcagcgctgttgcccccacctcgctccccgtctctctccctcgcgctctctcgcgcacacacacacaaacggagagaggcgcggcaaggaccggcggaccccgtcccacaccggctactccgatcgcgacagtcgaagatggagtcgccggaggcgtgctcttccggggaggcgtcccctgcctcgccgcctccgctggcggcggcggcggcggagcgcccgtccgaggcggcggcgctgcgggcgctcgtcgaccgggtgcgcgccggggaggtggacgccgcccgcgaggtgcgccgcctcaccagggcgtccgcgaggcaccggcgcaagctcgccgcggccgtcgacccgctcgtcgccatgctccgctcccccgcgcccgaggctggggaggccgcgctgctcgcgctgctcaacctcgccgtcagggacgagagaaataaaaccaagatagtggatgctggcgcacttgagcccctgcttggctacttgcaatcaagtgatccaaatttgcaggagtatgcgactgctgctctcgttacactttcagcctcatccaccactaagcctatcataagtgcttcaggagtaattcctctactcgtggaagtcctcaaagaagggaatcatcaaggcaagaatgatgccgtgatggctctgtacaacctctccacaatcacagacaaccttcaagctatcctttctgttcagccgattccccctttaataaagctactaaagggtagcaagaagtcctccaaaacagcagacaaatgctgtgctcttctcgagtcactgcttgcttttaatcaatgtccgctggccttgacatctgaggaaggcggagtgctcgccatcgtagaggtacttgaggaaggctcccttcagggcagagaacatgccgtgggagcgctcctgacgatgtgcgagagtgaccgcagcaagtacagagacctcattctgaatgaaggggcgattcctggccttctcgagctcacagtccatggcacacccaagtcccgaatgaaggctcatgttcttctcgacctgttgcgggattcaccgtactcgagaccaaagctgcaggcagacacgctcgagaacatcgtgaccaacattgcgtcccaaatagatggcgaagaccgtggcggcaaggcgaagaagatgcttgccgagatggtgaaggtcagcatggagcagagcctgaggcatttgcagcgtcgggcttccttcgcctgaaacacctgcctcagggtgtgttctgttgggtccatg

SEQ ID NO: 75379 - DNA, 1440 bp, Zea Mays
ctcttctccccttctcccgacggcgccaccataccgcctccgccctcaaccctagccgtatcgcgccctcgccctgcctccagccccgcgcagtatgctgctcgctcgtcgttggctactcgcctgctcccatgctccctccggatctgctgctctcggggatttggcgcagcggctttgcgcctccacacttggtcgccggcctcctcacctccacaagcccacgtcatcgccgtctcctcttcgccatcgccccgctcgcctcctgtgccaacgacccgaccaacctcgccgccaagcagggccacaccggctggaatttgtttgacatccggagcttcgaagttcaacttgttggcattgactgggtgggctgtagatggaatttttcgagttctgcaattcagttcacaaaggggaaatagaaatggttgcgggtgatcccaacctgctgacagttctaactgttttggtatgttttaagttgattcactgtcagctgatgaggttcctaccataacacttaagcaaggaatcctgtacacttctctcctggtaaatagactgatagtagagtaatacatattgttgccatgataaaatgctaactgtgctgcatagactgatagtagagtaatacatactgtcagcttcaattcgtttggtttgattggcaggtgtgaggtgctatgagcatgtgactctaaatctactagtcctagaatggattacagttgtcaggaatttttgttgggactgtgatataaaaaagttgaaactttcatagcttacctgccgagaatgcattgttgaagttgcaaagatgaatcctacatggagtggaatttatctccgggttaattaaccttggttgccaaactagccctcaatgtgcgggacaagaagggaaatactgctttgcacatagctacacggaaatggaggccccagggatctggaataacaggagcctgatggttgcatcagtagagttgaccacttctcagtattgcgagatgcatcttacatggtcaagaagataattcctattctgagctacttgctcgtgtacaagtctccttatcatgtcctcctttcaagccagtctattctttgcttgattcatcacgggtgcacattattgtaattagaatcttcagagtactcgaaggatagttaaagctgtttagctagtccttcagattactgaaaatatagttaagaacatttgtattttgctatttcgatttccaacagtacaactattgagtacaactattggggatgattgtttatgtgatgtggatctatcattgtgcaatactaattaaatttgtatatctatgtgattatgtgtataaaatttggtgatttgtgatgcttttgtatatataacagttgttgaaagctaattaatggtatattatcgttattaacgac

SEQ ID NO: 75380 - DNA, 1050 bp, Zea Mays
ctcagcaactcgtccaaatcgaaatcacttctattaaaaactagcaaaccctacctcctcttctccccttctcccgacggcgccaccataccgcctccgccctcaaccctagccgtatcgcgccctcgccctgcctccagccccgcgcagtatgctgctcgctcgtcgttggctactcgcctgctcccatgctccctccggatctgctgctctcggggatttggcgcagcggctttgcgcctccacacttggtcgccggcctcctcacctccacaagcccacgtcatcgccgtctcctcttcgccatcgccccgctcgcctcctgtgccaacgacccgaccaacctcgccgccaagcagggccacaccgtgatataaaaaagttgaaactttcatagcttacctgccgagaatgcattgttgaagttgcaaagatgaatcctacatggagtggaatttatctccgggttaattaaccttggttgccaaactagccctcaatgtgcgggacaagaagggaaatactgctttgcacatagctacacggaaatggaggccccagggatctggaataacaggagcctgatggttgcatcagtagagttgaccacttctcagtattgcgagatgcatcttacatggtcaagaagataattcctattctgagctacttgctcgtgtacaagtctccttatcatgtcctcctttcaagccagtctattctttgcttgattcatcacgggtgcacattattgtaattagaatcttcagagtactcgaaggatagttaaagctgtttagctagtccttcagattactgaaaatatagttaagaacatttgtattttgctatttcgatttccaacagtacaactattgagtacaactattggggatgattgtttatgtgatgtggatctatcattgtgcaatactaattaaatttgtatatctatgtgattatgtgtataaaatttggtgatttgtgatgcttttgtatatataacagttgttgaaagctaattaatggtatattatcgttattaacgac

SEQ ID NO: 75381 - DNA, 2199 bp, Zea Mays
tcgctattgattaacatgtaactgttggtggctaaaaaaattaggcccgaacaggcccaactcagcaactcgtccaaatcgaaatcacttctattaaaaactagcaaaccctacctcctcttctccccttctcccgacggcgccaccataccgcctccgccctcaaccctagccgtatcgcgccctcgccctgcctccagccccgcgcagtatgctgctcgctcgtcgttggctactcgcctgctcccatgctccctccggatctgctgctctcggggatttggcgcagcggctttgcgcctccacacttggtcgccggcctcctcacctccacaagcccacgtcatcgccgtctcctcttcgccatcgccccgctcgcctcctgtgccaacgacccgaccaacctcgccgccaagcagggccacaccggctggaatttgtttgacatccggagcttcgaagttcaacttgttggcattgactgggtgggctgtagatggaatttttcgagttctgcaattcagttcacaaaggggaaatagaaatggttgcgggtgatcccaacctgctgacagttctaactgttttggtatgttttaagttgattcactgtcagctgatgaggttcctaccataacacttaagcaaggaatcctgtacacttctctcctggtaaatagactgatagtagagtaatacatattgttgccatgataaaatgctaactgtgctgcatagactgatagtagagtaatacatactgtcagcttcaattcgtttggtttgattggcaggtgtgaggtgctatgagcatgtgactctaaatctactagtcctagaatggattacagttgtcaggaatttttgttgggactgtgatataaaaaagttgaaactttcatagcttacctgccgagaatgcattgttgaagttgcaaagatgtatgtctaagtttattttcacataatagtatatttttttctattatcaagaattgtttctcaatacattcatgagttggaaattgtactgtgagcctttctatattatatagtctagctagctctacaatagagctctagtacagacagaacacatgctttcatactcctatggaatagtagaatcaggtagcagaattaggtgttcattaaccatgcaaataattaattcaagttatctaaataggcccttagtttataatgctgaaagtataaaaagtgttccactctcaataccgagaataggaagactccaccatgtatatgtgttcttatcaggtgctcttctttcccgataaaataaaaatcctttgcttcaatatgctacatgatactttgtgtatagataaaggaatacatccatatgatgttcctgggagttagtttgatgtccatatactccatgcttgctgattggaaaggaaactagttatttcgtttgaagtcatatgctgcttggcgtcattctaatccaagtagctgaggggtcaacagtggctaacttccctgtcactttattccaaagagcaaaagggaatcccaccctagctgtgatattttccctggattatggttgtccaggaatcctacatggagtggaatttatctccgggttaattaaccttggttgccaaactagccctcaatgtgcgggacaagaagggaaatactgctttgcacatagctacacggaaatggaggccccagggatctggaataacaggagcctgatggttgcatcagtagagttgaccacttctcagtattgcgagatgcatcttacatggtcaagaagataattcctattctgagctacttgctcgtgtacaagtctccttatcatgtcctcctttcaagccagtctattctttgcttgattcatcacgggtgcacattattgtaattagaatcttcagagtactcgaaggatagttaaagctgtttagctagtccttcagattactgaaaatatagttaagaacatttgtattttgctatttcgatttccaacagtacaactattgagtacaactattggggatgattgtttatgtgatgtggatctatcattgtgcaatactaattaaatttgtatatctatgtgattatgtgtataaaatttggtgatttgtgatgcttttgtatatataacagttgttgaaagctaattaatggtatattatcgttattaacgac

SEQ ID NO: 75382 - DNA, 2969 bp, Zea Mays
cttggctcgcgtgattcgtgaaccttcttgccatggcgacgatgtctgcagcgtctcatcgctgctgtgcttcttccttgagagctttaaccgtgttgtttgtgttggcagctcttgtttcagatgtaggcggccgacatcatcatcatgtttgtcgtccttatttctcctgcggtggttttagcaatatatcgtatccattccgtcggcaaggtgatccatctgggtgtggtgtccaatcgtatgagctggtttgcacggatacagacgccacaattcgcatcggcagtggaacatacaccgtgcttagcatcaactccacgtattcttacttctgggttgtcgatgccaacctggacatccagagcagttgcccccttccctggtgggattaccatgattctggagccctcatgcggttacctagccatgatttatttgggtggtccaggcataccggtgcccaagaatacaagctatccagatgttgttaagttaatgaggaatggatttggccttagatttccttcttcgattggtgaccgcggcatcagagaatgtttcgcagagtctgtgcggtatctgatcatcctatcctattttcctcctatgcatgactttgtcatctgaaaaccgtccgttgcattcccttcgtaattcttttatatgctatggcatggtcttgcagtaatttccttaaagagccaagaaagtatcagattgtggacattctaatggtcgaggaattatggtcttgttttctcgatcaacatggatcaactaataatgttgtcacttctgttatcatcgacattatcaaaacaataccaatatgtatgtggcttctgaaatctacacatgttttttgcaggcttgtattgatgccgctagcagtatttgtcttcctagcccataaatactggaaagcaaggattacaatagatgcagtcgagaagttcctgcggatgcagcagatgctcgttccgatgagatatgcatacacaaacatcattgctatcaccggtcatttcagagaaaagctcggacaaggaggctacggttctgtatacaagggggtgctacagccaggtgaagtacatgttgctgtcaagatgttaggcaactccaactgtaatggagaagagttcatcagtgaggttgccaccattggcaagatccaccatttcaatgttgtgcgcctcattgggttttgctccgaggaaaatagcagggcacttatctacgagttcatgccccatggatctctcgataagtacatcttctcgtcggagaagagtttctcatgggacaaactcaatgagatcgctctgggcattgctagaggtctcaactacctacatcacgggtgcgatatgcaaattgtacacttcgacatcaagccacacaacatccttcttgacagcaactttgttccaaaagttgctgattttgggcttgccaaactgttcccaagagacgacagtttcgtgccactgagcgctatgcggggaacgataggctatatagctccagagatggtatctcgaagctttggtgtcatctctagcaaatctgatgtgtatagctttggaatgctactgttggagatgacgggcgggcgaaggaacgcagatcctcatgcaggaagctctagtcaagcatactacccatccttggtgtacaaccagctaagccaaggagatgtgggcgagatcagtgaaggtgttgatatgcacgagttaaagaagaaactatgtatcattggactttggtgcatccagatgaagccgcaagatcgaccaacgatgagcgaggtcatagagatgcttgaagctggtgtcgatggcatccaaatgccttcaagaccattcttttgtgatgacgaggttatttgcaggttcgtattgatgccgctgatagtatttatcttcctagcctataaatactggaaaacaaggataacaatagatgcaatcgagaagttcctgcgaatgcagcagatgctcgttccaatgagatatgcatacacgaacaacatcgctatcactgcccatttcaaagacaagctcggacaaggaggctacgatactatatacaagggggtgttacagtcaggtgaagttcaagtttctatcaagatgttgggcaactccaactataacagtgaagagttcatcagtgaggtcgccaccattggcaagctccatgatgtcaatggtgtgcgcctcatcgggttttgctccgaggaaaataggagagcactcatatatgagttcatgccccgtggatccctcgataggtacatcttctcgtcggagaagagtttctcatgggacaaactcaatgaaatcgctctgggcattgctagaggtctcaactacttgcgtcacgggtgtgacatgcagattgtacacttcgacatcaagccacacaacatccttcttgacaacaactttgttccaaaagttgctgattttgggctcgccaaccaaactattccaaagatatgacagttttgtgccattaagcgctatgcggggaacgataggctatatagctctagagatggtatatcggagcttcggtgtcatctctagcaaatccaatgtgtatagatttgggatgctactattggagatggtaggagatcgaagaaacgtagatcctcaagcaggaagctccatccaagcatactacccatccttcagctgagccaaggagacgttgatgggatcagtgaaggtgttgatatgcatgagttagagaagaagttatgtatcattgggctttggtgaatctagatgaacccgcaggatcgaccgacgatgagcgaggtcataaagatgttttgtgataatttgatgtcatctaaaatacctccatgaaccccttttttatcaaaaactcctcaagaacaatttgtttgcctacaaacagaggatcacggtcctagacgttgtattcttgaa

SEQ ID NO: 75383 - DNA, 2857 bp, Zea Mays
cacttatctttgcagtcgccactgcacgccactgcttggctcgcgtgattcgtgaaccttcttgccatggcgacgatgtctgcagcgtctcatcgctgctgtgcttcttccttgagagctttaaccgtgttgtttgtgttggcagctcttgtttcagatgtaggcggccgacatcatcatcatgtttgtcgtccttatttctcctgcggtggttttagcaatatatcgtatccattccgtcggcaaggtgatccatctgggtgtggtgtccaatcgtatgagctggtttgcacggatacagacgccacaattcgcatcggcagtggaacatacaccgtgcttagcatcaactccacgtattcttacttctgggttgtcgatgccaacctggacatccagagcagttgcccccttccctggtgggattaccatgccctcatgcggttacctagccatgatttatttgggtggtccaggcataccggtgcccaagaatacaagctatccagatgttgttaagttaatgaggaatggatttggccttagatttccttcttcgattggtgaccgcggcatcagagaatgtttcgcagagtctgtgcgtaatttccttaaagagccaagaaagtatcagattgtggacattctaatggtcgaggaattatggtcttgttttctcgatcaacatggatcaactaataatgttgtcacttctgttatcatcgacattatcaaaacaataccaatatttttttgcaggcttgtattgatgccgctagcagtatttgtcttcctagcccataaatactggaaagcaaggattacaatagatgcagtcgagaagttcctgcggatgcagcagatgctcgttccgatgagatatgcatacacaaacatcattgctatcaccggtcatttcagagaaaagctcggacaaggaggctacggttctgtatacaagggggtgctacagccaggtgaagtacatgttgctgtcaagatgttaggcaactccaactgtaatggagaagagttcatcagtgaggttgccaccattggcaagatccaccatttcaatgttgtgcgcctcattgggttttgctccgaggaaaatagcagggcacttatctacgagttcatgccccatggatctctcgataagtacatcttctcgtcggagaagagtttctcatgggacaaactcaatgagatcgctctgggcattgctagaggtctcaactacctacatcacgggtgcgatatgcaaattgtacacttcgacatcaagccacacaacatccttcttgacagcaactttgttccaaaagttgctgattttgggcttgccaaactgttcccaagagacgacagtttcgtgccactgagcgctatgcggggaacgataggctatatagctccagagatggtatctcgaagctttggtgtcatctctagcaaatctgatgtgtatagctttggaatgctactgttggagatgacgggcgggcgaaggaacgcagatcctcatgcaggaagctctagtcaagcatactacccatccttggtgtacaaccagctaagccaaggagatgtgggcgagatcagtgaaggtgttgatatgcacgagttaaagaagaaactatgtatcattggactttggtgcatccagatgaagccgcaagatcgaccaacgatgagcgaggtcatagagatgcttgaagctggtgtcgatggcatccaaatgccttcaagaccattcttttgtgatgacgaggttatttgcaggttcgtattgatgccgctgatagtatttatcttcctagcctataaatactggaaaacaaggataacaatagatgcaatcgagaagttcctgcgaatgcagcagatgctcgttccaatgagatatgcatacacgaacaacatcgctatcactgcccatttcaaagacaagctcggacaaggaggctacgatactatatacaagggggtgttacagtcaggtgaagttcaagtttctatcaagatgttgggcaactccaactataacagtgaagagttcatcagtgaggtcgccaccattggcaagctccatgatgtcaatggtgtgcgcctcatcgggttttgctccgaggaaaataggagagcactcatatatgagttcatgccccgtggatccctcgataggtacatcttctcgtcggagaagagtttctcatgggacaaactcaatgaaatcgctctgggcattgctagaggtctcaactacttgcgtcacgggtgtgacatgcagattgtacacttcgacatcaagccacacaacatccttcttgacaacaactttgttccaaaagttgctgattttgggctcgccaaccaaactattccaaagatatgacagttttgtgccattaagcgctatgcggggaacgataggctatatagctctagagatggtatatcggagcttcggtgtcatctctagcaaatccaatgtgtatagatttgggatgctactattggagatggtaggagatcgaagaaacgtagatcctcaagcaggaagctccatccaagcatactacccatccttcagctgagccaaggagacgttgatgggatcagtgaaggtgttgatatgcatgagttagagaagaagttatgtatcattgggctttggtgaatctagatgaacccgcaggatcgaccgacgatgagcgaggtcataaagatgttttgtgataatttgatgtcatctaaaatacctccatgaaccccttttttatcaaaaactcctcaagaacaatttgtttgcctacaaacagaggatcacggtcctagacgttgtattcttgaa

SEQ ID NO: 75384 - DNA, 2838 bp, Zea Mays
ctccgggtgactcttgtttctacccacttatctttgcagtcgccactgcacgccactgcttggctcgcgtgattcgtgaaccttcttgccatggcgacgatgtctgcagcgtctcatcgctgctgtgcttcttccttgagagctttaaccgtgttgtttgtgttggcagctcttgtttcagatgtaggcggccgacatcatcatcatgtttgtcgtccttatttctcctgcggtggttttagcaatatatcgtatccattccgtcggcaaggtgatccatctgggtgtggtgtccaatcgtatgagctggtttgcacggatacagacgccacaattcgcatcggcagtggaacatacaccgtgcttagcatcaactccacgtattcttacttctgggttgtcgatgccaacctggacatccagagcagttgcccccttccctggtgggattaccatggcataccggtgcccaagaatacaagctatccagatgttgttaagttaatgaggaatggatttggccttagatttccttcttcgattggtgaccgcggcatcagagaatgtttcgcagagtctgtgcgtaatttccttaaagagccaagaaagtatcagattgtggacattctaatggtcgaggaattatggtcttgttttctcgatcaacatggatcaactaataatgttgtcacttctgttatcatcgacattatcaaaacaataccaatatttttttgcaggcttgtattgatgccgctagcagtatttgtcttcctagcccataaatactggaaagcaaggattacaatagatgcagtcgagaagttcctgcggatgcagcagatgctcgttccgatgagatatgcatacacaaacatcattgctatcaccggtcatttcagagaaaagctcggacaaggaggctacggttctgtatacaagggggtgctacagccaggtgaagtacatgttgctgtcaagatgttaggcaactccaactgtaatggagaagagttcatcagtgaggttgccaccattggcaagatccaccatttcaatgttgtgcgcctcattgggttttgctccgaggaaaatagcagggcacttatctacgagttcatgccccatggatctctcgataagtacatcttctcgtcggagaagagtttctcatgggacaaactcaatgagatcgctctgggcattgctagaggtctcaactacctacatcacgggtgcgatatgcaaattgtacacttcgacatcaagccacacaacatccttcttgacagcaactttgttccaaaagttgctgattttgggcttgccaaactgttcccaagagacgacagtttcgtgccactgagcgctatgcggggaacgataggctatatagctccagagatggtatctcgaagctttggtgtcatctctagcaaatctgatgtgtatagctttggaatgctactgttggagatgacgggcgggcgaaggaacgcagatcctcatgcaggaagctctagtcaagcatactacccatccttggtgtacaaccagctaagccaaggagatgtgggcgagatcagtgaaggtgttgatatgcacgagttaaagaagaaactatgtatcattggactttggtgcatccagatgaagccgcaagatcgaccaacgatgagcgaggtcatagagatgcttgaagctggtgtcgatggcatccaaatgccttcaagaccattcttttgtgatgacgaggttatttgcaggttcgtattgatgccgctgatagtatttatcttcctagcctataaatactggaaaacaaggataacaatagatgcaatcgagaagttcctgcgaatgcagcagatgctcgttccaatgagatatgcatacacgaacaacatcgctatcactgcccatttcaaagacaagctcggacaaggaggctacgatactatatacaagggggtgttacagtcaggtgaagttcaagtttctatcaagatgttgggcaactccaactataacagtgaagagttcatcagtgaggtcgccaccattggcaagctccatgatgtcaatggtgtgcgcctcatcgggttttgctccgaggaaaataggagagcactcatatatgagttcatgccccgtggatccctcgataggtacatcttctcgtcggagaagagtttctcatgggacaaactcaatgaaatcgctctgggcattgctagaggtctcaactacttgcgtcacgggtgtgacatgcagattgtacacttcgacatcaagccacacaacatccttcttgacaacaactttgttccaaaagttgctgattttgggctcgccaaccaaactattccaaagatatgacagttttgtgccattaagcgctatgcggggaacgataggctatatagctctagagatggtatatcggagcttcggtgtcatctctagcaaatccaatgtgtatagatttgggatgctactattggagatggtaggagatcgaagaaacgtagatcctcaagcaggaagctccatccaagcatactacccatccttcagctgagccaaggagacgttgatgggatcagtgaaggtgttgatatgcatgagttagagaagaagttatgtatcattgggctttggtgaatctagatgaacccgcaggatcgaccgacgatgagcgaggtcataaagatgttttgtgataatttgatgtcatctaaaatacctccatgaaccccttttttatcaaaaactcctcaagaacaatttgtttgcctacaaacagaggatcacggtcctagacgttgtattcttgaa

SEQ ID NO: 75385 - DNA, 3127 bp, Zea Mays
gctgtgactccgggtgactcttgtttctacccacttatctttgcagtcgccactgcacgccactgcttggctcgcgtgattcgtgaaccttcttgccatggcgacgatgtctgcagcgtctcatcgctgctgtgcttcttccttgagagctttaaccgtgttgtttgtgttggcagctcttgtttcagatgtaggcggccgacatcatcatcatgtttgtcgtccttatttctcctgcggtggttttagcaatatatcgtatccattccgtcggcaaggtgatccatctgggtgtggtgtccaatcgtatgagctggtttgcacggatacagacgccacaattcgcatcggcagtggaacatacaccgtgcttagcatcaactccacgtattcttacttctgggttgtcgatgccaacctggacatccagagcagttgcccccttccctggtgggattaccatggtgagaccagtactgccaactcatatcgtaggaggactgagttcaggccttatttcctttatccgaattcgatgtcgattatctttgtgaattgctcgaagccaatagagaacaatgatatatatgagccggtgccttgcttgagcaattcttctttcatctacttgctaactcactactcgtatggctatgctcttgctgagattctggagccctcatgcggttacctagccatgatttatttgggtggtccaggcataccggtgcccaagaatacaagctatccagatgttgttaagttaatgaggaatggatttggccttagatttccttcttcgattggtgaccgcggcatcagagaatgtttcgcagagtctgtgcgtaatttccttaaagagccaagaaagtatcagattgtggacattctaatggtcgaggaattatggtcttgttttctcgatcaacatggatcaactaataatgttgtcacttctgttatcatcgacattatcaaaacaataccaatatgtatgtggcttctgaaatctacacatgttttttgcaggcttgtattgatgccgctagcagtatttgtcttcctagcccataaatactggaaagcaaggattacaatagatgcagtcgagaagttcctgcggatgcagcagatgctcgttccgatgagatatgcatacacaaacatcattgctatcaccggtcatttcagagaaaagctcggacaaggaggctacggttctgtatacaagggggtgctacagccaggtgaagtacatgttgctgtcaagatgttaggcaactccaactgtaatggagaagagttcatcagtgaggttgccaccattggcaagatccaccatttcaatgttgtgcgcctcattgggttttgctccgaggaaaatagcagggcacttatctacgagttcatgccccatggatctctcgataagtacatcttctcgtcggagaagagtttctcatgggacaaactcaatgagatcgctctgggcattgctagaggtctcaactacctacatcacgggtgcgatatgcaaattgtacacttcgacatcaagccacacaacatccttcttgacagcaactttgttccaaaagttgctgattttgggcttgccaaactgttcccaagagacgacagtttcgtgccactgagcgctatgcggggaacgataggctatatagctccagagatggtatctcgaagctttggtgtcatctctagcaaatctgatgtgtatagctttggaatgctactgttggagatgacgggcgggcgaaggaacgcagatcctcatgcaggaagctctagtcaagcatactacccatccttggtgtacaaccagctaagccaaggagatgtgggcgagatcagtgaaggtgttgatatgcacgagttaaagaagaaactatgtatcattggactttggtgcatccagatgaagccgcaagatcgaccaacgatgagcgaggtcatagagatgcttgaagctggtgtcgatggcatccaaatgccttcaagaccattcttttgtgatgacgaggttatttgcaggttcgtattgatgccgctgatagtatttatcttcctagcctataaatactggaaaacaaggataacaatagatgcaatcgagaagttcctgcgaatgcagcagatgctcgttccaatgagatatgcatacacgaacaacatcgctatcactgcccatttcaaagacaagctcggacaaggaggctacgatactatatacaagggggtgttacagtcaggtgaagttcaagtttctatcaagatgttgggcaactccaactataacagtgaagagttcatcagtgaggtcgccaccattggcaagctccatgatgtcaatggtgtgcgcctcatcgggttttgctccgaggaaaataggagagcactcatatatgagttcatgccccgtggatccctcgataggtacatcttctcgtcggagaagagtttctcatgggacaaactcaatgaaatcgctctgggcattgctagaggtctcaactacttgcgtcacgggtgtgacatgcagattgtacacttcgacatcaagccacacaacatccttcttgacaacaactttgttccaaaagttgctgattttgggctcgccaaccaaactattccaaagatatgacagttttgtgccattaagcgctatgcggggaacgataggctatatagctctagagatggtatatcggagcttcggtgtcatctctagcaaatccaatgtgtatagatttgggatgctactattggagatggtaggagatcgaagaaacgtagatcctcaagcaggaagctccatccaagcatactacccatccttcagctgagccaaggagacgttgatgggatcagtgaaggtgttgatatgcatgagttagagaagaagttatgtatcattgggctttggtgaatctagatgaacccgcaggatcgaccgacgatgagcgaggtcataaagatgttttgtgataatttgatgtcatctaaaatacctccatgaaccccttttttatcaaaaactcctcaagaacaatttgtttgcctacaaacagaggatcacggtcctagacgttgtattcttgaa

SEQ ID NO: 75386 - DNA, 2871 bp, Zea Mays
tcaggctgtgactccgggtgactcttgtttctacccacttatctttgcagtcgccactgcacgccactgcttggctcgcgtgattcgtgaaccttcttgccatggcgacgatgtctgcagcgtctcatcgctgctgtgcttcttccttgagagctttaaccgtgttgtttgtgttggcagctcttgtttcagatgtaggcggccgacatcatcatcatgtttgtcgtccttatttctcctgcggtggttttagcaatatatcgtatccattccgtcggcaaggtgatccatctgggtgtggtgtccaatcgtatgagctggtttgcacggatacagacgccacaattcgcatcggcagtggaacatacaccgtgcttagcatcaactccacgtattcttacttctgggttgtcgatgccaacctggacatccagagcagttgcccccttccctggtgggattaccatggcataccggtgcccaagaatacaagctatccagatgttgttaagttaatgaggaatggatttggccttagatttccttcttcgattggtgaccgcggcatcagagaatgtttcgcagagtcttaatttccttaaagagccaagaaagtatcagattgtggacattctaatggtcgaggaattatggtcttgttttctcgatcaacatggatcaactaataatgttgtcacttctgttatcatcgacattatcaaaacaataccaatatgtatgtggcttctgaaatctacacatgttttttgcaggcttgtattgatgccgctagcagtatttgtcttcctagcccataaatactggaaagcaaggattacaatagatgcagtcgagaagttcctgcggatgcagcagatgctcgttccgatgagatatgcatacacaaacatcattgctatcaccggtcatttcagagaaaagctcggacaaggaggctacggttctgtatacaagggggtgctacagccaggtgaagtacatgttgctgtcaagatgttaggcaactccaactgtaatggagaagagttcatcagtgaggttgccaccattggcaagatccaccatttcaatgttgtgcgcctcattgggttttgctccgaggaaaatagcagggcacttatctacgagttcatgccccatggatctctcgataagtacatcttctcgtcggagaagagtttctcatgggacaaactcaatgagatcgctctgggcattgctagaggtctcaactacctacatcacgggtgcgatatgcaaattgtacacttcgacatcaagccacacaacatccttcttgacagcaactttgttccaaaagttgctgattttgggcttgccaaactgttcccaagagacgacagtttcgtgccactgagcgctatgcggggaacgataggctatatagctccagagatggtatctcgaagctttggtgtcatctctagcaaatctgatgtgtatagctttggaatgctactgttggagatgacgggcgggcgaaggaacgcagatcctcatgcaggaagctctagtcaagcatactacccatccttggtgtacaaccagctaagccaaggagatgtgggcgagatcagtgaaggtgttgatatgcacgagttaaagaagaaactatgtatcattggactttggtgcatccagatgaagccgcaagatcgaccaacgatgagcgaggtcatagagatgcttgaagctggtgtcgatggcatccaaatgccttcaagaccattcttttgtgatgacgaggttatttgcaggttcgtattgatgccgctgatagtatttatcttcctagcctataaatactggaaaacaaggataacaatagatgcaatcgagaagttcctgcgaatgcagcagatgctcgttccaatgagatatgcatacacgaacaacatcgctatcactgcccatttcaaagacaagctcggacaaggaggctacgatactatatacaagggggtgttacagtcaggtgaagttcaagtttctatcaagatgttgggcaactccaactataacagtgaagagttcatcagtgaggtcgccaccattggcaagctccatgatgtcaatggtgtgcgcctcatcgggttttgctccgaggaaaataggagagcactcatatatgagttcatgccccgtggatccctcgataggtacatcttctcgtcggagaagagtttctcatgggacaaactcaatgaaatcgctctgggcattgctagaggtctcaactacttgcgtcacgggtgtgacatgcagattgtacacttcgacatcaagccacacaacatccttcttgacaacaactttgttccaaaagttgctgattttgggctcgccaaccaaactattccaaagatatgacagttttgtgccattaagcgctatgcggggaacgataggctatatagctctagagatggtatatcggagcttcggtgtcatctctagcaaatccaatgtgtatagatttgggatgctactattggagatggtaggagatcgaagaaacgtagatcctcaagcaggaagctccatccaagcatactacccatccttcagctgagccaaggagacgttgatgggatcagtgaaggtgttgatatgcatgagttagagaagaagttatgtatcattgggctttggtgaatctagatgaacccgcaggatcgaccgacgatgagcgaggtcataaagatgttttgtgataatttgatgtcatctaaaatacctccatgaaccccttttttatcaaaaactcctcaagaacaatttgtttgcctacaaacagaggatcacggtcctagacgttgtattcttgaa

SEQ ID NO: 75387 - DNA, 2720 bp, Zea Mays
cactgaccgagctaggatgccggccgcttcaagctcttgtttcagatgtaggcggccgacatcatcatcatgtttgtcgtccttatttctcctgcggtggttttagcaatatatcgtatccattccgtcggcaaggtgatccatctgggtgtggtgtccaatcgtatgagctggtttgcacggatacagacgccacaattcgcatcggcagtggaacatacaccgtgcttagcatcaactccacgtattcttacttctgggttgtcgatgccaacctggacatccagagcagttgcccccttccctggtgggattaccatggcataccggtgcccaagaatacaagctatccagatgttgttaagttaatgaggaatggatttggccttagatttccttcttcgattggtgaccgcggcatcagagaatgtttcgcagataatttccttaaagagccaagaaagtatcagattgtggacattctaatggtcgaggaattatggtcttgttttctcgatcaacatggatcaactaataatgttgtcacttctgttatcatcgacattatcaaaacaataccaatatgtatgtggcttctgaaatctacacatgttttttgcaggcttgtattgatgccgctagcagtatttgtcttcctagcccataaatactggaaagcaaggattacaatagatgcagtcgagaagttcctgcggatgcagcagatgctcgttccgatgagatatgcatacacaaacatcattgctatcaccggtcatttcagagaaaagctcggacaaggaggctacggttctgtatacaagggggtgctacagccaggtgaagtacatgttgctgtcaagatgttaggcaactccaactgtaatggagaagagttcatcagtgaggttgccaccattggcaagatccaccatttcaatgttgtgcgcctcattgggttttgctccgaggaaaatagcagggcacttatctacgagttcatgccccatggatctctcgataagtacatcttctcgtcggagaagagtttctcatgggacaaactcaatgagatcgctctgggcattgctagaggtctcaactacctacatcacgggtgcgatatgcaaattgtacacttcgacatcaagccacacaacatccttcttgacagcaactttgttccaaaagttgctgattttgggcttgccaaactgttcccaagagacgacagtttcgtgccactgagcgctatgcggggaacgataggctatatagctccagagatggtatctcgaagctttggtgtcatctctagcaaatctgatgtgtatagctttggaatgctactgttggagatgacgggcgggcgaaggaacgcagatcctcatgcaggaagctctagtcaagcatactacccatccttggtgtacaaccagctaagccaaggagatgtgggcgagatcagtgaaggtgttgatatgcacgagttaaagaagaaactatgtatcattggactttggtgcatccagatgaagccgcaagatcgaccaacgatgagcgaggtcatagagatgcttgaagctggtgtcgatggcatccaaatgccttcaagaccattcttttgtgatgacgaggttatttgcaggttcgtattgatgccgctgatagtatttatcttcctagcctataaatactggaaaacaaggataacaatagatgcaatcgagaagttcctgcgaatgcagcagatgctcgttccaatgagatatgcatacacgaacaacatcgctatcactgcccatttcaaagacaagctcggacaaggaggctacgatactatatacaagggggtgttacagtcaggtgaagttcaagtttctatcaagatgttgggcaactccaactataacagtgaagagttcatcagtgaggtcgccaccattggcaagctccatgatgtcaatggtgtgcgcctcatcgggttttgctccgaggaaaataggagagcactcatatatgagttcatgccccgtggatccctcgataggtacatcttctcgtcggagaagagtttctcatgggacaaactcaatgaaatcgctctgggcattgctagaggtctcaactacttgcgtcacgggtgtgacatgcagattgtacacttcgacatcaagccacacaacatccttcttgacaacaactttgttccaaaagttgctgattttgggctcgccaaccaaactattccaaagatatgacagttttgtgccattaagcgctatgcggggaacgataggctatatagctctagagatggtatatcggagcttcggtgtcatctctagcaaatccaatgtgtatagatttgggatgctactattggagatggtaggagatcgaagaaacgtagatcctcaagcaggaagctccatccaagcatactacccatccttcagctgagccaaggagacgttgatgggatcagtgaaggtgttgatatgcatgagttagagaagaagttatgtatcattgggctttggtgaatctagatgaacccgcaggatcgaccgacgatgagcgaggtcataaagatgttttgtgataatttgatgtcatctaaaatacctccatgaaccccttttttatcaaaaactcctcaagaacaatttgtttgcctacaaacagaggatcacggtcctagacgttgtattcttgaa

SEQ ID NO: 75388 - DNA, 2009 bp, Zea Mays
tcatgtgcgattttctttctcaaaaacagtgaagatgctcaggctgtctgtgactctgggtgactcttgtcttccacacatcgccacgccactgattggctcgcgattatgtgattcttgaaccttcttgccatggggatgtctgcagcgtctcatctctgtgcttcttcgtccctgcgagctttaaccgtgttgtttttgttggcagctcttgtttcagatgtagaggggcgacatcatcgtcatgtctgtcctcatttctcctgcggtggtttaagcaatatatcgtatccatttcgtcggcaaggtgatccatctgggtgcggtgtccaatcgtatgagctggtttgcacggatacagatgctacaattcgcatcggcagtggaacatacaaggcatgcaggtgccctggaatacaagctatccagatgttgttaagttcatgaggagtggatttgcccttggatttcccgtttggtatggtgataacatcagagaatgtctcgcaaacaatatgcgtactttccataaagaaccaagaaatagtacaggcatcaggcaacagatcttggacattcttacgttcgagacattatggttttgtgttattgaacaacttggatcaactaataatggtgtcaaatctgttctcatccacatcatcgaagaaataccatatgttctttccggtctgaaatctgcacatgttatttgcaggttcatattgatgccgctggcagtatttgtcttcctagcctataaatactggaaaacacggataacaatagatgcagttgagaagttcctgcgaatgcaccatatgctcgttccgatgagatatgcatacacaaacatcattgctatcaccggccatttcagagacaagctcggacaaggaggctacggtactgtatacaagggggtgctacagccaggtgaagttcatgtcgctgtcaagatgttgggcaactcaaactgtaatggagaagagttcatcagtgaggtcgccaccattggcaagatccaccatgtcaatgttgtgcgcctcattgggttttgctccgaggaaaatattagggcacttatctatgagttcatgccccgtggatctctcgataagtacatcttctcgtcggagaagacattctcatgggacaaactcaacgagatcgctctgggcattgctagaggtcttaactacctgcatcacgggtgtgatatgcagattgtacactttgacatcaagccacacaacatccttcttgatagcaactttgttccaaaagttgctgattttgggctagccaaactgttcccaagagatgacagtttcgtgccactaagcgctatgcggggaacgataggctatatagctccagagatggtatctcgaagctttggtgtcatctctagcaaatccgatgtgtacagctttgggatgctactattggagatgacgggcgggcgaagaaacgcagatcctcatgcaggaagctctagtcaagcatactacccatccttggtgtacaggcagctcagccagggtgatgcgaacaggatcagtgaaggtgttgatatgcacgagttagagaagaagctatgtatcattgggctttggtgcatccagatgaagccgcaagatcggccgacaatgagcgaggtcatagagatgcttgaagctggtgtcgatggcatccaaatgcctccgaggccatacttttgtgatgaagaggggccttagataaggaggagcgagagagagcagatgaggcggaactggataactttatcttgggtgttctttttgaggataatacagatgaggtgatggacatggaaagtggacatatagtaatgtctcgtactgacatgtccgaagtcacaaagggttccatgaggagaattaagtcaaattcttttgagtctaaatgaaaggggtgttttggaattgtgatgggtttagagacccttttaaacatagatttatttcagagttaacaaaggagca

SEQ ID NO: 75389 - DNA, 1970 bp, Zea Mays
taccaagtcagcggcatcacagtggaacagtcatgtgcgattttctttctcaaaaacagtgaagatgctcaggctgtctgtgactctgggtgactcttgtcttccacacatcgccacgccactgattggctcgcgattatgtgattcttgaaccttcttgccatggggatgtctgcagcgtctcatctctgtgcttcttcgtccctgcgagctttaaccgtgttgtttttgttggcagctcttgtttcagatgtagaggggcgacatcatcgtcatgtctgtcctcatttctcctgcggtggtttaagcaatatatcgtatccatttcgtcggcaaggtgatccatctgggtgcggtgtccaatcgtatgagctggtttgcacggatacagatgctacaattcgcatcggcagtggaacatacaaggtgccctggaatacaagctatccagatgttgttaagttcatgaggagtggatttgcccttggatttcccgtttggtatggtgataacatcagagaatgtctcgcaaacaatatgcgttatttgcaggttcatattgatgccgctggcagtatttgtcttcctagcctataaatactggaaaacacggataacaatagatgcagttgagaagttcctgcgaatgcaccatatgctcgttccgatgagatatgcatacacaaacatcattgctatcaccggccatttcagagacaagctcggacaaggaggctacggtactgtatacaagggggtgctacagccaggtgaagttcatgtcgctgtcaagatgttgggcaactcaaactgtaatggagaagagttcatcagtgaggtcgccaccattggcaagatccaccatgtcaatgttgtgcgcctcattgggttttgctccgaggaaaatattagggcacttatctatgagttcatgccccgtggatctctcgataagtacatcttctcgtcggagaagacattctcatgggacaaactcaacgagatcgctctgggcattgctagaggtcttaactacctgcatcacgggtgtgatatgcagattgtacactttgacatcaagccacacaacatccttcttgatagcaactttgttccaaaagttgctgattttgggctagccaaactgttcccaagagatgacagtttcgtgccactaagcgctatgcggggaacgataggctatatagctccagagatggtatctcgaagctttggtgtcatctctagcaaatccgatgtgtacagctttgggatgctactattggagatgacgggcgggcgaagaaacgcagatcctcatgcaggaagctctagtcaagcatactacccatccttggtgtacaggcagctcagccagggtgatgcgaacaggatcagtgaaggtgttgatatgcacgagttagagaagaagctatgtatcattgggctttggtgcatccagatgaagccgcaagatcggccgacaatgagcgaggtcatagagatgcttgaagctggtgtcgatggcatccaaatgcctccgaggccatacttttgtgatgaagagggtgaaagttcttactctacaatctctgaactggatacaatagaagagtagtagtagtaaaatgcacttgtgtctatgtgctcttaatgtatcagactattaagattgcaaggttgccataagctaagggccttagataaggaggagcgagagagagcagatgaggcggaactggataactttatcttgggtgttctttttgaggataatacagatgaggtgatggacatggaaagtggacatatagtaatgtctcgtactgacatgtccgaagtcacaaagggttccatgaggagaattaagtcaaattcttttgagtctaaatgaaaggggtgttttggaattgtgatgggtttagagacccttttaaacatagatttatttcagagttaacaaaggagca

SEQ ID NO: 75390 - DNA, 2156 bp, Zea Mays
taccaagtcagcggcatcacagtggaacagtcatgtgcgattttctttctcaaaaacagtgaagatgctcaggctgtctgtgactctgggtgactcttgtcttccacacatcgccacgccactgattggctcgcgattatgtgattcttgaaccttcttgccatggggatgtctgcagcgtctcatctctgtgcttcttcgtccctgcgagctttaaccgtgttgtttttgttggcagctcttgtttcagatgtagaggggcgacatcatcgtcatgtctgtcctcatttctcctgcggtggtttaagcaatatatcgtatccatttcgtcggcaaggtgatccatctgggtgcggtgtccaatcgtatgagctggtttgcacggatacagatgctacaattcgcatcggcagtggaacatacaaggcatgcaggtgccctggaatacaagctatccagatgttgttaagttcatgaggagtggatttgcccttggatttcccgtttggtatggtgataacatcagagaatgtctcgcaaacaatatgcgtactttccataaagaaccaagaaatagtacaggcatcaggcaacagatcttggacattcttacgttcgagacattatggttttgtgttattgaacaacttggatcaactaataatggtgtcaaatctgttctcatccacatcatcgaagaaataccatatgttctttccggtctgaaatctgcacatggttcatattgatgccgctggcagtatttgtcttcctagcctataaatactggaaaacacggataacaatagatgcagttgagaagttcctgcgaatgcaccatatgctcgttccgatgagatatgcatacacaaacatcattgctatcaccggccatttcagagacaagctcggacaaggaggctacggtactgtatacaagggggtgctacagccaggtgaagttcatgtcgctgtcaagatgttgggcaactcaaactgtaatggagaagagttcatcagtgaggtcgccaccattggcaagatccaccatgtcaatgttgtgcgcctcattgggttttgctccgaggaaaatattagggcacttatctatgagttcatgccccgtggatctctcgataagtacatcttctcgtcggagaagacattctcatgggacaaactcaacgagatcgctctgggcattgctagaggtcttaactacctgcatcacgggtgtgatatgcagattgtacactttgacatcaagccacacaacatccttcttgatagcaactttgttccaaaagttgctgattttgggctagccaaactgttcccaagagatgacagtttcgtgccactaagcgctatgcggggaacgataggctatatagctccagagatggtatctcgaagctttggtgtcatctctagcaaatccgatgtgtacagctttgggatgctactattggagatgacgggcgggcgaagaaacgcagatcctcatgcaggaagctctagtcaagcatactacccatccttggtgtacaggcagctcagccagggtgatgcgaacaggatcagtgaaggtgttgatatgcacgagttagagaagaagctatgtatcattgggctttggtgcatccagatgaagccgcaagatcggccgacaatgagcgaggtcatagagatgcttgaagctggtgtcgatggcatccaaatgcctccgaggccatacttttgtgatgaagagggtgaaagttcttactctacaatctctgaactggatacaatagaagagtagtagtagtaaaatgcacttgtgtctatgtgctcttaatgtatcagactattaagattgcaaggttgccataagctaagggccttagataaggaggagcgagagagagcagatgaggcggaactggataactttatcttgggtgttctttttgaggataatacagatgaggtgatggacatggaaagtggacatatagtaatgtctcgtactgacatgtccgaagtcacaaagggttccatgaggagaattaagtcaaattcttttgagtctaaatgaaaggggtgttttggaattgtgatgggtttagagacccttttaaacatagatttatttcagagttaacaaaggagca

SEQ ID NO: 75391 - DNA, 2186 bp, Zea Mays
aaaagacgcaaaagaaagactaccaagtcagcggcatcacagtggaacagtcatgtgcgattttctttctcaaaaacagtgaagatgctcaggctgtctgtgactctgggtgactcttgtcttccacacatcgccacgccactgattggctcgcgattatgtgattcttgaaccttcttgccatggggatgtctgcagcgtctcatctctgtgcttcttcgtccctgcgagctttaaccgtgttgtttttgttggcagctcttgtttcagatgtagaggggcgacatcatcgtcatgtctgtcctcatttctcctgcggtggtttaagcaatatatcgtatccatttcgtcggcaaggtgatccatctgggtgcggtgtccaatcgtatgagctggtttgcacggatacagatgctacaattcgcatcggcagtggaacatacaaggcatgcaggtgccctggaatacaagctatccagatgttgttaagttcatgaggagtggatttgcccttggatttcccgtttggtatggtgataacatcagagaatgtctcgcaaacaatatgcgtactttccataaagaaccaagaaatagtacaggcatcaggcaacagatcttggacattcttacgttcgagacattatggttttgtgttattgaacaacttggatcaactaataatggtgtcaaatctgttctcatccacatcatcgaagaaataccatatgttctttccggtctgaaatctgcacatgttatttgcaggttcatattgatgccgctggcagtatttgtcttcctagcctataaatactggaaaacacggataacaatagatgcagttgagaagttcctgcgaatgcaccatatgctcgttccgatgagatatgcatacacaaacatcattgctatcaccggccatttcagagacaagctcggacaaggaggctacggtactgtatacaagggggtgctacagccaggtgaagttcatgtcgctgtcaagatgttgggcaactcaaactgtaatggagaagagttcatcagtgaggtcgccaccattggcaagatccaccatgtcaatgttgtgcgcctcattgggttttgctccgaggaaaatattagggcacttatctatgagttcatgccccgtggatctctcgataagtacatcttctcgtcggagaagacattctcatgggacaaactcaacgagatcgctctgggcattgctagaggtcttaactacctgcatcacgggtgtgatatgcagattgtacactttgacatcaagccacacaacatccttcttgatagcaactttgttccaaaagttgctgattttgggctagccaaactgttcccaagagatgacagtttcgtgccactaagcgctatgcggggaacgataggctatatagctccagagatggtatctcgaagctttggtgtcatctctagcaaatccgatgtgtacagctttgggatgctactattggagatgacgggcgggcgaagaaacgcagatcctcatgcaggaagctctagtcaagcatactacccatccttggtgtacaggcagctcagccagggtgatgcgaacaggatcagtgaaggtgttgatatgcacgagttagagaagaagctatgtatcattgggctttggtgcatccagatgaagccgcaagatcggccgacaatgagcgaggtcatagagatgcttgaagctggtgtcgatggcatccaaatgcctccgaggccatacttttgtgatgaagagggtgaaagttcttactctacaatctctgaactggatacaatagaagagtagtagtagtaaaatgcacttgtgtctatgtgctcttaatgtatcagactattaagattgcaaggttgccataagctaagggccttagataaggaggagcgagagagagcagatgaggcggaactggataactttatcttgggtgttctttttgaggataatacagatgaggtgatggacatggaaagtggacatatagtaatgtctcgtactgacatgtccgaagtcacaaagggttccatgaggagaattaagtcaaattcttttgagtctaaatgaaaggggtgttttggaattgtgatgggtttagagacccttttaaacatagatttatttcagagttaacaaaggagca

SEQ ID NO: 75392 - DNA, 318 bp, Zea Mays
gccgacacaacgccactgttcgtcgcactttttttttgtgtgcgtcgcccgctaaactgcgctacggctacacggctacggatttcactagtacctcgtagccacaacgaaggaagtcgccaatcccaatgccaggaaggaagtctcacgaattccctcatgtgccgatgtgcgcaccgcctccgaatgctggaacgggtattcctcttctcgccgccgtcctccgctccggtaagggtcgctaccgctttccggatgcgcttcctactcgttactgacagaggcaattttggttcaacatcttctagaagaggggat

SEQ ID NO: 75393 - DNA, 1983 bp, Zea Mays
cagttatgtggaagtggaacagtcatgtgcgattttctttctcaaaaacagtgaagatgctcaggctgtctgtgactctgggtgactcttgtcttccacatcgccacgccactgattggctcgcgattatgtgatccgtgaaccttcttgccatggggatgtctgcagcgtctcatctctgtgctccttcatccctgcgagctttaaccgtgttgtttgtgttggcagcttttgtttcagatgtagaggggcgacatcatcgtcatgtctgtccacatttctcctgcggtggtcttagcaatatatcttatccatttcgtcggcaaggtgatccatctgggtgcggtgtccaatcgtatgagctggtttgcacggatacagatgctacaattcgcatcggcagtggaacatacaagccttcatgcggttacctagccatgactcctttgggtggtccaggcatgccggtgcccatgaatacaagctatccagatgttgttaagttcatgaggaatggatttgcccttcggtttcctctttcgattgaatattaccccaacatcagagaatgtctcgcagagaatatgcgttatttgcaggtttgtattgatgccgttagcagtatttgtcttcctagcctataaatactggaaaacacggataacaatagatgcagttgagaagttcctgcgaatgcaacatatgctcgttccgatgagatatgcatacacaaacatcattgctatcaccgcccatttcagagacaagctcggacaaggaggctacggtactgtatacaagggggtgctacagccaggtgaagttcatgttgctgtcaagatgctgggcaactcaaactgtaacggagaagagttcatcagtgaggtggccaccattggaaagatccaccatgtcaatgttgtgcgcctcattgggttttgctccgaggaaaatatcagggcacttatctatgagttcatgccccgtggatctctcgataagtacatcttctcgtcggagaagacattctcatgggacaaactcaacgagatcgctctgggcattgctagaggtcttaactacctgcatcacgggtgtgatatgcagattgtacactttgacatcaagccacacaacatccttcttgatagcaactttgttccaaaagttgctgattttgggctagccaaactgttcccaagagatgacagtttcgtgccactaagcgctatgcggggaacgataggatatatagctccagagatggtatctcgaagctttggtgtcatctctagcaaatccgatgtgtacagctttgggatgctactgttggagatgacgggcggtcgaaggaacgcagatcctcatgcaggaagctccagtcaagcatactacccatccttggtgtacagccagctgagccaaggagatgcgaacgagatcagtgaaggtgttgatatgcacgagttagagaagaagctatgtatcattgggctttggtgcatccagatgaagccgcaagatcggccgacgatgagtgaggtcatagagatgcttgaagctggcatcgatagcatgcaaatgcctccaaggccattcttttgtgatgacgagggtgatagttcatactctacaatctctgaactgaatacaatagaagagtagtagtagaaaaatacacttgtgtctatgcgctcttaatgtatgagactagtaagattgcaaggttgtcataagctaaggtactggttatatacttttattgagagtgtgataacttgatgccatataaaatactacttaggaacattttttttaccaaaaacttgtcaggaactttttgtttggctacaaacacaaaatcacggacctagccgttgtaccattaaaaaaggctacatttcttgtatgacatcggtctgaaggctattgcacaattttctaagttatgcataacaaattaagtgaaaactagcataatac

SEQ ID NO: 75394 - DNA, 2198 bp, Zea Mays
ctggagatagcctagctacgatgccgcttcaaggcgcagaagaaagactaccaagtcagcggcatcacagttatgtggaagtggaacagtcatgtgcgattttctttctcaaaaacagtgaagatgctcaggctgtctgtgactctgggtgactcttgtcttccacatcgccacgccactgattggctcgcgattatgtgatccgtgaaccttcttgccatggggatgtctgcagcgtctcatctctgtgctccttcatccctgcgagctttaaccgtgttgtttgtgttggcagcttttgtttcagatgtagaggggcgacatcatcgtcatgtctgtccacatttctcctgcggtggtcttagcaatatatcttatccatttcgtcggcaaggtgatccatctgggtgcggtgtccaatcgtatgagctggtttgcacggatacagatgctacaattcgcatcggcagtggaacatacaaggcatgccggtgcccatgaatacaagctatccagatgttgttaagttcatgaggaatggatttgcccttcggtttcctctttcgattgaatattaccccaacatcagagaatgtctcgcagagaatatgcgtgctttccatgaagaaccaagaaatagtacaggcatcagggaacagatcttggacattcttacgttcgagacattatggttttgtgttattgaacaacttggatcaagtaataatggtgtcaaatctgttctcatcaacatcatcgtcagaataataccatatgttctgtggggtctaaaatctgcacatgttatttgcaggtttgtattgatgccgttagcagtatttgtcttcctagcctataaatactggaaaacacggataacaatagatgcagttgagaagttcctgcgaatgcaacatatgctcgttccgatgagatatgcatacacaaacatcattgctatcaccgcccatttcagagacaagctcggacaaggaggctacggtactgtatacaagggggtgctacagccaggtgaagttcatgttgctgtcaagatgctgggcaactcaaactgtaacggagaagagttcatcagtgaggtggccaccattggaaagatccaccatgtcaatgttgtgcgcctcattgggttttgctccgaggaaaatatcagggcacttatctatgagttcatgccccgtggatctctcgataagtacatcttctcgtcggagaagacattctcatgggacaaactcaacgagatcgctctgggcattgctagaggtcttaactacctgcatcacgggtgtgatatgcagattgtacactttgacatcaagccacacaacatccttcttgatagcaactttgttccaaaagttgctgattttgggctagccaaactgttcccaagagatgacagtttcgtgccactaagcgctatgcggggaacgataggatatatagctccagagatggtatctcgaagctttggtgtcatctctagcaaatccgatgtgtacagctttgggatgctactgttggagatgacgggcggtcgaaggaacgcagatcctcatgcaggaagctccagtcaagcatactacccatccttggtgtacagccagctgagccaaggagatgcgaacgagatcagtgaaggtgttgatatgcacgagttagagaagaagctatgtatcattgggctttggtgcatccagatgaagccgcaagatcggccgacgatgagtgaggtcatagagatgcttgaagctggcatcgatagcatgcaaatgcctccaaggccattcttttgtgatgacgagggtgatagttcatactctacaatctctgaactgaatacaatagaagagtagtagtagaaaaatacacttgtgtctatgcgctcttaatgtatgagactagtaagattgcaaggttgtcataagctaaggtactggttatatacttttattgagagtgtgataacttgatgccatataaaatactacttaggaacattttttttaccaaaaacttgtcaggaactttttgtttggctacaaacacaaaatcacggacctagccgttgtaccattaaaaaaggctacatttcttgtatgacatcggtctgaaggctattgcacaattttctaagttatgcataacaaattaagtgaaaactagcataatac

SEQ ID NO: 75395 - DNA, 199 bp, Zea Mays
ctcgtagccaccacgaaggaagtcgccaatcccaatgccagaaaggaagtctcacgaattccctcatgtgccgatgtgcgcaccgcctcagaatgctggaacgggtattcctcttctcgccgccgtcctccgctccggtgagggtcgctaccgctttccggatgcgcttcctactcgttactgacagagtgaccttccg

SEQ ID NO: 75396 - DNA, 1074 bp, Zea Mays
gtcgcacttttttttttgtgtgcgccgcccgctaaactgcgctacggctacggatttcactagtacctcgtagccaccacgaaggaagtcgccaatcccaatgccagaaaggaagtctcacgaattccctcatgtgccgatgtgcgcaccgcctcagaatgctggaacgggtattcctcttctcgccgccgtcctccgctccggtgagggtcgctaccgctttccggatgcgcttcctactcgttactgacagaggcaattttggttcaacatcttctagaagaggggattgactgcactatccccaagcattgaggaaagcagttttgaggcttggtggagttcttcagctgctcgccttaatggaggcatccaaaacggcttcaactctctagtgattttaggagcttggtgtatttggcggcactgtaacgagtgtgtttttgaaggtgttccgcctagtgtcgctagggccttgtctttagttgaggatgagtattgtttgtggtgtcttgttggtgctaagggtttgtctggctctcagtttatggtcatgacctaggctgaggcacgttgtttcttctctggagtaggtgtttaagtgttagctttttttagtgttatgtctttttctttttctgtagggctttttggcccttgtattgttctcttatcttttaatgcaatgatacacaactctcttgcgtgttcaagaaaaaaaaaccatcgtgattataattcgacattggcgtctaataatttaagtttctgtgaggatgtccttgaatgactagtcttaaactcttaatgtaagctaccacaaaaatctacaatactttgtcagagcagcagccagcgacccagctctgctacaagatcgtagcaggaaaccattagagttaggtttattgcagttgaattttgcaaaacaatttaagcatagacaaaaaccttgtaggatgtttaaaatgcaggatttctttgaatcttactgtagcagaattcattaggtttgtttgcagtacagtttcataaaactattaaaatttcttggcatgaatcttgtggatgtga

SEQ ID NO: 75397 - DNA, 1730 bp, Zea Mays
gcctgatcttgcttactctggtatatgtgagtcattttatggaggcacccagagaagaacacttagttgcagtgaaacacatcttgcggcatgtggctggaactgtgaattggacgtctggtatggcgcagggagaggaaaacagaggccggaggttattggatacattgacagcgatatagctggagatgttgaagaccgcaagagcaccagcagcatggtttactagtcaaccaagcaaagggtagtggctctgtcttcatgtgtagcagagtacattgctgcttccatggcagcaactcaaggtgtttggctagcaaggctgatggaggagctgcttgggaaagcgggtgttccacctctgctgttggtagataataaaactacgatctgatcaataatccagttttacatgacaggagtaagcacattgagattagattccattacatccaggagtgtgcagaccatggtttgatcagagtcgactacatccgaacagaggagcagcttggggatattttcaccaagtccctggcggttataaaatttgaagaacttcgatcaaagatcggggttcaagaaataaagtaaaagtgccacaggttttaggaggagattgttagataaagccctgtgatccacttagttttaagtcagttagtttgtcaagtcattctgtttgctatccgtttgagctcgatgcatgcccagttcatacagagcggactacgcgctgcgcacgccgtgcgcatggcacgcgtttagtccgccaccacctgttgagtggcgtgagttcagaaggtcgtgtttagacttagcatcctttaaatactgcaataaaaaaacagaaaagctgcactgtctttcgcagcaccaatccacttccactctccacgttcatgtcttgccagagctcgccattggcgttcactgtgctcagcgccggttcactctcatccatttggtcctcatggtttgggcgtgtttgtaaagccagagttgttgcgtcgttgggatgtgatgtggctcggcaacaatgacacaatatgcctgttcttgctagtgacaatgtggttgctatgggtgagggatcggcaaccttggtttgagctgaggttcatcgttggaagtcagagctgctcttcacttacgtgtggagcttggcaatgacgaccggtggactccgttagtgtgaccctgctaaacttggtgtgcatgccggttcgctttggattcaagccggccggttgtttggactgctgcggctttaatctatagagacaaaaacactcagcagaagccggtacggattaaaactgagcgaacaggtatgccttcttggtgctgcttctatcttggcgccctgttgatatggagtccggcctgtttggttgggggcatgatgaagcttggtgacgatgacatgtggtagcctctttctaggtgtgtttggtgaatccagttgtgtgcaggtggctgtgtcttggtagcaggggctaaggtttgtcatgaagaatccactctgttttgttcttttgcacggagtcttggcaacggtttgtgttcactctgttttgttgcttttgcacgaaatcttggcaacgatttgtgtcttaagggctactggatcggctgttgtgcggttgtaagagtacagtgtgttgttgtatgaacttctttaattgagtggcagagctcctgtcttttcattaaaattagtactgcca

SEQ ID NO: 75398 - DNA, 2261 bp, Zea Mays
gacgccttcaagaccctcaagcaggcgctcatgttggcacctttgctacagatgccagactttgagtggcgtttttacatcgactgtgacgtctcaggtgccggtttcggcgccgtcctgcaccaaggcgacggtgtgatcgccttcttcagcaggaccgtggtgcctccccattagaagctgcctgcctacgagcgtgaactcatcagtttggtcaaggcggttcgtcattggaggccatacatttagggacgaccttttactattcgtactgatcactatagtttaaagtatattttggatcaacgtctctctaccattcctcagcacacatgggtgagcaagctcttcggatatgacattgccgtcgagtacaagccagagaagatgaatggcacgactgatatgctgtatcgcatgacgaggaggtggtggcctccctccacaccatctctacgccctccttcgagctcttcgaggtgttgcgcaccgagcgcctcaccgacccgtaggctgcgacattacaccgacagataaccgatggctctgctccagaaggctggactaaggtggacgacctccttaccttcggcggtcgtgtctatgtgccagatgctttggccctttggccacaccaactggcgtacgtccacgactgcagccatgacgacatccagaagacggtcaaccgctggcgcgcctccttccacaacccaagcgcattgcagtagatccgccgattatgtgtgtgggtgtaccacttgccagaagaacaagacggatcatctacatcctagcggtctcccgcagcccctaaccatccttttggaggtttggagcgacatttccatggattttgtggaaggatttccacgtgctggtggcaagacagtggtccttactgtggtggacagattctcgaggtatgcaaacttcatcgctattcggcacccctacacggcatcgtccgtggccaaggccttctttgatgacatcatctgcttacataggctccactgctcaatcgtcagcgaccgcgacacaatctttactagccttttctggaccgagttgttcaagttggctggtgtcaatccgaagtggtaaatcgggtcataaccatgtatttgaggtgtcttgcaggagatcgaccgaagtcctagctgcagtggttgccatgggcagagtattgctacaatacttcataccaaacagccatcaagtgctcgccattccgtgtcgtctatggccgggagccgccaaccctgctgtcctatcaaccgggctccactaaggtggcagcactgtaccatcagctgcaggaccgcgtcacgttcttggtggaaatccgggagcgtcttcttcaggcccaagtaaccatgaaagcttaccaggacaagaaacgtcgccaggtggagttccaagttggcgattgggtgtggctttgcctacaacagtgcacagcagtcaggttgacttctgctactccctccaaacttgggccaaagtactacggtcgataccaggtcctccttcgggtagggctggtctcatacaagctgcagttaccacctcgtgctcgaatacacgatgtcttccatgtttccttgctgaagaagtttgaaggggaggcgccaacacaagtggtaccattacctgtgatcttgcatggtcgtgtcctaccaacactatccaaggtggtacgtgccaggctcaacagaggtgtttaggaattgttgattcagtggtttggtcgtgctgagacagatgcttctagggaaccactcgaagaattcaagcagaggtatccagagttcgagctcacggacgagttctttgtcggtgtggagggaaatgttgtgactagtttgtgggctgccagtatcacaggcgcccaaggctggcagcaggcgcaggaaaggggcagcatgcataggaaaggaaggagtcagcgcaggaaaggaagaagaggtcagtaggaaggttttgattgaataaatcaaatcctccaatcaagggctgagttgttaggaagtttagatttgatatttctgtttccaaatatctaggttaagtaataggaaaggtttggtggctcatcatctataaagccagccgatagtttgtactagggatctatcgaagaagttattccttagtggacagctcttcagtcaccctggctcatccagccagctgctacatcagctgcccactaccgccatatccactgcgttccaaccctcaagctcgcctccttc

SEQ ID NO: 75399 - DNA, 1005 bp, Zea Mays
ctgctcctagttgctatacctgacagagtgacagagttgccataccagccctcatgcaggaggggagatggaaagcaacctacaaattatagtaataatctaacacccccagtcgaaacatctagccactgcaaatgttgagactggacttgaactcaagaaacactgatgtcagaagcccttttgtgaacgtagtggtgaagctagagcaaatataaagggggtgcacctcccttgtggattcataaggatgagatgtgggtgatgcttatatggtgaaaaattgaacactacaattgatttttggaattttagggggtgcacttgcacccactggctacacagtagcttcgcccctgcgtgaacgtcaccaatagcaacacgttctcgaaaagtggagatcaatttcaacatgcttcgtacaatatgttgaactggattggtggataaatagacggcgctgatgttgtcataatagacaagaatactcctatgaagggggcatcgaagttccaacaagagatggcgtaaccaactagcctcgacaactccattaccaagtgcaaatgcaccccgacgacatcgccaagacaaccttccgcactcattgaggccactgagttcctggtgatgctgttcgggttgatgaacacaccttctaccttccaggctctcattaatgaggtgttgaagtcgtacatccgcaagttcgtgctggtcttctttgacgcatcctcatccgcaagttcatgggctgaccatctccaacacgttaagcaggcgttccagttactgtggacacacaagttggcgctcaagtgttctaagtgtctcttcggcactcacacggtcgcttaccttggtcacgtcatctcgtcgaacggcgtggccatggaccccgccaagattgaggttgtggaggcatggccatcgccaaaatcacttcgagctctacgcgggttcctcggattgatcgggtactaccgcaaattcatcgcgggatat

SEQ ID NO: 75400 - DNA, 645 bp, Zea Mays
aaaaaggacttgattcccttatcattctgggagcctggaccttgtggaagcatagaaacaaatgcgtctttgatgcctgcagccctagtgttaccatgagtcttagagctgcggatgaggaaagggcacaatgggagattgctggtgccaaggggctttgccatttagcagcacccttagctgagagttaagaaggtctgatggattcatttatgtatgcttcctactggcctccgtaaggaggccgtttgtattggtcttttttggccacccctttttctgcttaatatataatgggcacagttctcctacgctttcgagaaaaaaagaaacagtagaaaccggtatggattaaagccaaccgaacaggtatattttctagaaaatcacaataattgaacaacactggaaatcaaatccaatgtgatacgtctctaattaagttaccacacatcgaaaattaaaagagtcacagttcatgtgtctgatacagtggaatgatccaaatactgtgtaatctattgctaagcattactaagctcgcacatgaaagtaagcataattgcttttcattcttcctaaaacatggtgtatatcctccatgttttatggcataggatgtctttcaggctaggcatatggctt

SEQ ID NO: 75401 - DNA, 1006 bp, Zea Mays
attagctaagggcatcccatttcaccctcatggttgcactgttatcccgggtggtctctcaacgaacaggtccttacggagaggtactcgggaaacaacccgagtcccctaaatgccacaagtatatcatcatgtccagaataaaatcatagtatcatcattgtatctcatcatgttcattgattaaagtaaagcaatagcatgaagctaaccatagtagcccaaaaggtaatcaagggtgaggtaaatacaaagctagtcaatccttaagttgatcatggtatgcggttgatgaattataaagtaaatgggacataataggtcagaggacacttgccttcaccaaacagatgctcagggtcttcaatctcgtggaactcgaagaactggatcacttggtcgccgaagcttgaccgtcgattcctcgaagctcggaaatggatcgcagtctattcgcgacgcgcaatgaatacaaacaggcacaaggaaacatatacttgcataagaacattacaccatacaagataaaatattatcaacacgagcaataaaaaagagagagcgcttctaccgttacacgaggataagaaacgcgacagtcgaagctacgcccgagaagttataacgtttacgctacacaagtattagtcagaccatttaattcagcattatcaaatatgaattgtaactgctatttagttttgattaaacctgctacactacaattgtcaaataaataagtaatttaattaaaacgggagattctaagcgaggggaatttacgacgcgcagaacagcacgacagcgtgcgaacaacgcacggacacatgcgacatagcacgctgacggcacacgaacagtgcgcgcgaccgacgcgaacgacgcgcgaacccgcacgacaacgtgcaaacgacgcacgaaaatagcgcgcgcgacgagcgtgaacggcgcgcgaaccagcacgccgccactcgcggagcagcacgcacaacagacgagaaaagct

SEQ ID NO: 75402 - DNA, 558 bp, Zea Mays
aaataatgaagaaggattcacataaagtatgagaaataacataaacatttgaatattattattagctcatttctattttattattatggaaaaatagaaatgataacaaattacaaatgtaccttcggcttgaaagaaagcaaaagtacaagcgtgacgcaaaagcaaatgccaagtcagcctaaacagtacgagagcactgttcatctatttataggcacgggacacagcccatgtaaaattacacccaggccctttgcatttgataataactctatagtaatttatcggggtctagatagtcttttcctctttaagtcggtttcctcttttcatccaacatgtcgaagcttccttgcgcacagcttcggctctgttccatccttcgttctccttgtgtttcttcatacagcaattttgacattgtcacacccggttttgaaggtaaaccgaatgcgaaccatatacgtgccaggatcagtaattcacgtacacagcgattacataaatgactcatcatagcacaatgcttcgaattacaataaagagtaagtaata

SEQ ID NO: 75403 - DNA, 1926 bp, Zea Mays
gaaccttcttgccatggcgacgatgtctgcagcgtctcatcgctgctgtgcttcttccttgagagctttaaccgtgttatttgtgttggcagctcctgtttcagatgtagaggggcgacatcatcgtcatgtctgtccttatttctcctgcggtggtttaagcaatatatcgtatccattccgtcggcaaggtgatccatctgggtgcggtgtccaatcgtgtgagctggtttgcacggatacagacgccacaattcgcatcggcagtggaacatacaagccaatagagaacaacgatatatatgagccggtgtcttgcttgagcagttcttctttcatctacatggcatgccggtgcccaagaatacaagctatccagatgttgttaagttcatgaggaatggatttgcccttggatttactgtttcgattcctgaccccaacatcagagaatgtttcgctgagtttatgcgtactttccttaaggatccaagaagtagtacaggcatcaaggaactgattgtggacattcttagggtcgtcgacatattcttggcttgtgttatctatcaacttcaatcaactaataataatggtgtcacaactgttctcatcggcatcattgaaacgatacaatatgttagcggggtcctgaaatatacagcggttgtttgcaggttcgtattaatgccgctggcagtattcatcttcctagtctataaatactggaaaacaaggataacagtagatgcagtcgagaagttcttgcaaatgcagcagatgctcgttccaatgagatatgcatacacaaacatcattgctatcaccggccatttcagagacaagctcggacaaggtggttacggttctgtatacaagggggtgctacagccaggtgaagttcatgttgctatcaagatgttgggcaactccaactgtaatggagacgagttcatcagtgaggtcgccaccattggcaagatccaccatgtcaatattgtgcgcctcatcgggttttgctccgaggaaaatagcagggcacttatctacgagttcatgccccatggatctctcgataagtacatcttctcgtcggagaagagtttctcgtgggacaaactcaatgagatcgctctgggcattgctagaggtctcaactacttgcatcatgggtgtgatatgcagattgtacacttcgacatcaagccacacaacatccttctcgacaacaactttgttccaaaagttgctgattttgggcttgccaagctgttcccaaaagatgacaatttcgtgccactgagcgctatgcggggaacgattggctatatagctccagagatggtatctcgaagctttggtgttatctctagcaaatccgatgtgtacagctttgggatgctactattggagatgacgggcgggcgaaggaacgcagatcctcatgcaggaagctccagtcaagcatactacccatccttggtgtacagccagctgagccaaggagatgcgaacgagatcagtgaaggtgttgatatgcacgagttagagaagaagctatgtatcattgggctttggtgcatacagatgaagccgcaagatcggccgacgatgagcgaggtcatagagatgtttgaagctggtgtcgatggcatccaaatgcctccaaggccattcttttgtgatgacgagggtgatagttcttactctgcaatctctaaactggatacaatagaagagtagtagttgtagtaaaatacacttgtgtctatgtgatcttaatgtattagactactaataatgcaaggttgtcgtaagctaaggtactggttgtatacttttattgagagtgtggtaatgtgttttgatataaaatacctccatgaacctttttttacaaagaactcaagaacattgtttgcctac

SEQ ID NO: 75404 - DNA, 3795 bp, Zea Mays
gccgacacaacgccactgttcgtcgcacttttttttggtgtgcgccgcccgctaaactgcgctacggctacggatttcactagtacctcgtagccaccacgaagtcgccaatcccaatgccaggaaggaagtctcacgaattccctcatgtgccgatgtgcgcaccgcctccgaatgctggaacgggtattcctcttctcgccgccgtcctccgctccggtgagggtcgctaccgctttccggatgcgcttcctactcgttactgacagagggtactgggattccctttgcaacaacctcgcaacccatgggaagagtagacatatctgtataaggatccaccaggtaccagagctggcttgcattgataatgaggctccggcaagagcttgggcctgcaatatcatcttgatttgttgcttctcttgagcatcctacaactactgagacaggattcactacaggagccaagaactggatgatcaaggatggtgtcatgcccagagcatgataattgcatcccaggtgtgccacaggatggagggtggcttggaagccgaaaggggaaccggatctctggtccatgcttgtggcatcgatgcgatgggcaagatttgcggaagtcatcatcttccttcgatgtggcagcataggatgcatagttgagaagcaaaagcagcagcactgccagaagaaatttatgcgagttcatgggggatgtgttcggagatgaaggtgggcgaggagaaggttgcaagtgcttcagaatgagcacctatctctatttgctttaacctctcgggaggagagattatgtgaatgtcatgaccgctacgcggtggaaaggaattcctgctgccaatattgctttaccaggaagtttcctttcttcttcagtcttattcctcccttctcgaatattatatttatcttctgttagtattattttgactgctttgtgcacgcctaacgacctggcttttattttcctagtcaagtcactataagactttttaatttcggataaggcttgtgattgccgtgtttcaactgaaagataacctttttttttcttactctttcggactttcggttgcgtgaaagacccatgcgaaccaaaaaagagaagacacaaaagaagaaagactcaagtcagtggcatcacaatcatgaagtgtgattctcttgctcaaatagctgttacgtggaaggtgcatacgaaccaaaagacagacaaaagaagatagactacaattgaagtgcgattttcttgcaagttgctatgctcggcctatctaggggtaccgtcccactagtaggagataaaaatatacctacatatttcgtacgtgacgtaagacaaccgtcaaaactagtgttttatagtagttgagattgtgatgctctagatatatatgcttaagttacaaaggatatgttgttaaatttttatatgttttcctattttctataagtgaagtcttctctcccttttttcttattttctgtttttatttcaatttctaaattcaaatcaatttcaatttaaatgtaacaataaaaaacccagcatgtagtgcaaggtaaaattttaactttaccttttttcaagaaaatatttctaagtagacaattcataagagaataattccctcaaataaataattaaaaactttttatttaattctgaacttaaaatctggtattacaggtcccatccaatcgcaggccatttgcaaaccagaaaaagcgaaacgcaaaaaaaatcacaattatgtggaccagtcatgtgcgtttgtttctcaaatacaagatgatactcaggctgtgactcttgtttctactcactccacgccactgactggcaggcgattatgtgattcatgaaccttcttgccatggcgacgatgtctgcagcgtctcatcgctgctgtgcttcttccttgagagctttaaccgtgttatttgtgttggcagctcctgtttcagatgtagaggggcgacatcatcgtcatgtctgtccttatttctcctgcggtggtttaagcaatatatcgtatccattccgtcggcaaggtgatccatctgggtgcggtgtccaatcgtgtgagctggtttgcacggatacagacgccacaattcgcatcggcagtggaacatacaagtctgcagccttcatgcggttacctagccatgactcctttgggtagtccaggcatgccggtgcccaagaatacaagctatccagatgttgttaagttcatgaggaatggatttgcccttggatttactgtttcgattcctgaccccaacatcagagaatgtttcgctgagtttatgcgtactttccttaaggatccaagaagtagtacaggcatcaaggaactgattgtggacattcttagggtcgtcgacatattcttggcttgtgttatctatcaacttcaatcaactaataataatggtgtcacaactgttctcatcggcatcattgaaacgatacaatatgttagcggggtcctgaaatatacagcggttgtttgcaggttcgtattaatgccgctggcagtattcatcttcctagtctataaatactggaaaacaaggataacagtagatgcagtcgagaagttcttgcaaatgcagcagatgctcgttccaatgagatatgcatacacaaacatcattgctatcaccggccatttcagagacaagctcggacaaggtggttacggttctgtatacaagggggtgctacagccaggtgaagttcatgttgctatcaagatgttgggcaactccaactgtaatggagacgagttcatcagtgaggtcgccaccattggcaagatccaccatgtcaatattgtgcgcctcatcgggttttgctccgaggaaaatagcagggcacttatctacgagttcatgccccatggatctctcgataagtacatcttctcgtcggagaagagtttctcgtgggacaaactcaatgagatcgctctgggcattgctagaggtctcaactacttgcatcatgggtgtgatatgcagattgtacacttcgacatcaagccacacaacatccttctcgacaacaactttgttccaaaagttgctgattttgggcttgccaagctgttcccaaaagatgacaatttcgtgccactgagcgctatgcggggaacgattggctatatagctccagagatggtatctcgaagctttggtgttatctctagcaaatccgatgtgtacagctttgggatgctactattggagatgacgggcgggcgaaggaacgcagatcctcatgcaggaagctccagtcaagcatactacccatccttggtgtacagccagctgagccaaggagatgcgaacgagatcagtgaaggtgttgatatgcacgagttagagaagaagctatgtatcattgggctttggtgcatacagatgaagccgcaagatcggccgacgatgagcgaggtcatagagatgtttgaagctggtgtcgatggcatccaaatgcctccaaggccattcttttgtgatgacgagggtgatagttcttactctgcaatctctaaactggatacaatagaagagtagtagttgtagtaaaatacacttgtgtctatgtgatcttaatgtattagactactaataatgcaaggttgtcgtaagctaaggtactggttgtatacttttattgagagtgtggtaatgtgttttgatataaaatacctccatgaacctttttttacaaagaactcaagaacattgtttgcctac

SEQ ID NO: 75405 - DNA, 3385 bp, Zea Mays
gccgacacaacgccactgttcgtcgcacttttttttggtgtgcgccgcccgctaaactgcgctacggctacggatttcactagtacctcgtagccaccacgaagtcgccaatcccaatgccaggaaggaagtctcacgaattccctcatgtgccgatgtgcgcaccgcctccgaatgctggaacgggtattcctcttctcgccgccgtcctccgctccggtgagggtcgctaccgctttccggatgcgcttcctactcgttactgacagagggtactgggattccctttgcaacaacctcgcaacccatgggaagagtagacatatctgtataaggatccaccaggtaccagagctggcttgcattgataatgaggctccggcaagagcttgggcctgcaatatcatcttgatttgttgcttctcttgagcatcctacaactactgagacaggattcactacaggagccaagaactggatgatcaaggatggtgtcatgcccagagcatgataattgcatcccaggtgtgccacaggatggagggtggcttggaagccgaaaggggaaccggatctctggtccatgcttgtggcatcgatgcgatgggcaagatttgcggaagtcatcatcttccttcgatgtggcagcataggatgcatagttgagaagcaaaagcagcagcactgccagaagaaatttatgcgagttcatgggggatgtgttcggagatgaaggtgggcgaggagaaggttgcaagtgcttcagaatgagcacctatctctatttgctttaacctctcgggaggagagattatgtgaatgtcatgaccgctacgcggtggaaaggaattcctgctgccaatattgctttaccaggaagtttcctttcttcttcagtcttattcctcccttctcgaatattatatttatcttctgttagtattattttgactgctttgtgcacgcctaacgacctggcttttattttcctagtcaagtcactataagactttttaatttcggataaggcttgtgattgccgtgtttcaactgaaagataacctttttttttcttactctttcggactttcggttgcgtgaaagacccatgcgaaccaaaaaagagaagacacaaaagaagaaagactcaagtcagtggcatcacaatcatgaagtgtgattctcttgctcaaatagctgttacgtggaaggtgcatacgaaccaaaagacagacaaaagaagatagactacaattgaagtgcgattttcttgcaagttgctatgctcggcctatctaggggtcccatccaatcgcaggccatttgcaaaccagaaaaagcgaaacgcaaaaaaaatcacaattatgtggaccagtcatgtgcgtttgtttctcaaatacaagatgatactcaggctgtgactcttgtttctactcactccacgccactgactggcaggcgattatgtgattcatgaaccttcttgccatggcgacgatgtctgcagcgtctcatcgctgctgtgcttcttccttgagagctttaaccgtgttatttgtgttggcagctcctgtttcagatgtagaggggcgacatcatcgtcatgtctgtccttatttctcctgcggtggtttaagcaatatatcgtatccattccgtcggcaaggtgatccatctgggtgcggtgtccaatcgtgtgagctggtttgcacggatacagacgccacaattcgcatcggcagtggaacatacaagtctgcagccttcatgcggttacctagccatgactcctttgggtagtccaggcatgccggtgcccaagaatacaagctatccagatgttgttaagttcatgaggaatggatttgcccttggatttactgtttcgattcctgaccccaacatcagagaatgtttcgctgagtttatgcgtactttccttaaggatccaagaagtagtacaggcatcaaggaactgattgtggacattcttagggtcgtcgacatattcttggcttgtgttatctatcaacttcaatcaactaataataatggtgtcacaactgttctcatcggcatcattgaaacgatacaatatgttagcggggtcctgaaatatacagcggttgtttgcaggttcgtattaatgccgctggcagtattcatcttcctagtctataaatactggaaaacaaggataacagtagatgcagtcgagaagttcttgcaaatgcagcagatgctcgttccaatgagatatgcatacacaaacatcattgctatcaccggccatttcagagacaagctcggacaaggtggttacggttctgtatacaagggggtgctacagccaggtgaagttcatgttgctatcaagatgttgggcaactccaactgtaatggagacgagttcatcagtgaggtcgccaccattggcaagatccaccatgtcaatattgtgcgcctcatcgggttttgctccgaggaaaatagcagggcacttatctacgagttcatgccccatggatctctcgataagtacatcttctcgtcggagaagagtttctcgtgggacaaactcaatgagatcgctctgggcattgctagaggtctcaactacttgcatcatgggtgtgatatgcagattgtacacttcgacatcaagccacacaacatccttctcgacaacaactttgttccaaaagttgctgattttgggcttgccaagctgttcccaaaagatgacaatttcgtgccactgagcgctatgcggggaacgattggctatatagctccagagatggtatctcgaagctttggtgttatctctagcaaatccgatgtgtacagctttgggatgctactattggagatgacgggcgggcgaaggaacgcagatcctcatgcaggaagctccagtcaagcatactacccatccttggtgtacagccagctgagccaaggagatgcgaacgagatcagtgaaggtgttgatatgcacgagttagagaagaagctatgtatcattgggctttggtgcatacagatgaagccgcaagatcggccgacgatgagcgaggtcatagagatgtttgaagctggtgtcgatggcatccaaatgcctccaaggccattcttttgtgatgacgagggtgatagttcttactctgcaatctctaaactggatacaatagaagagtagtagttgtagtaaaatacacttgtgtctatgtgatcttaatgtattagactactaataatgcaaggttgtcgtaagctaaggtactggttgtatacttttattgagagtgtggtaatgtgttttgatataaaatacctccatgaacctttttttacaaagaactcaagaacattgtttgcctac

SEQ ID NO: 75406 - DNA, 4096 bp, Zea Mays
gccgacacaacgccactgttcgtcgcacttttttttggtgtgcgccgcccgctaaactgcgctacggctacggatttcactagtacctcgtagccaccacgaagtcgccaatcccaatgccaggaaggaagtctcacgaattccctcatgtgccgatgtgcgcaccgcctccgaatgctggaacgggtattcctcttctcgccgccgtcctccgctccggtgagggtcgctaccgctttccggatgcgcttcctactcgttactgacagagggtactgggattccctttgcaacaacctcgcaacccatgggaagagtagacatatctgtataaggatccaccaggtaccagagctggcttgcattgataatgaggctccggcaagagcttgggcctgcaatatcatcttgatttgttgcttctcttgagcatcctacaactactgagacaggattcactacaggagccaagaactggatgatcaaggatggtgtcatgcccagagcatgataattgcatcccaggtgtgccacaggatggagggtggcttggaagccgaaaggggaaccggatctctggtccatgcttgtggcatcgatgcgatgggcaagatttgcggaagtcatcatcttccttcgatgtggcagcataggatgcatagttgagaagcaaaagcagcagcactgccagaagaaatttatgcgagttcatgggggatgtgttcggagatgaaggtgggcgaggagaaggttgcaagtgcttcagaatgagcacctatctctatttgctttaacctctcgggaggagagattatgtgaatgtcatgaccgctacgcggtggaaaggaattcctgctgccaatattgctttaccaggaagtttcctttcttcttcagtcttattcctcccttctcgaatattatatttatcttctgttagtattattttgactgctttgtgcacgcctaacgacctggcttttattttcctagtcaagtcactataagactttttaatttcggataaggcttgtgattgccgtgtttcaactgaaagataacctttttttttcttactctttcggactttcggttgcgtgaaagacccatgcgaaccaaaaaagagaagacacaaaagaagaaagactcaagtcagtggcatcacaatcatgaagtgtgattctcttgctcaaatagctgttacgtggaaggtgcatacgaaccaaaagacagacaaaagaagatagactacaattgaagtgcgattttcttgcaagttgctatgctcggcctatctaggggtaccgtcccactagtaggagataaaaatatacctacatatttcgtacgtgacgtaagacaaccgtcaaaactagtgttttatagtagttgagattgtgatgctctagatatatatgcttaagttacaaaggatatgttgttaaatttttatatgttttcctattttctataagtgaagtcttctctcccttttttcttattttctgtttttatttcaatttctaaattcaaatcaatttcaatttaaatgtaacaataaaaaacccagcatgtagtgcaaggtaaaattttaactttaccttttttcaagaaaatatttctaagtagacaattcataagagaataattccctcaaataaataattaaaaactttttatttaattctgaacttaaaatctggtattacaggtcccatccaatcgcaggccatttgcaaaccagaaaaagcgaaacgcaaaaaaaatcacaattatgtggaccagtcatgtgcgtttgtttctcaaatacaagatgatactcaggctgtgactcttgtttctactcactccacgccactgactggcaggcgattatgtgattcatgaaccttcttgccatggcgacgatgtctgcagcgtctcatcgctgctgtgcttcttccttgagagctttaaccgtgttatttgtgttggcagctcctgtttcagatgtagaggggcgacatcatcgtcatgtctgtccttatttctcctgcggtggtttaagcaatatatcgtatccattccgtcggcaaggtgatccatctgggtgcggtgtccaatcgtgtgagctggtttgcacggatacagacgccacaattcgcatcggcagtggaacatacaaggtgcttagcatcaacttcacatattcttacttctgggttgttgatgccaacctggacatccagagcagttgcccccttccccggtgggattaccatgctgggaccagtggcaactcacgtcttgggaggattgagttcagccatgatttcacatatttttgttatcctaattctaagtgggctttctttgtgaattgttctcagccaatagagaacaacgatatatatgagccggtgtcttgcttgagcagttcttctttcatctacatggtaactgacttcttgtatgatggctatgttcctgctgatagtctgcagccttcatgcggttacctagccatgactcctttgggtagtccaggcatgccggtgcccaagaatacaagctatccagatgttgttaagttcatgaggaatggatttgcccttggatttactgtttcgattcctgaccccaacatcagagaatgtttcgctgagtttatgcgtactttccttaaggatccaagaagtagtacaggcatcaaggaactgattgtggacattcttagggtcgtcgacatattcttggcttgtgttatctatcaacttcaatcaactaataataatggtgtcacaactgttctcatcggcatcattgaaacgatacaatatgttagcggggtcctgaaatatacagcgggttcgtattaatgccgctggcagtattcatcttcctagtctataaatactggaaaacaaggataacagtagatgcagtcgagaagttcttgcaaatgcagcagatgctcgttccaatgagatatgcatacacaaacatcattgctatcaccggccatttcagagacaagctcggacaaggtggttacggttctgtatacaagggggtgctacagccaggtgaagttcatgttgctatcaagatgttgggcaactccaactgtaatggagacgagttcatcagtgaggtcgccaccattggcaagatccaccatgtcaatattgtgcgcctcatcgggttttgctccgaggaaaatagcagggcacttatctacgagttcatgccccatggatctctcgataagtacatcttctcgtcggagaagagtttctcgtgggacaaactcaatgagatcgctctgggcattgctagaggtctcaactacttgcatcatgggtgtgatatgcagattgtacacttcgacatcaagccacacaacatccttctcgacaacaactttgttccaaaagttgctgattttgggcttgccaagctgttcccaaaagatgacaatttcgtgccactgagcgctatgcggggaacgattggctatatagctccagagatggtatctcgaagctttggtgttatctctagcaaatccgatgtgtacagctttgggatgctactattggagatgacgggcgggcgaaggaacgcagatcctcatgcaggaagctccagtcaagcatactacccatccttggtgtacagccagctgagccaaggagatgcgaacgagatcagtgaaggtgttgatatgcacgagttagagaagaagctatgtatcattgggctttggtgcatacagatgaagccgcaagatcggccgacgatgagcgaggtcatagagatgtttgaagctggtgtcgatggcatccaaatgcctccaaggccattcttttgtgatgacgagggtgatagttcttactctgcaatctctaaactggatacaatagaagagtagtagttgtagtaaaatacacttgtgtctatgtgatcttaatgtattagactactaataatgcaaggttgtcgtaagctaaggtactggttgtatacttttattgagagtgtggtaatgtgttttgatataaaatacctccatgaacctttttttacaaagaactcaagaacattgtttgcctac

SEQ ID NO: 75407 - DNA, 4111 bp, Zea Mays
gccgacacaacgccactgttcgtcgcacttttttttggtgtgcgccgcccgctaaactgcgctacggctacggatttcactagtacctcgtagccaccacgaagtcgccaatcccaatgccaggaaggaagtctcacgaattccctcatgtgccgatgtgcgcaccgcctccgaatgctggaacgggtattcctcttctcgccgccgtcctccgctccggtgagggtcgctaccgctttccggatgcgcttcctactcgttactgacagagtgtagggtactgggattccctttgcaacaacctcgcaacccatgggaagagtagacatatctgtataaggatccaccaggtaccagagctggcttgcattgataatgaggctccggcaagagcttgggcctgcaatatcatcttgatttgttgcttctcttgagcatcctacaactactgagacaggattcactacaggagccaagaactggatgatcaaggatggtgtcatgcccagagcatgataattgcatcccaggtgtgccacaggatggagggtggcttggaagccgaaaggggaaccggatctctggtccatgcttgtggcatcgatgcgatgggcaagatttgcggaagtcatcatcttccttcgatgtggcagcataggatgcatagttgagaagcaaaagcagcagcactgccagaagaaatttatgcgagttcatgggggatgtgttcggagatgaaggtgggcgaggagaaggttgcaagtgcttcagaatgagcacctatctctatttgctttaacctctcgggaggagagattatgtgaatgtcatgaccgctacgcggtggaaaggaattcctgctgccaatattgctttaccaggaagtttcctttcttcttcagtcttattcctcccttctcgaatattatatttatcttctgttagtattattttgactgctttgtgcacgcctaacgacctggcttttattttcctagtcaagtcactataagactttttaatttcggataaggcttgtgattgccgtgtttcaactgaaagataacctttttttttcttactctttcggactttcggttgcgtgaaagacccatgcgaaccaaaaaagagaagacacaaaagaagaaagactcaagtcagtggcatcacaatcatgaagtgtgattctcttgctcaaatagctgttacgtggaaggtgcatacgaaccaaaagacagacaaaagaagatagactacaattgaagtgcgattttcttgcaagttgctatgctcggcctatctaggggtaccgtcccactagtaggagataaaaatatacctacatatttcgtacgtgacgtaagacaaccgtcaaaactagtgttttatagtagttgagattgtgatgctctagatatatatgcttaagttacaaaggatatgttgttaaatttttatatgttttcctattttctataagtgaagtcttctctcccttttttcttattttctgtttttatttcaatttctaaattcaaatcaatttcaatttaaatgtaacaataaaaaacccagcatgtagtgcaaggtaaaattttaactttaccttttttcaagaaaatatttctaagtagacaattcataagagaataattccctcaaataaataattaaaaactttttatttaattctgaacttaaaatctggtattacaggtcccatccaatcgcaggccatttgcaaaccagaaaaagcgaaacgcaaaaaaaatcacaattatgtggaccagtcatgtgcgtttgtttctcaaatacaagatgatactcaggctgtgactcttgtttctactcactccacgccactgactggcaggcgattatgtgattcatgaaccttcttgccatggcgacgatgtctgcagcgtctcatcgctgctgtgcttcttccttgagagctttaaccgtgttatttgtgttggcagctcctgtttcagatgtagaggggcgacatcatcgtcatgtctgtccttatttctcctgcggtggtttaagcaatatatcgtatccattccgtcggcaaggtgatccatctgggtgcggtgtccaatcgtgtgagctggtttgcacggatacagacgccacaattcgcatcggcagtggaacatacaaggtgcttagcatcaacttcacatattcttacttctgggttgttgatgccaacctggacatccagagcagttgcccccttccccggtgggattaccatgctgggaccagtggcaactcacgtcttgggaggattgagttcagccatgatttcacatatttttgttatcctaattctaagtgggctttctttgtgaattgttctcagccaatagagaacaacgatatatatgagccggtgtcttgcttgagcagttcttctttcatctacatggtaactgacttcttgtatgatggctatgttcctgctgatagtctgcagccttcatgcggttacctagccatgactcctttgggtagtccaggcatgccggtgcccaagaatacaagctatccagatgttgttaagttcatgaggaatggatttgcccttggatttactgtttcgattcctgaccccaacatcagagaatgtttcgctgagtttatgcgtactttccttaaggatccaagaagtagtacaggcatcaaggaactgattgtggacattcttagggtcgtcgacatattcttggcttgtgttatctatcaacttcaatcaactaataataatggtgtcacaactgttctcatcggcatcattgaaacgatacaatatgttagcggggtcctgaaatatacagcggttgtttgcaggttcgtattaatgccgctggcagtattcatcttcctagtctataaatactggaaaacaaggataacagtagatgcagtcgagaagttcttgcaaatgcagcagatgctcgttccaatgagatatgcatacacaaacatcattgctatcaccggccatttcagagacaagctcggacaaggtggttacggttctgtatacaagggggtgctacagccaggtgaagttcatgttgctatcaagatgttgggcaactccaactgtaatggagacgagttcatcagtgaggtcgccaccattggcaagatccaccatgtcaatattgtgcgcctcatcgggttttgctccgaggaaaatagcagggcacttatctacgagttcatgccccatggatctctcgataagtacatcttctcgtcggagaagagtttctcgtgggacaaactcaatgagatcgctctgggcattgctagaggtctcaactacttgcatcatgggtgtgatatgcagattgtacacttcgacatcaagccacacaacatccttctcgacaacaactttgttccaaaagttgctgattttgggcttgccaagctgttcccaaaagatgacaatttcgtgccactgagcgctatgcggggaacgattggctatatagctccagagatggtatctcgaagctttggtgttatctctagcaaatccgatgtgtacagctttgggatgctactattggagatgacgggcgggcgaaggaacgcagatcctcatgcaggaagctccagtcaagcatactacccatccttggtgtacagccagctgagccaaggagatgcgaacgagatcagtgaaggtgttgatatgcacgagttagagaagaagctatgtatcattgggctttggtgcatacagatgaagccgcaagatcggccgacgatgagcgaggtcatagagatgtttgaagctggtgtcgatggcatccaaatgcctccaaggccattcttttgtgatgacgagggtgatagttcttactctgcaatctctaaactggatacaatagaagagtagtagttgtagtaaaatacacttgtgtctatgtgatcttaatgtattagactactaataatgcaaggttgtcgtaagctaaggtactggttgtatacttttattgagagtgtggtaatgtgttttgatataaaatacctccatgaacctttttttacaaagaactcaagaacattgtttgcctac

SEQ ID NO: 75408 - DNA, 3918 bp, Zea Mays
gccgacacaacgccactgttcgtcgcacttttttttggtgtgcgccgcccgctaaactgcgctacggctacggatttcactagtacctcgtagccaccacgaagtcgccaatcccaatgccaggaaggaagtctcacgaattccctcatgtgccgatgtgcgcaccgcctccgaatgctggaacgggtattcctcttctcgccgccgtcctccgctccggtgagggtcgctaccgctttccggatgcgcttcctactcgttactgacagagggtactgggattccctttgcaacaacctcgcaacccatgggaagagtagacatatctgtataaggatccaccaggtaccagagctggcttgcattgataatgaggctccggcaagagcttgggcctgcaatatcatcttgatttgttgcttctcttgagcatcctacaactactgagacaggattcactacaggagccaagaactggatgatcaaggatggtgtcatgcccagagcatgataattgcatcccaggtgtgccacaggatggagggtggcttggaagccgaaaggggaaccggatctctggtccatgcttgtggcatcgatgcgatgggcaagatttgcggaagtcatcatcttccttcgatgtggcagcataggatgcatagttgagaagcaaaagcagcagcactgccagaagaaatttatgcgagttcatgggggatgtgttcggagatgaaggtgggcgaggagaaggttgcaagtgcttcagaatgagcacctatctctatttgctttaacctctcgggaggagagattatgtgaatgtcatgaccgctacgcggtggaaaggaattcctgctgccaatattgctttaccaggaagtttcctttcttcttcagtcttattcctcccttctcgaatattatatttatcttctgttagtattattttgactgctttgtgcacgcctaacgacctggcttttattttcctagtcaagtcactataagactttttaatttcggataaggcttgtgattgccgtgtttcaactgaaagataacctttttttttcttactctttcggactttcggttgcgtgaaagacccatgcgaaccaaaaaagagaagacacaaaagaagaaagactcaagtcagtggcatcacaatcatgaagtgtgattctcttgctcaaatagctgttacgtggaaggtgcatacgaaccaaaagacagacaaaagaagatagactacaattgaagtgcgattttcttgcaagttgctatgctcggcctatctaggggtaccgtcccactagtaggagataaaaatatacctacatatttcgtacgtgacgtaagacaaccgtcaaaactagtgttttatagtagttgagattgtgatgctctagatatatatgcttaagttacaaaggatatgttgttaaatttttatatgttttcctattttctataagtgaagtcttctctcccttttttcttattttctgtttttatttcaatttctaaattcaaatcaatttcaatttaaatgtaacaataaaaaacccagcatgtagtgcaaggtaaaattttaactttaccttttttcaagaaaatatttctaagtagacaattcataagagaataattccctcaaataaataattaaaaactttttatttaattctgaacttaaaatctggtattacaggtcccatccaatcgcaggccatttgcaaaccagaaaaagcgaaacgcaaaaaaaatcacaattatgtggaccagtcatctcctgtttcagatgtagaggggcgacatcatcgtcatgtctgtccttatttctcctgcggtggtttaagcaatatatcgtatccattccgtcggcaaggtgatccatctgggtgcggtgtccaatcgtgtgagctggtttgcacggatacagacgccacaattcgcatcggcagtggaacatacaaggtgcttagcatcaacttcacatattcttacttctgggttgttgatgccaacctggacatccagagcagttgcccccttccccggtgggattaccatgctgggaccagtggcaactcacgtcttgggaggattgagttcagccatgatttcacatatttttgttatcctaattctaagtgggctttctttgtgaattgttctcagccaatagagaacaacgatatatatgagccggtgtcttgcttgagcagttcttctttcatctacatggtaactgacttcttgtatgatggctatgttcctgctgatagtctgcagccttcatgcggttacctagccatgactcctttgggtagtccaggcatgccggtgcccaagaatacaagctatccagatgttgttaagttcatgaggaatggatttgcccttggatttactgtttcgattcctgaccccaacatcagagaatgtttcgctgagtttatgcgtactttccttaaggatccaagaagtagtacaggcatcaaggaactgattgtggacattcttagggtcgtcgacatattcttggcttgtgttatctatcaacttcaatcaactaataataatggtgtcacaactgttctcatcggcatcattgaaacgatacaatatgttagcggggtcctgaaatatacagcggttgtttgcaggttcgtattaatgccgctggcagtattcatcttcctagtctataaatactggaaaacaaggataacagtagatgcagtcgagaagttcttgcaaatgcagcagatgctcgttccaatgagatatgcatacacaaacatcattgctatcaccggccatttcagagacaagctcggacaaggtggttacggttctgtatacaagggggtgctacagccaggtgaagttcatgttgctatcaagatgttgggcaactccaactgtaatggagacgagttcatcagtgaggtcgccaccattggcaagatccaccatgtcaatattgtgcgcctcatcgggttttgctccgaggaaaatagcagggcacttatctacgagttcatgccccatggatctctcgataagtacatcttctcgtcggagaagagtttctcgtgggacaaactcaatgagatcgctctgggcattgctagaggtctcaactacttgcatcatgggtgtgatatgcagattgtacacttcgacatcaagccacacaacatccttctcgacaacaactttgttccaaaagttgctgattttgggcttgccaagctgttcccaaaagatgacaatttcgtgccactgagcgctatgcggggaacgattggctatatagctccagagatggtatctcgaagctttggtgttatctctagcaaatccgatgtgtacagctttgggatgctactattggagatgacgggcgggcgaaggaacgcagatcctcatgcaggaagctccagtcaagcatactacccatccttggtgtacagccagctgagccaaggagatgcgaacgagatcagtgaaggtgttgatatgcacgagttagagaagaagctatgtatcattgggctttggtgcatacagatgaagccgcaagatcggccgacgatgagcgaggtcatagagatgtttgaagctggtgtcgatggcatccaaatgcctccaaggccattcttttgtgatgacgagggtgatagttcttactctgcaatctctaaactggatacaatagaagagtagtagttgtagtaaaatacacttgtgtctatgtgatcttaatgtattagactactaataatgcaaggttgtcgtaagctaaggtactggttgtatacttttattgagagtgtggtaatgtgttttgatataaaatacctccatgaacctttttttacaaagaactcaagaacattgtttgcctac

SEQ ID NO: 75409 - DNA, 387 bp, Zea Mays
gccgacacaacgccactgttcgtcgcacttttttttggtgtgcgccgcccgctaaactgcgctacggctacggatttcactagtacctcgtagccaccacgaagtcgccaatcccaatgccaggaaggaagtctcacgaattccctcatgtgccgatgtgcgcaccgcctccgaatgctggaacgggtattcctcttctcgccgccgtcctccgctccggtgagggtcgctaccgctttccggatgcgcttcctactcgttactgacagaggcaattttggttcaacatcttctagaaggggattgactgcactatccccaggcattgaggaaagcagttttgaggcttggtggagttcttcagctgctcgccttaatggaggcatc

SEQ ID NO: 75410 - DNA, 2159 bp, Zea Mays
ctgcacgccactgattggctcgcgtgattcgtggaccttcttgccatggcgacgatgtctgcagcgtctcatcgctgctgtgcttcttccttgagagctttaacggtgttatttgtgttggcagctcttgtttcagatgttggcgggcgacatcatcatcatgtttgtcctcattatttctcctgtggtggtttaagcaatatatcgtatccatttcgtcggcaaggtgatccatctgggtgtggtgtccaatcgtacgagctggtttgcacggatacagatgctacaattcgcatcggcagtggaacatacaaggtgcttagcatcaactccacatattctcacttctgggttgttgatgccgacctggacatccagagcagttgcccccttccccggtgggattaccatgctcgttggatcaatctcaacttacatcgttggtggattgtgtcgagccaatattatttctattcttcttctttttatatggattcgtggcggtgggctatctttgtgaattgttctcagccaatagagaacaatgatactgataaatatcatatatatgagccggtgtcttgcttgagcaattcttctttcatctacttggtacctgactactggtatgctggccttgttcctgctgggagtctggagccttcatgcggttacctagccatgactcctttgggtggtccaggcatgcaggtgccctcgaatacaagctatccagatgttgttaagttcatgaggagtggatttgcccttggatttccctcgtatggtgataacatcagagaatgtctcgcaaaggatatgcggtgtttgcaggttcgtattaatgccgctggcagtattcgtcttcctagtctataaatactggaaaacaaggataacagtagatgcagtcgagaagttcttgcgaacgcagcagatgctcgttccgatgagatatgcatacacaaacatcattgctatcaccggccatttcagagacaagctcggacaaggtggttacggttctgtatacaagggggtgctacagccaggtgaagttcatgttgctattaagatgttgggcaactccaactgtaacggagacgagttcatcagtgaggtcgccaccattggcaagatccaccatgtcaatattgtgcgcctcatcgggttttgctccgaggaaaatagcagagcacttatctacgagttcatgccccatggatctctcgataagtacatcttctcgtcggagaagagtttctcatgggtcaaactcaatgagatcgctctgggcattgctagcggtctcaactacctacatcatgggtgtgatatgcagattgtacacttcgacatcaagccacacaacatccttcttgacagcaactttgttccaaaagttgctgattttgggcttgccaaactgttcccaagaggcgacagtttcgtgccactgagcgctatgcggggaacgataggatatatagctccagagatggtatctcgaagctttggtgtcatctctagcaaatccgatgtgtacagctttgggatgctactattggagatgacgggtgggcgaaggaacgcagatcctcatgcaggaagctccagtcaagcatactacccatccttggtgtacaaccagctgagccagggtgatgcgaacgggattagtgaaggtgttaatatgcacgatttagagaagaagctatgtactattgggctttggtgcatccaaatgaagccgcaagatcggccgacgatgagcgaggtcatagagatgcttgaatctggtgtcgatggcatgcaaatgcctccaagaccatacttttgtgatgaagagggtgacagttcttactctataatctctgaactggatacaattgaagagtaataattgtagtaaaatacacttgtgtctatgtgatcttaatgtattagactactaataatgcaaggttgtcataagctaaggtactggttgtatacttttattgagagtgtggtaatgtgttttgatataaaatacctccatgaacctatttttacaaagaactcctcaagaacatttgtttgcctacaagcagaggatcagagtcctagccgttctatcttccaaaggttgcacttcctatatacgaatccatgtgaag

SEQ ID NO: 75411 - DNA, 2030 bp, Zea Mays
cgaagatgctgaggctgtgaccccgggtgactcttgtttctacccacttatctttgcagtcgccactgcacgccactgattggctcgcgtgattcgtggaccttcttgccatggcgacgatgtctgcagcgtctcatcgctgctgtgcttcttccttgagagctttaacggtgttatttgtgttggcagctcttgtttcagatgttggcgggcgacatcatcatcatgtttgtcctcattatttctcctgtggtggtttaagcaatatatcgtatccatttcgtcggcaaggtgatccatctgggtgtggtgtccaatcgtacgagctggtttgcacggatacagatgctacaattcgcatcggcagtggaacatacaaggcatgcaggtgccctcgaatacaagctatccagatgttgttaagttcatgaggagtggatttgcccttggatttccctcgtatggtgataacatcagagaatgtctcgcaaaggatatgcgtactttccataaagaaccaagaaatagtacaggcatcaggcaacagatcttggacattcttacggtcgtcgacatattctgggcttgtgttatctatcaacttcaatcaactaattataatggtgtcacaactgttgtcatcggcatcattgaaacgatacaatatgttagcggggtcctggattatacagctggtgtttgcaggttcgtattaatgccgctggcagtattcgtcttcctagtctataaatactggaaaacaaggataacagtagatgcagtcgagaagttcttgcgaacgcagcagatgctcgttccgatgagatatgcatacacaaacatcattgctatcaccggccatttcagagacaagctcggacaaggtggttacggttctgtatacaagggggtgctacagccaggtgaagttcatgttgctattaagatgttgggcaactccaactgtaacggagacgagttcatcagtgaggtcgccaccattggcaagatccaccatgtcaatattgtgcgcctcatcgggttttgctccgaggaaaatagcagagcacttatctacgagttcatgccccatggatctctcgataagtacatcttctcgtcggagaagagtttctcatgggtcaaactcaatgagatcgctctgggcattgctagcggtctcaactacctacatcatgggtgtgatatgcagattgtacacttcgacatcaagccacacaacatccttcttgacagcaactttgttccaaaagttgctgattttgggcttgccaaactgttcccaagaggcgacagtttcgtgccactgagcgctatgcggggaacgataggatatatagctccagagatggtatctcgaagctttggtgtcatctctagcaaatccgatgtgtacagctttgggatgctactattggagatgacgggtgggcgaaggaacgcagatcctcatgcaggaagctccagtcaagcatactacccatccttggtgtacaaccagctgagccagggtgatgcgaacgggattagtgaaggtgttaatatgcacgatttagagaagaagctatgtactattgggctttggtgcatccaaatgaagccgcaagatcggccgacgatgagcgaggtcatagagatgcttgaatctggtgtcgatggcatgcaaatgcctccaagaccatacttttgtgatgaagagggtgacagttcttactctataatctctgaactggatacaattgaagagtaataattgtagtaaaatacacttgtgtctatgtgatcttaatgtattagactactaataatgcaaggttgtcataagctaaggtactggttgtatacttttattgagagtgtggtaatgtgttttgatataaaatacctccatgaacctatttttacaaagaactcctcaagaacatttgtttgcctacaagcagaggatcagagtcctagccgttctatcttccaaaggttgcacttcctatatacgaatccatgtgaag

SEQ ID NO: 75412 - DNA, 1874 bp, Zea Mays
gtggaccagtcatgtgcgattttgttccacgaatacagcgaagatgctgaggctgtgaccccgggtgactcttgtttctacccacttatctttgcagtcgccactgcacgccactgattggctcgcgtgattcgtggaccttcttgccatggcgacgatgtctgcagcgtctcatcgctgctgtgcttcttccttgagagctttaacggtgttatttgtgttggcagctcttgtttcagatgttggcgggcgacatcatcatcatgtttgtcctcattatttctcctgtggtggtttaagcaatatatcgtatccatttcgtcggcaaggtgatccatctgggtgtggtgtccaatcgtacgagctggtttgcacggatacagatgctacaattcgcatcggcagtggaacatacaaggcatgcaggtgccctcgaatacaagctatccagatgttgttaagttcatgaggagtggatttgcccttggatttccctcgtatggtgataacatcagagaatgtctcgcaaaggatatgcggtgtttgcaggttcgtattaatgccgctggcagtattcgtcttcctagtctataaatactggaaaacaaggataacagtagatgcagtcgagaagttcttgcgaacgcagcagatgctcgttccgatgagatatgcatacacaaacatcattgctatcaccggccatttcagagacaagctcggacaaggtggttacggttctgtatacaagggggtgctacagccaggtgaagttcatgttgctattaagatgttgggcaactccaactgtaacggagacgagttcatcagtgaggtcgccaccattggcaagatccaccatgtcaatattgtgcgcctcatcgggttttgctccgaggaaaatagcagagcacttatctacgagttcatgccccatggatctctcgataagtacatcttctcgtcggagaagagtttctcatgggtcaaactcaatgagatcgctctgggcattgctagcggtctcaactacctacatcatgggtgtgatatgcagattgtacacttcgacatcaagccacacaacatccttcttgacagcaactttgttccaaaagttgctgattttgggcttgccaaactgttcccaagaggcgacagtttcgtgccactgagcgctatgcggggaacgataggatatatagctccagagatggtatctcgaagctttggtgtcatctctagcaaatccgatgtgtacagctttgggatgctactattggagatgacgggtgggcgaaggaacgcagatcctcatgcaggaagctccagtcaagcatactacccatccttggtgtacaaccagctgagccagggtgatgcgaacgggattagtgaaggtgttaatatgcacgatttagagaagaagctatgtactattgggctttggtgcatccaaatgaagccgcaagatcggccgacgatgagcgaggtcatagagatgcttgaatctggtgtcgatggcatgcaaatgcctccaagaccatacttttgtgatgaagagggtgacagttcttactctataatctctgaactggatacaattgaagagtaataattgtagtaaaatacacttgtgtctatgtgatcttaatgtattagactactaataatgcaaggttgtcataagctaaggtactggttgtatacttttattgagagtgtggtaatgtgttttgatataaaatacctccatgaacctatttttacaaagaactcctcaagaacatttgtttgcctacaagcagaggatcagagtcctagccgttctatcttccaaaggttgcacttcctatatacgaatccatgtgaag

SEQ ID NO: 75413 - DNA, 2370 bp, Zea Mays
ctggcttttattttcctagtcaagtcactataagactttttaatttcggataaggcttgtgattgccgtgtttcaactgaaagataacctttttttttcttactctttcggactttcggttgcgtgaaagacccatgcgaaccaaaaaagagaagacacaaaagaagaaagactcaagtcagtggcatcacaatcatgaagtgtgattctcttgctcaaatagctgttacgtggaaggtgcatacgaaccaaaagacagacaaaagaagatagactaccaagtcagtggcatcacaatcatgtagggccaattgaagtgcgattttctttctcaaaaacagtcatgtgcgattttctttctcaaaaacagtgaagatgctcaggctgtatgcgactctgggtgactcttgtcttccacacatcgccacgccactgattggctcgcgattatgtgattcgtgaaccttcttgccatggggatgtctgcagcgtctcatctctgtgcttcttcgtccctgcgagctttaaccgtgttgtttgtgttggcagcttttgtttcagatgtagaggggcgacatcgtcgtcatgtctgtcctccttatttctcctgcggtggtttaagcaatatatcgtatccatttcgtcggcaaggtgatccatctgggtgcggtgtccaatcgtatgagctggtttgcacggatacagatgctacaattcgcatcggcagtggaacatacaagccttcatgcggttacctagccaagactcctttgggtggtccaggcatgacggtgccctcgaatacaagctatccagatgttgttaagttcatgaggaatggatttgcccttggatttcctttttcgattagatcttaccccaccatcagagaatgtctcgcagagaatatgcgtactttccataaagaaccaagaaatagtacaggcatcaggcaacagatcttggacattcttacgttcgagacattatggttttgtgttattgaacaacttggatcaactaataatggtgtcaaatctgttctcatcgacatcatccaacaaataccatatgttctttccagtctgaaatctgcacatgttatttgcaggttcgtattgatgccgctggcagtatttgtcttcctagcctataaatactggaaaacacagataacaatagatgcagttgagaagttcctgcgaatgcagaatatgctcgttccgatgagatatgcatacacaaacatcattgctatcaccggccatttcagagacaagctcggacaaggaggctacggtactgtatacaagggagtgctactgccaggtgaaattcatgttgctgtcaagatgctaggcaactccaactgtaacggagaagagttcatcagtgaggtcgccaccattggcaagatccaccatgtcaatgttgtgcgcctcattgggttttgctccgaggaaaatattagggcacttatctatgagttcatgccccgtggatctctcgataagtacatcttctcgtcggagaagacattctcatgggacaaactcaacgagatcgctctgggcattgctagaggtcttaactacttgcatcacgggtgtgatatgcagattgtacactttgacatcaagccacacaacatccttcttgatagcaactttgttccaaaagttgctgattttgggctagccaaactgttcccaagagatgacagtttcgtgccactgagcgctatgcggggaacgataggttatatagctccagagatggtatctcgaagctttggtatcatctctagcaaatccgatgtgtacagctttgggatgctactattggagatgacgggcgggcgaagaaacgcagatcctcatgcaggaagctccagtcaagcatactacccatccttggtgtacaggcagctgagccaaggtgatgcgaacaggatcagtgaaggtgttgatatgcacgagttagagaagaagctatgtatcattgggctttggtgcatccagatgaagccgcaagatcggccgacgatgagcgaagtcatagagatgcttgaagctggtgtcgatggcatccaaatgcctccaaggccatacttttgtgatgaagagggtgacagttcttactctacaatctctgaactcgatacaatagaagagtagtagtggtagtaaaatgcacttgtgtctatgtgctcttaatgtatcagactattaagattgcaaggttgccataagctaaggtactggttgtatacttttattgagagtgtgataatgtgatatcatataaaatacctccatgaagttttttacaaagaactcctcaagaatattgtgtttgcctacaagcaga

SEQ ID NO: 75414 - DNA, 2574 bp, Zea Mays
tttgactgctttgtgcacgcctaacgacctggcttttattttcctagtcaagtcactataagactttttaatttcggataaggcttgtgattgccgtgtttcaactgaaagataacctttttttttcttactctttcggactttcggttgcgtgaaagacccatgcgaaccaaaaaagagaagacacaaaagaagaaagactcaagtcagtggcatcacaatcatgaagtgtgattctcttgctcaaatagctgttacgtggaaggtgcatacgaaccaaaagacagacaaaagaagatagactaccaagtcagtggcatcacaatcatgtagggccaattgaagtgcgattttctttctcaaaaacagtcatgtgcgattttctttctcaaaaacagtgaagatgctcaggctgtatgcgactctgggtgactcttgtcttccacacatcgccacgccactgattggctcgcgattatgtgattcgtgaaccttcttgccatggggatgtctgcagcgtctcatctctgtgcttcttcgtccctgcgagctttaaccgtgttgtttgtgttggcagcttttgtttcagatgtagaggggcgacatcgtcgtcatgtctgtcctccttatttctcctgcggtggtttaagcaatatatcgtatccatttcgtcggcaaggtgatccatctgggtgcggtgtccaatcgtatgagctggtttgcacggatacagatgctacaattcgcatcggcagtggaacatacaaggtgcttagcatcaactccacatattcttacttctgggttgttgatgccgacctggacatccagagcagttgcccccttccccggtgggattaccctgctcgttggatcaatcgcaactcacatcgttggaggattgagttcagccattattatctctattcttctttttatactgtttcgaggtgggctatctttgtgaattgttctcagccaatagagaacaatgatatatgtaataatatatatgatgacgatgtgtatgggccggtgtcttgcttgagcaattcttctttcatctacttgctggtaactgacaactgggatgttatttctgctggggatctggagccttcatgcggttacctagccaagactcctttgggtggtccaggcatgacggtgccctcgaatacaagctatccagatgttgttaagttcatgaggaatggatttgcccttggatttcctttttcgattagatcttaccccaccatcagagaatgtctcgcagagaatatgcgtactttccataaagaaccaagaaatagtacaggcatcaggcaacagatcttggacattcttacgttcgagacattatggttttgtgttattgaacaacttggatcaactaataatggtgtcaaatctgttctcatcgacatcatccaacaaataccatatgttctttccagtctgaaatctgcacatgagacaagctcggacaaggaggctacggtactgtatacaagggagtgctactgccaggtgaaattcatgttgctgtcaagatgctaggcaactccaactgtaacggagaagagttcatcagtgaggtcgccaccattggcaagatccaccatgtcaatgttgtgcgcctcattgggttttgctccgaggaaaatattagggcacttatctatgagttcatgccccgtggatctctcgataagtacatcttctcgtcggagaagacattctcatgggacaaactcaacgagatcgctctgggcattgctagaggtcttaactacttgcatcacgggtgtgatatgcagattgtacactttgacatcaagccacacaacatccttcttgatagcaactttgttccaaaagttgctgattttgggctagccaaactgttcccaagagatgacagtttcgtgccactgagcgctatgcggggaacgataggttatatagctccagagatggtatctcgaagctttggtatcatctctagcaaatccgatgtgtacagctttgggatgctactattggagatgacgggcgggcgaagaaacgcagatcctcatgcaggaagctccagtcaagcatactacccatccttggtgtacaggcagctgagccaaggtgatgcgaacaggatcagtgaaggtgttgatatgcacgagttagagaagaagctatgtatcattgggctttggtgcatccagatgaagccgcaagatcggccgacgatgagcgaagtcatagagatgcttgaagctggtgtcgatggcatccaaatgcctccaaggccatacttttgtgatgaagagggtgacagttcttactctacaatctctgaactcgatacaatagaagagtagtagtggtagtaaaatgcacttgtgtctatgtgctcttaatgtatcagactattaagattgcaaggttgccataagctaaggtactggttgtatacttttattgagagtgtgataatgtgatatcatataaaatacctccatgaagttttttacaaagaactcctcaagaatattgtgtttgcctacaagcaga

SEQ ID NO: 75415 - DNA, 2509 bp, Zea Mays
gttagtattattttgactgctttgtgcacgcctaacgacctggcttttattttcctagtcaagtcactataagactttttaatttcggataaggcttgtgattgccgtgtttcaactgaaagataacctttttttttcttactctttcggactttcggttgcgtgaaagacccatgcgaaccaaaaaagagaagacacaaaagaagaaagactcaagtcagtggcatcacaatcatgaagtgtgattctcttgctcaaatagctgttacgtggaaggtgcatacgaaccaaaagacagacaaaagaagatagactaccaagtcagtggcatcacaatcatcttttgtttcagatgtagaggggcgacatcgtcgtcatgtctgtcctccttatttctcctgcggtggtttaagcaatatatcgtatccatttcgtcggcaaggtgatccatctgggtgcggtgtccaatcgtatgagctggtttgcacggatacagatgctacaattcgcatcggcagtggaacatacaaggtgcttagcatcaactccacatattcttacttctgggttgttgatgccgacctggacatccagagcagttgcccccttccccggtgggattaccctgctcgttggatcaatcgcaactcacatcgttggaggattgagttcagccattattatctctattcttctttttatactgtttcgaggtgggctatctttgtgaattgttctcagccaatagagaacaatgatatatgtaataatatatatgatgacgatgtgtatgggccggtgtcttgcttgagcaattcttctttcatctacttgctggtaactgacaactgggatgttatttctgctggggatctggagccttcatgcggttacctagccaagactcctttgggtggtccaggcatgacggtgccctcgaatacaagctatccagatgttgttaagttcatgaggaatggatttgcccttggatttcctttttcgattagatcttaccccaccatcagagaatgtctcgcagagaatatgcgtactttccataaagaaccaagaaatagtacaggcatcaggcaacagatcttggacattcttacgttcgagacattatggttttgtgttattgaacaacttggatcaactaataatggtgtcaaatctgttctcatcgacatcatccaacaaataccatatgttctttccagtctgaaatctgcacatgttatttgcaggttcgtattgatgccgctggcagtatttgtcttcctagcctataaatactggaaaacacagataacaatagatgcagttgagaagttcctgcgaatgcagaatatgctcgttccgatgagatatgcatacacaaacatcattgctatcaccggccatttcagagacaagctcggacaaggaggctacggtactgtatacaagggagtgctactgccaggtgaaattcatgttgctgtcaagatgctaggcaactccaactgtaacggagaagagttcatcagtgaggtcgccaccattggcaagatccaccatgtcaatgttgtgcgcctcattgggttttgctccgaggaaaatattagggcacttatctatgagttcatgccccgtggatctctcgataagtacatcttctcgtcggagaagacattctcatgggacaaactcaacgagatcgctctgggcattgctagaggtcttaactacttgcatcacgggtgtgatatgcagattgtacactttgacatcaagccacacaacatccttcttgatagcaactttgttccaaaagttgctgattttgggctagccaaactgttcccaagagatgacagtttcgtgccactgagcgctatgcggggaacgataggttatatagctccagagatggtatctcgaagctttggtatcatctctagcaaatccgatgtgtacagctttgggatgctactattggagatgacgggcgggcgaagaaacgcagatcctcatgcaggaagctccagtcaagcatactacccatccttggtgtacaggcagctgagccaaggtgatgcgaacaggatcagtgaaggtgttgatatgcacgagttagagaagaagctatgtatcattgggctttggtgcatccagatgaagccgcaagatcggccgacgatgagcgaagtcatagagatgcttgaagctggtgtcgatggcatccaaatgcctccaaggccatacttttgtgatgaagagggtgacagttcttactctacaatctctgaactcgatacaatagaagagtagtagtggtagtaaaatgcacttgtgtctatgtgctcttaatgtatcagactattaagattgcaaggttgccataagctaaggtactggttgtatacttttattgagagtgtgataatgtgatatcatataaaatacctccatgaagttttttacaaagaactcctcaagaatattgtgtttgcctacaagcaga

SEQ ID NO: 75416 - DNA, 1490 bp, Zea Mays
ctcgtgtctctccctcacggaaacctcgtctgcctgccaccaacccagttcctctcctcgtgaaaccaaagcgccgaccgaccgatcgcgtacgcacctgacgaaccagaccaactcgggaccaaccgatggctatggcgacggcgaagctgagctccccggcgaccagcttgctggctggcggccgcgcgcgccggtccgcgcccgcccgccgcgcgacggtgatccgcgccgcggcaggctcctactccgacgagctcgtctccaccgcgaaatcggttgcttcccctggacgtggtattctggcaattgatgagtcaaatgcaacatgtggaaagaggctatcgtcaattggtttggacaacacagaacctaaccgccaggcttacaggcagcttttgctgacaactgctggtcttggtgaatacatttctggtgctattctttttgaggagactctttatcaatcaactacagatggcaggaagtttgttgactgcttgaaggatcagaatatcatgcctggcatcaaggttgacaagggcttagttccattgcctggatccaacaatgaatcgtggtgccaaggtcttgatggtttggcttcaaggtgtgctgagtactataagcagggggcgcgcttcgcaaagtggaggactgttgttagcatcccttgtggtccatctgcattagcagcgaaggaagcagcatggggacttgctcgatatgctgctattgctcaggataatggcttagtgccaattgtggagccagagatccttcttgatggagaccatgggatcgaaagaactcttgaggtggcagagaaagtgtggtctgaggtgttcttctacttggcccagaacaatgttctgtttgagggtatcctgctgaagcccagcatggtcactcctggagccgaccacaaggagaaggcttctccagaagccatcgcaaagtacacgctaacaatgctcaggcggagagtgccacccgctgttcctggaatcatgttcctttctggtgggcagtccgaggtggaggcgactctgaacctgaatgcgatgaaccagtctccgaacccatggcacgtatcattctcctacgcccgggctctgcagaactcggtgctgaagacatggcaagggcgccccgagaacgtcgaggcggcgcagaaggccctgctggtgcgcgcaaaggccaactcgctggcacagctaggtcgctacactggtgagggtgagagcgacgaggcgaagaaagccaaattgttggtgccaacaacctctaccgttgtaaaaccctgagaaggaacatgtactctgagatcgtcaaatgatatttgcaatctggtaaattgtgttcctagccacgttgccacctgtgccaagcacaacagatgagaaactgccttgactttttgtatgcacaagtatcgacaactctcgctctgttaacccctacgctttctctagtttggtctttgggtg

SEQ ID NO: 75417 - DNA, 1635 bp, Zea Mays
ctcgtgtctctccctcacggaaacctcgtctgcctgccaccaacccagttcctctcctcgtgaaaccaaagcgccgaccgaccgatcgcgtacgcacctgacgaaccagaccaactcgggaccaaccgatggctatggcgacggcgaagctgagctccccggcgaccagcttgctggctggcggccgcgcgcgccggtccgcgcccgcccgccgcgcgacggtgatccgcgccgcggcaggctcctactccgacgagctcgtctccaccgcgaaatcggttgcttcccctggacgtggtattctggcaattgatgagtcaaatgcaacatgtggaaagaggctatcgtcaattggtttggacaacacagaacctaaccgccaggcttacaggcagcttttgctgacaactgctggtcttggtgaatacatttctggtgctattctttttgaggagactctttatcaatcaactacagatggcaggaagtttgttgactgcttgaaggatcagaatatcatgcctggcatcaaggttgacaagggcttagttccattgcctggatccaacaatgaatcgtggtgccaaggtcttgatggtttggcttcaaggtgtgctgagtactataagcagggggcgcgcttcgcaaagtggaggactgttgttagcatcccttgtggtccatctgcattagcagcgaaggaagcagcatggggacttgctcgatatgctgctattgctcaggataatggcttagtgccaattgtggagccagagatccttcttgatggagaccatgggatcgaaagaactcttgaggtggcagagaaagtgtggtctgaggtgttcttctacttggcccagaacaatgttctgtttgagggtatcctgctgaagcccagcatggtcactcctggagccgaccacaaggagaaggcttctccagaagccatcgcaaagtacacgctaacaatgctcaggcggagagtgccacccgctgttcctggaatcatgtccgaggtggaggcgactctgaacctgaatgcgatgaaccagtctccgaacccatggcacgtatcattctcctacgcccgggctctgcagaactcggtgctgaagacatggcaagggcgccccgagaacgtcgaggcggcgcagaaggccctgctggtgcgcgcaaaggccaactcgctggcacagctaggtcgctacactggtgagggtgagagcgacgaggcgaagaaaggcatgttccagaagggctacacctactaacgtgccagcgagaatatttccatgacgttatacttattgttttggtgtttacattatacttatcgttttggtgtcacggttttttttttttttggggggggggggggggggggggtcattcgagtgaataaaagccaaattgttggtgccaacaacctctaccgttgtaaaaccctgagaaggaacatgtactctgagatcgtcaaatgatatttgcaatctggtaaattgtgttcctagccacgttgccacctgtgccaagcacaacagatgagaaactgccttgactttttgtatgcacaagtatcgacaactctcgctctgttaacccctacgctttctctagtttggtctttgggtg

SEQ ID NO: 75418 - DNA, 1646 bp, Zea Mays
ccagcttcttcaaaagcaagaaagccagcagcagagaggagagagcggcgcgcggcgacggcggcgaagttccgatgcgcggcggcggcgaggcaaagccggggaagagccaaaagagctcggcgcagaggcacctcaacgccggcttcgtcgtcgtcgggcttctcatgctcctcgcctacctcgtcgctcagcacttcgtggtcggctcccgccatgttgtcattacggaggcacaagtgatcatggacaatgtaaaggcgccggatgaaacagaagcacaacgaatcatggataataccaaaattcccagtgaaacagagaatggcaaggtggtgtgtaacatggagggccgctcggacacctgcgaagtcgacggcgacgtccgcaccaacggcacggccctgtcagtgacactcgtgccggcgagccggtcggagcgccacgagtggatgatccggccgtactcgcgcaggttcgccagcgtcaggaaggtgacggtgacgcagctgcaggaccgggcagacgcggcgccgtgcgcggtgacccacgacgtgccggccgtcctgttcgcgatcggcgggtacgcgggcaactactggcacgactacgccgacatcctggtgccgctgttcgtcgcgtcgcggcggtacaacggcgaggtcaagttcctgatcagcaacatccggttccagccccggtggctggccaagtacaaggcgttcctgcaggggctgtccttgtacgacgcggtggacatggacggcgacgcgcaggtgcggtgcttcccgcacgtcacggtggggctccgcctggacaaggagttcagcatcgtccccgaactggtgccgggaggccgccgcctctccatggcggacttcacgcggttcctgcgagagacctacgcgctcccgcgcggctcggcggcgagccgggaccgggagcagccgcacaagaagcctcggctgctgctgatccaccggggccactaccgccggatcacgaacgagccggaggtggcgcgggcggcggaggcggcggggttcgaggcggtggtggcggagctgcgcggcgacgcgacggaagcggagcaggcgcgggtggtgaactcgttcgacgtggtgctgggcgtgcacggggccgggctgacgaacgcggtgttcctgccgccgggcggggtgctcatccaggtggtgccgtacgggaagatggagtacatcgcgagggcggagttcagcgagcccgccacggacatggggctcaagtaccttgactacagcgtgagcgcggaggagagctcgctgatggagacgctggggccggagcacccggcggtcaaggaccccgactccgtccaccgcagcggctgggaccaggttttcgagctgtacctcgccaagcagaacgtccgcatcaacgtcacccgcttcgcgccgacgctggcgcaggcgctcgaccacctacgccagcagtaggggcagggacggatacgccaacgccattgccattttcttttcgtatgcactgtactagatactacttgagtacaatacactctattatagttttgttgatgaccaaaattgaccaagagtcttttgtgacgatattcaaagtattaaaataatcataaaaacacacttaag

SEQ ID NO: 75419 - DNA, 2410 bp, Zea Mays
ctgccgtattcacttttcactcgttcgtccatccttccacgccccccacagaaccgtctccccagcggagcccggcgcctcacggtcgcaatttattgcttgcgcaccgcctcgccgctttggcgtggggcgtttgcctgtgtggcgcttcgcaggtgccgtggcttgccgcttccttcgccgtgctcactagtcaccagagagggaggaggctctggcgctctgcttctgctgccgcttcttcttcttctcctgctgctgctcttacggagataagcagggggggccgggccggggcagggggaggtgacagctgagctgactagctgagtgaagcatggggatggacgccggcggcggcaagctgccgtacagctacgccggccagcaggacggagggaagctggtgaagagcgtcagccgcgtggagccgcgcaggttcggcctgggcctcgtggcgggcttcctcctcgtcacctgcgcctacttctccaccgccaagttcgacgccatccagatcgccatgaccagccgacccgtctccagcaatgcgggcggcgtcggggtcggctcgctggaggtgggcggcgtcgtcgccgccgccgacacctacaacgcctccaggcagggattagatttgggcaagaaaggcccgggcgcgacgtccatggccgacgagggaagcgaggccgaggcgctcgagaaagacggcggcaaggcttcttcaccttcggggccaggcgttcctgccgctctccttcctcccgtgtcgtcagaggaagccgcgaacagcacgctggaatcaggtgtgaaagcaaccactcaacctccaactgccagctttactgccattagcggtcttgaggacgaggagctacaggtgcaggatgcagttgccagtggttccaagaggagcaaagactctgccgccgccgccgccgccacacgcagcgccaatgtcagctcaccctctgtggttcactctcaccatgccatcctccctgctcccgcgcagcggattccagaggttaagcaagcagactcggagacgacgccggcgcgggagcgggagtggaagccgctgtgcgacgtcacctcgaaccggcgcatcgactggtgcgagctggacggcgacgtccgcgtggtcggcgccaacgccagcgtgacgctggtggcgccgccgggcgcggacaaccggaccttccgcgcggagtcgtggcgcatcaagccgtacccgcgcaaggcggaccgcgggtacacgggcaactacttccacgcgttcacggacgtgatcctgccgctgttcctgacggcgcggcggtacgcgggcgaggtgcggctgctggtggccgacctccagccgtggtgggtgggcaagttcctgcccgtgttcaggagcatctccaagtacgagctggtggacctggaccgcgacccgcgcgtgcgctgcttccgccacgtccaggtggggctcaccagccacgccgacttcagcatcgacccgcgccgcgcgcccaacggctactccatgctggacttcacccggttcatgcgcgccgcctacgggctcccgcgcggcgacgtcgtcgcggcggcgccggcgaggcggccgaggctgctggtggtggcgcgcgcgcggacgcggcggttcgtcaacacggaggagatcgtgcgcggcgccgaggccgtcgggttcgaggcggtggtgtcggaagggacgcacgaggtggcgcccttcgcggagctggccaacggctgcgacgccatcatgggcgtgcacggcgccgggctgaccaacatggtgttcctgcccacgggcggggtggtgatccaggtggtgccgctgggagggctggagttcgtggccggatacttccgaggcccgtccgtggacatggggctgcgctacctcgagtaccggatcgagccggaggagagcacgctggtggaccagtacccgcgcgaccaccccatcttcacggaccccaacgggatcaagagcaagggctgggagtccctcaaggacgcctacctcgacaagcaggacgtgaggctggacatggagaggttccggccgacgctccaggaggccatcgcgcacctcaggaaggccaaggccaaggccaatggcgacggaaacaactaggcatcgccgtgcgtatgtagcgtgttcattcgtcctcttattaatctactcttctttttcttctttccttttcgggttatgtcggtgtatgtagcgtgcagaaatcgagcaaatgtatgatatgtggcagggaaagaagctagagcgaataatatattctctctcttgtcatccagttttcgattgaatggcgtatgccaagtgatcaggtgaaggtcgacccggaaatttggttttgccacaataatgggaagattggcgagg

SEQ ID NO: 75420 - DNA, 2641 bp, Zea Mays
ctgccgtattcacttttcactcgttcgtccatccttccacgccccccacagaaccgtctccccagcggagcccggcgcctcacggtcgcaatttattgcttgcgcaccgcctcgccgctttggcgtggggcgtttgcctgtgtggcgcttcgcaggtgccgtggcttgccgcttccttcgccgtgctcactagtcaccagagagggaggaggctctggcgctctgcttctgctgccgcttcttcttcttctcctgctgctgctcttacggagataagcagggggggccgggccggggcagggggaggtgacagctgagctgactagctgagtgaagcatggggatggacgccggcggcggcaagctgccgtacagctacgccggccagcaggacggagggaagctggtgaagagcgtcagccgcgtggagccgcgcaggttcggcctgggcctcgtggcgggcttcctcctcgtcacctgcgcctacttctccaccgccaagttcgacgccatccagatcgccatgaccagccgacccgtctccagcaatgcgggcggcgtcggggtcggctcgctggaggtgggcggcgtcgtcgccgccgccgacacctacaacgcctccaggcagggattagatttgggcaagaaaggcccgggcgcgacgtccatggccgacgagggaagcgaggccgaggcgctcgagaaagacggcggcaaggcttcttcaccttcggggccaggtacacaccacgggcaagggcgcaaagcatcgcgtgttgttgtttcgagatgcgtggccgtggccgtggccgtgctttcccttccgttggggtcaagctgaccggcctcgtgtgcaccgtactcccaccgccgttcctgcacgcaaatcccaaaaatcagataaaaaagactggtttttctcctccccgttctcctttcccccactaatcgcgctttaggttcttggtcaggcgttcctgccgctctccttcctcccgtgtcgtcagaggaagccgcgaacagcacgctggaatcaggtgtgaaagcaaccactcaacctccaactgccagctttactgccattagcggtcttgaggacgaggagctacaggtgcaggatgcagttgccagtggttccaagaggagcaaagactctgccgccgccgccgccgccacacgcagcgccaatgtcagctcaccctctgtggttcactctcaccatgccatcctccctgctcccgcgcagcggattccagaggttaagcaagcagactcggagacgacgccggcgcgggagcgggagtggaagccgctgtgcgacgtcacctcgaaccggcgcatcgactggtgcgagctggacggcgacgtccgcgtggtcggcgccaacgccagcgtgacgctggtggcgccgccgggcgcggacaaccggaccttccgcgcggagtcgtggcgcatcaagccgtacccgcgcaaggcggaccgcgggtacacgggcaactacttccacgcgttcacggacgtgatcctgccgctgttcctgacggcgcggcggtacgcgggcgaggtgcggctgctggtggccgacctccagccgtggtgggtgggcaagttcctgcccgtgttcaggagcatctccaagtacgagctggtggacctggaccgcgacccgcgcgtgcgctgcttccgccacgtccaggtggggctcaccagccacgccgacttcagcatcgacccgcgccgcgcgcccaacggctactccatgctggacttcacccggttcatgcgcgccgcctacgggctcccgcgcggcgacgtcgtcgcggcggcgccggcgaggcggccgaggctgctggtggtggcgcgcgcgcggacgcggcggttcgtcaacacggaggagatcgtgcgcggcgccgaggccgtcgggttcgaggcggtggtgtcggaagggacgcacgaggtggcgcccttcgcggagctggccaacggctgcgacgccatcatgggcgtgcacggcgccgggctgaccaacatggtgttcctgcccacgggcggggtggtgatccaggtggtgccgctgggagggctggagttcgtggccggatacttccgaggcccgtccgtggacatggggctgcgctacctcgagtaccggatcgagccggaggagagcacgctggtggaccagtacccgcgcgaccaccccatcttcacggaccccaacgggatcaagagcaagggctgggagtccctcaaggacgcctacctcgacaagcaggacgtgaggctggacatggagaggttccggccgacgctccaggaggccatcgcgcacctcaggaaggccaaggccaaggccaatggcgacggaaacaactaggcatcgccgtgcgtatgtagcgtgttcattcgtcctcttattaatctactcttctttttcttctttccttttcgggttatgtcggtgtatgtagcgtgcagaaatcgagcaaatgtatgatatgtggcagggaaagaagctagagcgaataatatattctctctcttgtcatccagttttcgattgaatggcgtatgccaagtgatcaggtgaaggtcgacccggaaatttggttttgccacaataatgggaagattggcgagg

SEQ ID NO: 75421 - DNA, 2383 bp, Zea Mays
ctgccgtattcacttttcactcgttcgtccatccttccacgccccccacagaaccgtctccccagcggagcccggcgcctcacggtcgcaatttattgcttgcgcaccgcctcgccgctttggcgtggggcgtttgcctgtgtggcgcttcgcaggtgccgtggcttgccgcttccttcgccgtgctcactagtcaccagagagggaggaggctctggcgctctgcttctgctgccgcttcttcttcttctcctgctgctgctcttacggagataagcagggggggccgggccggggcagggggaggtgacagctgagctgactagctgagtgaagcatggggatggacgccggcggcggcaagctgccgtacagctacgccggccagcaggacggagggaagctggtgaagagcgtcagccgcgtggagccgcgcaggttcggcctgggcctcgtggcgggcttcctcctcgtcacctgcgcctacttctccaccgccaagttcgacgccatccagatcgccatgagtaagcaaaccagccgacccgtctccagcaatgcgggcggcgtcggggtcggctcgctggaggtgggcggcgtcgtcgccgccgccgacacctacaacgcctccaggcagggattagatttgggcaagaaaggcccgggcgcgacgtccatggccgacgagggaagcgaggccgaggcgctcgagaaagacggcggcaaggcttcttcaccttcggggccaggttcttggtcaggcgttcctgccgctctccttcctcccgtgtcgtcagaggaagccgcgaacagcacgctggaatcaggcggtcttgaggacgaggagctacaggtgcaggatgcagttgccagtggttccaagaggagcaaagactctgccgccgccgccgccgccacacgcagcgccaatgtcagctcaccctctgtggttcactctcaccatgccatcctccctgctcccgcgcagcggattccagaggttaagcaagcagactcggagacgacgccggcgcgggagcgggagtggaagccgctgtgcgacgtcacctcgaaccggcgcatcgactggtgcgagctggacggcgacgtccgcgtggtcggcgccaacgccagcgtgacgctggtggcgccgccgggcgcggacaaccggaccttccgcgcggagtcgtggcgcatcaagccgtacccgcgcaaggcggaccgcgggtacacgggcaactacttccacgcgttcacggacgtgatcctgccgctgttcctgacggcgcggcggtacgcgggcgaggtgcggctgctggtggccgacctccagccgtggtgggtgggcaagttcctgcccgtgttcaggagcatctccaagtacgagctggtggacctggaccgcgacccgcgcgtgcgctgcttccgccacgtccaggtggggctcaccagccacgccgacttcagcatcgacccgcgccgcgcgcccaacggctactccatgctggacttcacccggttcatgcgcgccgcctacgggctcccgcgcggcgacgtcgtcgcggcggcgccggcgaggcggccgaggctgctggtggtggcgcgcgcgcggacgcggcggttcgtcaacacggaggagatcgtgcgcggcgccgaggccgtcgggttcgaggcggtggtgtcggaagggacgcacgaggtggcgcccttcgcggagctggccaacggctgcgacgccatcatgggcgtgcacggcgccgggctgaccaacatggtgttcctgcccacgggcggggtggtgatccaggtggtgccgctgggagggctggagttcgtggccggatacttccgaggcccgtccgtggacatggggctgcgctacctcgagtaccggatcgagccggaggagagcacgctggtggaccagtacccgcgcgaccaccccatcttcacggaccccaacgggatcaagagcaagggctgggagtccctcaaggacgcctacctcgacaagcaggacgtgaggctggacatggagaggttccggccgacgctccaggaggccatcgcgcacctcaggaaggccaaggccaaggccaatggcgacggaaacaactaggcatcgccgtgcgtatgtagcgtgttcattcgtcctcttattaatctactcttctttttcttctttccttttcgggttatgtcggtgtatgtagcgtgcagaaatcgagcaaatgtatgatatgtggcagggaaagaagctagagcgaataatatattctctctcttgtcatccagttttcgattgaatggcgtatgccaagtgatcaggtgaaggtcgacccggaaatttggttttgccacaataatgggaagattggcgagg

SEQ ID NO: 75422 - DNA, 2083 bp, Zea Mays
ctgccgtattcacttttcactcgttcgtccatccttccacgccccccacagaaccgtctccccagcggagcccggcgcctcacggtcgcaatttattgcttgcgcaccgcctcgccgctttggcgtggggcgtttgcctgtgtggcgcttcgcaggtgccgtggcttgccgcttccttcgccgtgctcactagtcaccagagagggaggaggctctggcgctctgcttctgctgccgcttcttcttcttctcctgctgctgctcttacggagataagcagggggggccgggccggggcagggggaggtgacagctgagctgactagctgagtgaagcatggggatggacgccggcggcggcaagctgccgtacagctacgccggccagcaggacggagggaagctggtgaagagcgtcagccgcgtggagccgcgcaggttcggcctgggcctcgtggcgggcttcctcctcgtcacctgcgcctacttctccaccgccaagttcgacgccatccagatcgccatgagcggtcttgaggacgaggagctacaggtgcaggatgcagttgccagtggttccaagaggagcaaagactctgccgccgccgccgccgccacacgcagcgccaatgtcagctcaccctctgtggttcactctcaccatgccatcctccctgctcccgcgcagcggattccagaggttaagcaagcagactcggagacgacgccggcgcgggagcgggagtggaagccgctgtgcgacgtcacctcgaaccggcgcatcgactggtgcgagctggacggcgacgtccgcgtggtcggcgccaacgccagcgtgacgctggtggcgccgccgggcgcggacaaccggaccttccgcgcggagtcgtggcgcatcaagccgtacccgcgcaaggcggaccgcgggtacacgggcaactacttccacgcgttcacggacgtgatcctgccgctgttcctgacggcgcggcggtacgcgggcgaggtgcggctgctggtggccgacctccagccgtggtgggtgggcaagttcctgcccgtgttcaggagcatctccaagtacgagctggtggacctggaccgcgacccgcgcgtgcgctgcttccgccacgtccaggtggggctcaccagccacgccgacttcagcatcgacccgcgccgcgcgcccaacggctactccatgctggacttcacccggttcatgcgcgccgcctacgggctcccgcgcggcgacgtcgtcgcggcggcgccggcgaggcggccgaggctgctggtggtggcgcgcgcgcggacgcggcggttcgtcaacacggaggagatcgtgcgcggcgccgaggccgtcgggttcgaggcggtggtgtcggaagggacgcacgaggtggcgcccttcgcggagctggccaacggctgcgacgccatcatgggcgtgcacggcgccgggctgaccaacatggtgttcctgcccacgggcggggtggtgatccaggtggtgccgctgggagggctggagttcgtggccggatacttccgaggcccgtccgtggacatggggctgcgctacctcgagtaccggatcgagccggaggagagcacgctggtggaccagtacccgcgcgaccaccccatcttcacggaccccaacgggatcaagagcaagggctgggagtccctcaaggacgcctacctcgacaagcaggacgtgaggctggacatggagaggttccggccgacgctccaggaggccatcgcgcacctcaggaaggccaaggccaaggccaatggcgacggaaacaactaggcatcgccgtgcgtatgtagcgtgttcattcgtcctcttattaatctactcttctttttcttctttccttttcgggttatgtcggtgtatgtagcgtgcagaaatcgagcaaatgtatgatatgtggcagggaaagaagctagagcgaataatatattctctctcttgtcatccagttttcgattgaatggcgtatgccaagtgatcaggtgaaggtcgacccggaaatttggttttgccacaataatgggaagattggcgagg

SEQ ID NO: 75423 - DNA, 2479 bp, Zea Mays
gacggaggtttacggggaggaataaatggaggtggcgagcagagacggacgccacccctgccgtattcacttttcactcgttcgtccatccttccacgccccccacagaaccgtctccccagcggagcccggcgcctcacggtcgcaatttattgcttgcgcaccgcctcgccgctttggcgtggggcgtttgcctgtgtggcgcttcgcaggtgccgtggcttgccgcttccttcgccgtgctcactagtcaccagagagggaggaggctctggcgctctgcttctgctgccgcttcttcttcttctcctgctgctgctcttacggagataagcagggggggccgggccggggcagggggaggtgacagctgagctgactagctgagtgaagcatggggatggacgccggcggcggcaagctgccgtacagctacgccggccagcaggacggagggaagctggtgaagagcgtcagccgcgtggagccgcgcaggttcggcctgggcctcgtggcgggcttcctcctcgtcacctgcgcctacttctccaccgccaagttcgacgccatccagatcgccatgaccagccgacccgtctccagcaatgcgggcggcgtcggggtcggctcgctggaggtgggcggcgtcgtcgccgccgccgacacctacaacgcctccaggcagggattagatttgggcaagaaaggcccgggcgcgacgtccatggccgacgagggaagcgaggccgaggcgctcgagaaagacggcggcaaggcttcttcaccttcggggccaggttcttggtcaggcgttcctgccgctctccttcctcccgtgtcgtcagaggaagccgcgaacagcacgctggaatcaggtgtgaaagcaaccactcaacctccaactgccagctttactgccattagcggtcttgaggacgaggagctacaggtgcaggatgcagttgccagtggttccaagaggagcaaagactctgccgccgccgccgccgccacacgcagcgccaatgtcagctcaccctctgtggttcactctcaccatgccatcctccctgctcccgcgcagcggattccagaggttaagcaagcagactcggagacgacgccggcgcgggagcgggagtggaagccgctgtgcgacgtcacctcgaaccggcgcatcgactggtgcgagctggacggcgacgtccgcgtggtcggcgccaacgccagcgtgacgctggtggcgccgccgggcgcggacaaccggaccttccgcgcggagtcgtggcgcatcaagccgtacccgcgcaaggcggaccgcgggtacacgggcaactacttccacgcgttcacggacgtgatcctgccgctgttcctgacggcgcggcggtacgcgggcgaggtgcggctgctggtggccgacctccagccgtggtgggtgggcaagttcctgcccgtgttcaggagcatctccaagtacgagctggtggacctggaccgcgacccgcgcgtgcgctgcttccgccacgtccaggtggggctcaccagccacgccgacttcagcatcgacccgcgccgcgcgcccaacggctactccatgctggacttcacccggttcatgcgcgccgcctacgggctcccgcgcggcgacgtcgtcgcggcggcgccggcgaggcggccgaggctgctggtggtggcgcgcgcgcggacgcggcggttcgtcaacacggaggagatcgtgcgcggcgccgaggccgtcgggttcgaggcggtggtgtcggaagggacgcacgaggtggcgcccttcgcggagctggccaacggctgcgacgccatcatgggcgtgcacggcgccgggctgaccaacatggtgttcctgcccacgggcggggtggtgatccaggtggtgccgctgggagggctggagttcgtggccggatacttccgaggcccgtccgtggacatggggctgcgctacctcgagtaccggatcgagccggaggagagcacgctggtggaccagtacccgcgcgaccaccccatcttcacggaccccaacgggatcaagagcaagggctgggagtccctcaaggacgcctacctcgacaagcaggacgtgaggctggacatggagaggttccggccgacgctccaggaggccatcgcgcacctcaggaaggccaaggccaaggccaatggcgacggaaacaactaggcatcgccgtgcgtatgtagcgtgttcattcgtcctcttattaatctactcttctttttcttctttccttttcgggttatgtcggtgtatgtagcgtgcagaaatcgagcaaatgtatgatatgtggcagggaaagaagctagagcgaataatatattctctctcttgtcatccagttttcgattgaatggcgtatgccaagtgatcaggtgaaggtcgacccggaaatttggttttgccacaataatgggaagattggcgagg

SEQ ID NO: 75424 - DNA, 2590 bp, Zea Mays
ctctctctcggaaatctccagctgcctttgcgttctttattggtggggaaggaaaattgtgttcccgaaaaggcgaaaacacaacgagtaaaatacagtactactactgatggcatggcagcctactgtactattaacagggtgggccatggcatggcagacggaggtttacggggaggaataaatggaggtggcgagcagagacggacgccacccctgccgtattcacttttcactcgttcgtccatccttccacgccccccacagaaccgtctccccagcggagcccggcgcctcacggtcgcaatttattgcttgcgcaccgcctcgccgctttggcgtggggcgtttgcctgtgtggcgcttcgcaggtgccgtggcttgccgcttccttcgccgtgctcactagtcaccagagagggaggaggctctggcgctctgcttctgctgccgcttcttcttcttctcctgctgctgctcttacggagataagcagggggggccgggccggggcagggggaggtgacagctgagctgactagctgagtgaagcatggggatggacgccggcggcggcaagctgccgtacagctacgccggccagcaggacggagggaagctggtgaagagcgtcagccgcgtggagccgcgcaggttcggcctgggcctcgtggcgggcttcctcctcgtcacctgcgcctacttctccaccgccaagttcgacgccatccagatcgccatgaccagccgacccgtctccagcaatgcgggcggcgtcggggtcggctcgctggaggtgggcggcgtcgtcgccgccgccgacacctacaacgcctccaggcagggattagatttgggcaagaaaggcccgggcgcgacgtccatggccgacgagggaagcgaggccgaggcgctcgagaaagacggcggcaaggcttcttcaccttcggggccaggttcttggtcaggcgttcctgccgctctccttcctcccgtgtcgtcagaggaagccgcgaacagcacgctggaatcaggcggtcttgaggacgaggagctacaggtgcaggatgcagttgccagtggttccaagaggagcaaagactctgccgccgccgccgccgccacacgcagcgccaatgtcagctcaccctctgtggttcactctcaccatgccatcctccctgctcccgcgcagcggattccagaggttaagcaagcagactcggagacgacgccggcgcgggagcgggagtggaagccgctgtgcgacgtcacctcgaaccggcgcatcgactggtgcgagctggacggcgacgtccgcgtggtcggcgccaacgccagcgtgacgctggtggcgccgccgggcgcggacaaccggaccttccgcgcggagtcgtggcgcatcaagccgtacccgcgcaaggcggaccgcgggtacacgggcaactacttccacgcgttcacggacgtgatcctgccgctgttcctgacggcgcggcggtacgcgggcgaggtgcggctgctggtggccgacctccagccgtggtgggtgggcaagttcctgcccgtgttcaggagcatctccaagtacgagctggtggacctggaccgcgacccgcgcgtgcgctgcttccgccacgtccaggtggggctcaccagccacgccgacttcagcatcgacccgcgccgcgcgcccaacggctactccatgctggacttcacccggttcatgcgcgccgcctacgggctcccgcgcggcgacgtcgtcgcggcggcgccggcgaggcggccgaggctgctggtggtggcgcgcgcgcggacgcggcggttcgtcaacacggaggagatcgtgcgcggcgccgaggccgtcgggttcgaggcggtggtgtcggaagggacgcacgaggtggcgcccttcgcggagctggccaacggctgcgacgccatcatgggcgtgcacggcgccgggctgaccaacatggtgttcctgcccacgggcggggtggtgatccaggtggtgccgctgggagggctggagttcgtggccggatacttccgaggcccgtccgtggacatggggctgcgctacctcgagtaccggatcgagccggaggagagcacgctggtggaccagtacccgcgcgaccaccccatcttcacggaccccaacgggatcaagagcaagggctgggagtccctcaaggacgcctacctcgacaagcaggacgtgaggctggacatggagaggttccggccgacgctccaggaggccatcgcgcacctcaggaaggccaaggccaaggccaatggcgacggaaacaactaggcatcgccgtgcgtatgtagcgtgttcattcgtcctcttattaatctactcttctttttcttctttccttttcgggttatgtcggtgtatgtagcgtgcagaaatcgagcaaatgtatgatatgtggcagggaaagaagctagagcgaataatatattctctctcttgtcatccagttttcgattgaatggcgtatgccaagtgatcaggtgaaggtcgacccggaaatttggttttgccacaataatgggaagattggcgagg

SEQ ID NO: 75425 - DNA, 2809 bp, Zea Mays
ctctctctcggaaatctccagctgcctttgcgttctttattggtggggaaggaaaattgtgttcccgaaaaggcgaaaacacaacgagtaaaatacagtactactactgatggcatggcagcctactgtactattaacagggtgggccatggcatggcagacggaggtttacggggaggaataaatggaggtggcgagcagagacggacgccacccctgccgtattcacttttcactcgttcgtccatccttccacgccccccacagaaccgtctccccagcggagcccggcgcctcacggtcgcaatttattgcttgcgcaccgcctcgccgctttggcgtggggcgtttgcctgtgtggcgcttcgcaggtgccgtggcttgccgcttccttcgccgtgctcactagtcaccagagagggaggaggctctggcgctctgcttctgctgccgcttcttcttcttctcctgctgctgctcttacggagataagcagggggggccgggccggggcagggggaggtgacagctgagctgactagctgagtgaagcatggggatggacgccggcggcggcaagctgccgtacagctacgccggccagcaggacggagggaagctggtgaagagcgtcagccgcgtggagccgcgcaggttcggcctgggcctcgtggcgggcttcctcctcgtcacctgcgcctacttctccaccgccaagttcgacgccatccagatcgccatgaccagccgacccgtctccagcaatgcgggcggcgtcggggtcggctcgctggaggtgggcggcgtcgtcgccgccgccgacacctacaacgcctccaggcagggattagatttgggcaagaaaggcccgggcgcgacgtccatggccgacgagggaagcgaggccgaggcgctcgagaaagacggcggcaaggcttcttcaccttcggggccaggtacacaccacgggcaagggcgcaaagcatcgcgtgttgttgtttcgagatgcgtggccgtggccgtggccgtgctttcccttccgttggggtcaagctgaccggcctcgtgtgcaccgtactcccaccgccgttcctgcacgcaaatcccaaaaatcagataaaaaagactggtttttctcctccccgttctcctttcccccactaatcgcgctttaggttcttggtcaggcgttcctgccgctctccttcctcccgtgtcgtcagaggaagccgcgaacagcacgctggaatcaggcggtcttgaggacgaggagctacaggtgcaggatgcagttgccagtggttccaagaggagcaaagactctgccgccgccgccgccgccacacgcagcgccaatgtcagctcaccctctgtggttcactctcaccatgccatcctccctgctcccgcgcagcggattccagaggttaagcaagcagactcggagacgacgccggcgcgggagcgggagtggaagccgctgtgcgacgtcacctcgaaccggcgcatcgactggtgcgagctggacggcgacgtccgcgtggtcggcgccaacgccagcgtgacgctggtggcgccgccgggcgcggacaaccggaccttccgcgcggagtcgtggcgcatcaagccgtacccgcgcaaggcggaccgcgggtacacgggcaactacttccacgcgttcacggacgtgatcctgccgctgttcctgacggcgcggcggtacgcgggcgaggtgcggctgctggtggccgacctccagccgtggtgggtgggcaagttcctgcccgtgttcaggagcatctccaagtacgagctggtggacctggaccgcgacccgcgcgtgcgctgcttccgccacgtccaggtggggctcaccagccacgccgacttcagcatcgacccgcgccgcgcgcccaacggctactccatgctggacttcacccggttcatgcgcgccgcctacgggctcccgcgcggcgacgtcgtcgcggcggcgccggcgaggcggccgaggctgctggtggtggcgcgcgcgcggacgcggcggttcgtcaacacggaggagatcgtgcgcggcgccgaggccgtcgggttcgaggcggtggtgtcggaagggacgcacgaggtggcgcccttcgcggagctggccaacggctgcgacgccatcatgggcgtgcacggcgccgggctgaccaacatggtgttcctgcccacgggcggggtggtgatccaggtggtgccgctgggagggctggagttcgtggccggatacttccgaggcccgtccgtggacatggggctgcgctacctcgagtaccggatcgagccggaggagagcacgctggtggaccagtacccgcgcgaccaccccatcttcacggaccccaacgggatcaagagcaagggctgggagtccctcaaggacgcctacctcgacaagcaggacgtgaggctggacatggagaggttccggccgacgctccaggaggccatcgcgcacctcaggaaggccaaggccaaggccaatggcgacggaaacaactaggcatcgccgtgcgtatgtagcgtgttcattcgtcctcttattaatctactcttctttttcttctttccttttcgggttatgtcggtgtatgtagcgtgcagaaatcgagcaaatgtatgatatgtggcagggaaagaagctagagcgaataatatattctctctcttgtcatccagttttcgattgaatggcgtatgccaagtgatcaggtgaaggtcgacccggaaatttggttttgccacaataatgggaagattggcgagg

SEQ ID NO: 75426 - DNA, 1495 bp, Zea Mays
cagaagatgacttgcccttgacccttcctgaattggatgatttcactccaactggtactggggagccacctttgaccaaagcaacaaattgggttagaaccattgacccttcatctgggaagcctgcgagaagagaaacaagcaccatgccacaatgggctggatcttgctggtattggggtccagttgacatctacgttggtggtgctgaacattctgtcttgcacttgctttatgcaagattttggcacaaggttctttatgacatgggtgtagtctccactaaagagcccttcaagtgcctgataaatcaaggattgatactaggagaaagacaatgaaggcagatgggtttctgcagactcagactcaagtttgattgattgctaccaagaaaaagtagctccagacaaggttacaaaagttggagatcattatgttctgaaggataatccaaacattcgtctgaatgctcgtgcctacaagatgagtaaaagtcgagggaatgtcatcaaccctgatgatgttgtttcagaatatggcgctgattctcttcgcttgtacgaaatgttcatggggccattgagagattcaaagacatggagcactgggggaatcgaaggtgtgcaccgcttccttggacgaacgtggagactcatagttggtccacaattatctgatggatcatataatgatggaaccatgactaccgaagatgaaccaaccttggatcagcttcgagttcttcacagatgtattgcaagggtcacggaggaaattcaggaaacaagatttaacactgcaatatctgcaatgatggagtttgtgaatgctgcatacaagtgggaaacccagccaaaatctgttattgaatcctttgttctgctgctttcacccttcgcgccacacttggctgaggagctttggtttcgcctcggacatccacaatcattggcctatgaacagtttccagaggcaaaaagtgagtacctggaggaatcaaagcttgtactccctgtccaaatcaatggaaagaccaggggtacaatccttgttgacaaagcgtgctctgaggatgatgtttttcaaattgcagcctcggatgagaaactctccaaatatcttgatgggaaaggcatcaggaagaaaatttatgtgcctggaaggatcttgaatgttatcttagatcaacaaaagtcaaggacctgataattgctcttgtttgtccatttatctcgttatgagtcaggaatagagatcaataagacatgacagatctgtaaatttgttttttagcacttgcagtttactgtcaatttgccaacaacaacaacgtcgaacactcgttaggttaatgttaaaatccaacagaaaccgtcagtcaaggttaagcatatggatagttatttttatgcactctttggggtatttgaaactgctctaggttccagcttcagtgtggagctgtagtttacaatacagatttaaatagttt

SEQ ID NO: 75427 - DNA, 3057 bp, Zea Mays
gccgtctgccgctccccgccgctcccagctcgctgttgtgccagcgccgccgctgcggccgacacggggaaggcgcagacagcggcgaggagggcttacccattcgatgagatcgagccgaggtggcagcggcactgggaggagcaccgcacgttccgcaccctggacatcggcgaggggctcgacacctccaagcccaagtgctacatcctcgacatgttcccctaccccagtggggctgggttgcatgttgggcacccccttggatacacggcaactgacattctgtcaagattcaagcgcatgaaaggcttcaacgttttgcatccaatgggatgggatgcatttggtcttcctgctgagcagtatgctattcagacgggaacccaccctaagattaccactgaaagaaacattgagcgctttcgcacacagcttaaatcgttgggtttttcatatgattgggatcgtgaaatctccacgacagagccgggttattataaatggacacaatggattttccttcaactgttaaagagaggacttgcttatcaggctggcattgatatcttacaatcaggctgaggtacctgtcaattggtgccctgctcttggaactgtcctggcgaatgaagaagtagtagatggtgtgagcgaacgtggtggctatcctgttatacgaaagccaatgcgccagtggatgctaaggataacatcttatgctgatcgtcttcttgaagatttgaatgatcttgattggcccgagagtatcaaggaaatgcaaagaaactggatagggagatcaaaaggtgctgagcttattttttctgcagttgaccaggaaggacatgacctgggtgccactttattggtttacacaacgaggcctgacacgatttttggtgcaacatatcttgttgtggcacctgagcatgttttactgtcatctctaacatctgaggaacaacgagcacatgtagaggaatacagagaactttcagcaagaaagagtgaactagaaaggactgaacttcagaaggaaaaaactggggttttcagtggttcttatgctaagaacccagcaaccggggaaatcattccaatatgggtggcagattatgttctaggaagcagctatggcactggggctatcatggcagtgcctgcacatgattctcgcgaccatgaatttgctgtgaaatatgaacttccaatcattaaggttgtaagtccaccgaatggtaattgtgatccagtggaggcatatgaagatgatggcatcatgattaattcatctagttcttcatctggactgaatattaacggaatgctttcccaagatgctgctaagaaagttactgagtggatagagaataatggttttggaaagaaaaaggtaaactacaagcttcgagattggctttttgccagacagcgctattggggtgaacctttccctgtgagctaccttgatgataccaatgaaatggttcctcttacagaagatgacttgcccttgacccttcctgaattggatgatttcactccaactggtactggggagccacctttgaccaaagcaacaaattgggttagaaccattgacccttcatctgggaagcctgcgagaagagaaacaagcaccatgccacaatgggctggatcttgctggtactatttgaggttcatggatcccaaaaactgcagtatattggttgataaggctaaagaaaggtattggggtccagttgacatctacgttggtggtgctgaacattctgtcttgcacttgctttatgcaagattttggcacaaggttctttatgacatgggtgtagtctccactaaagagcccttcaagtgcctgataaatcaaggattgatactaggagaaagacaatgaaggcagatgggtttctgcagactcagactcaagtttgattgattgctaccaagaaaaagtagctccagacaaggttacaaaagttggagatcattatgttctgaaggataatccaaacattcgtctgaatgctcgtgcctacaagatgagtaaaagtcgagggaatgtcatcaaccctgatgatgttgtttcagaatatggcgctgattctcttcgcttgtacgaaatgttcatggggccattgagagattcaaagacatggagcactgggggaatcgaaggtgtgcaccgcttccttggacgaacgtggagactcatagttggtccacaattatctgatggatcatataatgatggaaccatgactaccgaagatgaaccaaccttggatcagcttcgagttcttcacagatgtattgcaagggtcacggaggaaattcaggaaacaagatttaacactgcaatatctgcaatgatggagtttgtgaatgctgcatacaagtgggaaacccagccaaaatctgttattgaatcctttgttctgctgctttcacccttcgcgccacacttggctgaggagctttggtttcgcctcggacatccacaatcattggcctatgaacagtttccagaggcaaaaagtgagtacctggaggaatcaaagcttgtactccctgtccaaatcaatggaaagaccaggggtacaatccttgttgacaaagcgtgctctgaggatgatgtttttcaaattgcagcctcggatgagaaactctccaaatatcttgatgggaaaggcatcaggaagaaaatttatgtgcctggaaggatcttgaatgttatcttagatcaacaaaagtcaaggacctgataattgctcttgtttgtccatttatctcgttatgagtcaggaatagagatcaataagacatgacagatctgtaaatttgttttttagcacttgcagtttactgtcaatttgccaacaacaacaacgtcgaacactcgttaggttaatgttaaaatccaacagaaaccgtcagtcaaggttaagcatatggatagttatttttatgcactctttggggtatttgaaactgctctaggttccagcttcagtgtggagctgtagtttacaatacagatttaaatagttt

SEQ ID NO: 75428 - DNA, 3052 bp, Zea Mays
ctcagctcccgctcccggacgacgacgatggccttggcgctgcaatggcccctccaattcccactccagctccaggcgcggcctcccgccgttaccgcgggccatcaccgtcgccgccaccgagtcctcgccgtctgccgctccccgccgctcccagctcgctgttgtgccagcgccgccgctgcggccgacacggggaaggcgcagacagcggcgaggagggcttacccattcgatgagatcgagccgaggtggcagcggcactgggaggagcaccgcacgttccgcaccctggacatcggcgaggggctcgacacctccaagcccaagtgctacatcctcgacatgttcccctaccccagtggggctgggttgcatgttgggcacccccttggatacacggcaactgacattctgtcaagattcaagcgcatgaaaggcttcaacgttttgcatccaatgggatgggatgcatttggtcttcctgctgagcagtatgctattcagacgggaacccaccctaagattaccactgaaagaaacattgagcgctttcgcacacagcttaaatcgttgggtttttcatatgattgggatcgtgaaatctccacgacagagccgggttattataaatggacacaatggattttccttcaactgttaaagagaggacttgcttatcaggctgaggtacctgtcaattggtgccctgctcttggaactgtcctggcgaatgaagaagtagtagatggtgtgagcgaacgtggtggctatcctgttatacgaaagccaatgcgccagtggatgctaaggataacatcttatgctgatcgtcttcttgaagatttgaatgatcttgattggcccgagagtatcaaggaaatgcaaagaaactggatagggagatcaaaaggtgctgagcttattttttctgcagttgaccaggaaggacatgacctgggtgccactttattggtttacacaacgaggcctgacacgatttttggtgcaacatatcttgttgtggcacctgagcatgttttactgtcatctctaacatctgaggaacaacgagcacatgtagaggaatacagagaactttcagcaagaaagagtgaactagaaaggactgaacttcagaaggaaaaaactggggttttcagtggttcttatgctaagaacccagcaaccggggaaatcattccaatatgggtggcagattatgttctaggaagctatggcactggggctatcatggcagtgcctgcacatgattctcgcgaccatgaatttgctgtgaaatatgaacttccaatcattaaggttgtaagtccaccgaatggtaattgtgatccagtggaggcatatgaagatgatggcatcatgattaattcatctagttcttcatctggactgaatattaacggaatgctttcccaagatgctgctaagaaagttactgagtggatagagaataatggttttggaaagaaaaagaagatgacttgcccttgacccttcctgaattggatgatttcactccaactggtactggggagccacctttgaccaaagcaacaaattgggttagaaccattgacccttcatctgggaagcctgcgagaagagaaacaagcaccatgccacaatgggctggatcttgctggtactatttgaggttcatggatcccaaaaactgcagtatattggttgataaggctaaagaaaggtattggggtccagttgacatctacgttggtggtgctgaacattctgtcttgcacttgctttatgcaagattttggcacaaggttctttatgacatgggtgtagtctccactaaagagcccttcaagtgcctgataaatcaaggattgatactaggagaaagacaatgaaggcagatgggtttctgcagactcagactcaagtttgattgattgctaccaagaaaaagtagctccagacaaggttacaaaagttggagatcattatgttctgaaggataatccaaacattcgtctgaatgctcgtgcctacaagatgagtaaaagtcgagggaatgtcatcaaccctgatgatgttgtttcagaatatggcgctgattctcttcgcttgtacgaaatgttcatggggccattgagagattcaaagacatggagcactgggggaatcgaaggtgtgcaccgcttccttggacgaacgtggagactcatagttggtccacaattatctgatggatcatataatgatggaaccatgactaccgaagatgaaccaaccttggatcagcttcgagttcttcacagatgtattgcaagggtcacggaggaaattcaggaaacaagatttaacactgcaatatctgcaatgatggagtttgtgaatgctgcatacaagtgggaaacccagccaaaatctgttattgaatcctttgttctgctgctttcacccttcgcgccacacttggctgaggagctttggtttcgcctcggacatccacaatcattggcctatgaacagtttccagaggcaaaaagtgagtacctggaggaatcaaagcttgtactccctgtccaaatcaatggaaagaccaggggtacaatccttgttgacaaagcgtgctctgaggatgatgtttttcaaattgcagcctcggatgagaaactctccaaatatcttgatgggaaaggcatcaggaagaaaatttatgtgcctggaaggatcttgaatgttatcttagatcaacaaaagtcaaggacctgataattgctcttgtttgtccatttatctcgttatgagtcaggaatagagatcaataagacatgacagatctgtaaatttgttttttagcacttgcagtttactgtcaatttgccaacaacaacaacgtcgaacactcgttaggttaatgttaaaatccaacagaaaccgtcagtcaaggttaagcatatggatagttatttttatgcactctttggggtatttgaaactgctctaggttccagcttcagtgtggagctgtagtttacaatacagatttaaatagttt

SEQ ID NO: 75429 - DNA, 3107 bp, Zea Mays
ggctgggacgctcagctcccgctcccggacgacgacgatggccttggcgctgcaatggcccctccaattcccactccagctccaggcgcggcctcccgccgttaccgcgggccatcaccgtcgccgccaccgagtcctcgccgtctgccgctccccgccgctcccagctcgctgttgtgccagcgccgccgctgcggccgacacggggaaggcgcagacagcggcgaggagggcttacccattcgatgagatcgagccgaggtggcagcggcactgggaggagcaccgcacgttccgcaccctggacatcggcgaggggctcgacacctccaagcccaagtgctacatcctcgacatgttcccctaccccagtggggctgggttgcatgttgggcacccccttggatacacggcaactgacattctgtcaagattcaagcgcatgaaaggcttcaacgttttgcatccaatgggatgggatgcatttggtcttcctgctgagcagtatgctattcagacgggaacccaccctaagattaccactgaaagaaacattgagcgctttcgcacacagcttaaatcgttgggtttttcatatgattgggatcgtgaaatctccacgacagagccgggttattataaatggacacaatggattttccttcaactgttaaagagaggacttgcttatcaggctggcattgatatcttacaatcaggctgaggtacctgtcaattggtgccctgctcttggaactgtcctggcgaatgaagaagtagtagatggtgtgagcgaacgtggtggctatcctgttatacgaaagccaatgcgccagtggatgctaaggataacatcttatgctgatcgtcttcttgaagatttgaatgatcttgattggcccgagagtatcaaggaaatgcaaagaaactggatagggagatcaaaaggtgctgagcttattttttctgcagttgaccaggaaggacatgacctgggtgccactttattggtttacacaacgaggcctgacacgatttttggtgcaacatatcttgttgtggcacctgagcatgttttactgtcatctctaacatctgaggaacaacgagcacatgtagaggaatacagagaactttcagcaagaaagagtgaactagaaaggactgaacttcagaaggaaaaaactggggttttcagtggttcttatgctaagaacccagcaaccggggaaatcattccaatatgggtggcagattatgttctaggaagctatggcactggggctatcatggcagtgcctgcacatgattctcgcgaccatgaatttgctgtgaaatatgaacttccaatcattaaggttgtaagtccaccgaatggtaattgtgatccagtggaggcatatgaagatgatggcatcatgattaattcatctagttcttcatctggactgaatattaacggaatgctttcccaagatgctgctaagaaagttactgagtggatagagaataatggttttggaaagaaaaagaagatgacttgcccttgacccttcctgaattggatgatttcactccaactggtactggggagccacctttgaccaaagcaacaaattgggttagaaccattgacccttcatctgggaagcctgcgagaagagaaacaagcaccatgccacaatgggctggatcttgctggtactatttgaggttcatggatcccaaaaactgcagtatattggttgataaggctaaagaaaggtattggggtccagttgacatctacgttggtggtgctgaacattctgtcttgcacttgctttatgcaagattttggcacaaggttctttatgacatgggtgtagtctccactaaagagcccttcaagtgcctgataaatcaaggattgatactaggagaaattgagtatactgcatatagagacaatgaaggcagatgggtttctgcagactcagactcaagtttgattgattgctaccaagaaaaagtagctccagacaaggttacaaaagttggagatcattatgttctgaaggataatccaaacattcgtctgaatgctcgtgcctacaagatgagtaaaagtcgagggaatgtcatcaaccctgatgatgttgtttcagaatatggcgctgattctcttcgcttgtacgaaatgttcatggggccattgagagattcaaagacatggagcactgggggaatcgaaggtgtgcaccgcttccttggacgaacgtggagactcatagttggtccacaattatctgatggatcatataatgatggaaccatgactaccgaagatgaaccaaccttggatcagcttcgagttcttcacagatgtattgcaagggtcacggaggaaattcaggaaacaagatttaacactgcaatatctgcaatgatggagtttgtgaatgctgcatacaagtgggaaacccagccaaaatctgttattgaatcctttgttctgctgctttcacccttcgcgccacacttggctgaggagctttggtttcgcctcggacatccacaatcattggcctatgaacagtttccagaggcaaaaagtgagtacctggaggaatcaaagcttgtactccctgtccaaatcaatggaaagaccaggggtacaatccttgttgacaaagcgtgctctgaggatgatgtttttcaaattgcagcctcggatgagaaactctccaaatatcttgatgggaaaggcatcaggaagaaaatttatgtgcctggaaggatcttgaatgttatcttagatcaacaaaagtcaaggacctgataattgctcttgtttgtccatttatctcgttatgagtcaggaatagagatcaataagacatgacagatctgtaaatttgttttttagcacttgcagtttactgtcaatttgccaacaacaacaacgtcgaacactcgttaggttaatgttaaaatccaacagaaaccgtcagtcaaggttaagcatatggatagttatttttatgcactctttggggtatttgaaactgctctaggttccagcttcagtgtggagctgtagtttacaatacagatttaaatagttt

SEQ ID NO: 75430 - DNA, 3209 bp, Zea Mays
ggctgggacgctcagctcccgctcccggacgacgacgatggccttggcgctgcaatggcccctccaattcccactccagctccaggcgcggcctcccgccgttaccgcgggccatcaccgtcgccgccaccgagtcctcgccgtctgccgctccccgccgctcccagctcgctgttgtgccagcgccgccgctgcggccgacacggggaaggcgcagacagcggcgaggagggcttacccattcgatgagatcgagccgaggtggcagcggcactgggaggagcaccgcacgttccgcaccctggacatcggcgaggggctcgacacctccaagcccaagtgctacatcctcgacatgttcccctaccccagtggggctgggttgcatgttgggcacccccttggatacacggcaactgacattctgtcaagattcaagcgcatgaaaggcttcaacgttttgcatccaatgggatgggatgcatttggtcttcctgctgagcagtatgctattcagacgggaacccaccctaagattaccactgaaagaaacattgagcgctttcgcacacagcttaaatcgttgggtttttcatatgattgggatcgtgaaatctccacgacagagccgggttattataaatggacacaatggattttccttcaactgttaaagagaggacttgcttatcaggctggcattgatatcttacaatcaggctgaggtacctgtcaattggtgccctgctcttggaactgtcctggcgaatgaagaagtagtagatggtgtgagcgaacgtggtggctatcctgttatacgaaagccaatgcgccagtggatgctaaggataacatcttatgctgatcgtcttcttgaagatttgaatgatcttgattggcccgagagtatcaaggaaatgcaaagaaactggatagggagatcaaaaggtgctgagcttattttttctgcagttgaccaggaaggacatgacctgggtgccactttattggtttacacaacgaggcctgacacgatttttggtgcaacatatcttgttgtggcacctgagcatgttttactgtcatctctaacatctgaggaacaacgagcacataggaatacagagaactttcagcaagaaagagtgaactagaaaggactgaacttcagaaggaaaaaactggggttttcagtggttcttatgctaagaacccagcaaccggggaaatcattccaatatgggtggcagattatgttctaggaagctatggcactggggctatcatggcagtgcctgcacatgattctcgcgaccatgaatttgctgtgaaatatgaacttccaatcattaaggttgtaagtccaccgaatggtaattgtgatccagtggaggcatatgaagatgatggcatcatgattaattcatctagttcttcatctggactgaatattaacggaatgctttcccaagatgctgctaagaaagttactgagtggatagagaataatggttttggaaagaaaaaggtaaactacaagcttcgagattggctttttgccagacagcgctattggggtgaacctttccctgtgagctaccttgatgataccaatgaaatggttcctcttacagaagatgacttgcccttgacccttcctgaattggatgatttcactccaactggtactggggagccacctttgaccaaagcaacaaattgggttagaaccattgacccttcatctgggaagcctgcgagaagagaaacaagcaccatgccacaatgggctggatcttgctggtactatttgaggttcatggatcccaaaaactgcagtatattggttgataaggctaaagaaaggtattggggtccagttgacatctacgttggtggtgctgaacattctgtcttgcacttgctttatgcaagattttggcacaaggttctttatgacatgggtgtagtctccactaaagagcccttcaagtgcctgataaatcaaggattgatactaggagaaattgagtatactgcatatagagacaatgaaggcagatgggtttctgcagactcagactcaagtttgattgattgctaccaagaaaaagtagctccagacaaggttacaaaagttggagatcattatgttctgaaggataatccaaacattcgtctgaatgctcgtgcctacaagatgagtaaaagtcgagggaatgtcatcaaccctgatgatgttgtttcagaatatggcgctgattctcttcgcttgtacgaaatgttcatggggccattgagagattcaaagacatggagcactgggggaatcgaaggtgtgcaccgcttccttggacgaacgtggagactcatagttggtccacaattatctgatggatcatataatgatggaaccatgactaccgaagatgaaccaaccttggatcagcttcgagttcttcacagatgtattgcaagggtcacggaggaaattcaggaaacaagatttaacactgcaatatctgcaatgatggagtttgtgaatgctgcatacaagtgggaaacccagccaaaatctgttattgaatcctttgttctgctgctttcacccttcgcgccacacttggctgaggagctttggtttcgcctcggacatccacaatcattggcctatgaacagtttccagaggcaaaaagtgagtacctggaggaatcaaagcttgtactccctgtccaaatcaatggaaagaccaggggtacaatccttgttgacaaagcgtgctctgaggatgatgtttttcaaattgcagcctcggatgagaaactctccaaatatcttgatgggaaaggcatcaggaagaaaatttatgtgcctggaaggatcttgaatgttatcttagatcaacaaaagtcaaggacctgataattgctcttgtttgtccatttatctcgttatgagtcaggaatagagatcaataagacatgacagatctgtaaatttgttttttagcacttgcagtttactgtcaatttgccaacaacaacaacgtcgaacactcgttaggttaatgttaaaatccaacagaaaccgtcagtcaaggttaagcatatggatagttatttttatgcactctttggggtatttgaaactgctctaggttccagcttcagtgtggagctgtagtttacaatacagatttaaatagttt

SEQ ID NO: 75431 - DNA, 3501 bp, Zea Mays
ggctgggacgctcagctcccgctcccggacgacgacgatggccttggcgctgcaatggcccctccaattcccactccagctccaggcgcggcctcccgccgttaccgcgggccatcaccgtcgccgccaccgagtcctcgccgtctgccgctccccgccgctcccagctcgctgttgtgccagcgccgccgctgcggccgacacggggaaggcgcagacagcggcgaggagggcttacccattcgatgagatcgagccgaggtggcagcggcactgggaggagcaccgcacgttccgcaccctggacatcggcgaggggctcgacacctccaagcccaagtgctacatcctcgacatgttcccctaccccagtggggctgggttgcatgttgggcacccccttggatacacggcaactgacattctgtcaagattcaagcgcatgaaaggcttcaacgttttgcatccaatgggatgggatgcatttggtcttcctgctgagcagtatgctattcagacgggaacccaccctaagattaccactgaaagaaacattgagcgctttcgcacacagcttaaatcgttgggtttttcatatgattgggatcgtgaaatctccacgacagagccgggttattataaatggacacaatggattttccttcaactgttaaagagaggacttgcttatcaggctggcattgatatcttacaatcaggctgaggtacctgtcaattggtgccctgctcttggaactgtcctggcgaatgaagaagtagtagatggtgtgagcgaacgtggtggctatcctgttatacgaaagccaatgcgccagtggatgctaaggataacatcttatgctgatcgtcttcttgaagatttgaatgatcttgattggcccgagagtatcaaggaaatgcaaagaaactggatagggagatcaaaaggtgctgagcttattttttctgcagttgaccaggaaggacatgacctgggtgccactttattggtttacacaacgaggcctgacacgatttttggtgcaacatatcttgttgtggcacctgagcatgttttactgtcatctctaacatctgaggaacaacgagcacatgtagaggaatacagagaactttcagcaagaaagagtgaactagaaaggactgaacttcagaaggaaaaaactggggttttcagtggttcttatgctaagaacccagcaaccggggaaatcattccaatatgggtggcagattatgttctaggaagctatggcactggggctatcatggcagtgcctgcacatgattctcgcgaccatgaatttgctgtgaaatatgaacttccaatcattaaggttgtaagtccaccgaatggtaattgtgatccagtggaggcatatgaagatgatggcatcatgattaattcatctagttcttcatctggactgaatattaacggaatgctttcccaagatgctgctaagaaagttactgagtggatagagaataatggttttggaaagaaaaaggtaaactacaagcttcgagattggctttttgccagacagcgctattggggtgaacctttccctgtgagctaccttgatgataccaatgaaatggttcctcttacagaagatgacttgcccttgacccttcctgaattggatgatttcactccaactggtactggggagccacctttgaccaaagcaacaaattgggttagaaccattgacccttcatctgggaagcctgcgagaagagaaacaagcaccatgccacaatgggctggatcttgctggtaacttttatcatattctaattgttgggcatttggagattttttctaatatataataggagccttattgtctcatggaagaatgcatcaaattctaacatcaaactatcatttggaaaattactcccacattattgaaacatatcctttctggtgttgcgagtggctggtgaacccttacatctttagggtcatgaaatcatcatttcaggtactatttgaggttcatggatcccaaaaactgcagtatattggttgataaggctaaagaaaggtattggggtccagttgacatctacgttggtggtgctgaacattctgtcttgcacttgctttatgcaagattttggcacaaggttctttatgacatgggtgtagtctccactaaagagcccttcaagtgcctgataaatcaaggattgatactaggagaagtaggtgccacaagtgtctaccagaatttctacatgttcatgaatgattttattgttgctaataaatgctgtaatagattgagtatactgcatatagagacaatgaaggcagatgggtttctgcagactcagactcaagtttgattgattgctaccaagaaaaagtagctccagacaaggttacaaaagttggagatcattatgttctgaaggataatccaaacattcgtctgaatgctcgtgcctacaagatgagtaaaagtcgagggaatgtcatcaaccctgatgatgttgtttcagaatatggcgctgattctcttcgcttgtacgaaatgttcatggggccattgagagattcaaagacatggagcactgggggaatcgaaggtgtgcaccgcttccttggacgaacgtggagactcatagttggtccacaattatctgatggatcatataatgatggaaccatgactaccgaagatgaaccaaccttggatcagcttcgagttcttcacagatgtattgcaagggtcacggaggaaattcaggaaacaagatttaacactgcaatatctgcaatgatggagtttgtgaatgctgcatacaagtgggaaacccagccaaaatctgttattgaatcctttgttctgctgctttcacccttcgcgccacacttggctgaggagctttggtttcgcctcggacatccacaatcattggcctatgaacagtttccagaggcaaaaagtgagtacctggaggaatcaaagcttgtactccctgtccaaatcaatggaaagaccaggggtacaatccttgttgacaaagcgtgctctgaggatgatgtttttcaaattgcagcctcggatgagaaactctccaaatatcttgatgggaaaggcatcaggaagaaaatttatgtgcctggaaggatcttgaatgttatcttagatcaacaaaagtcaaggacctgataattgctcttgtttgtccatttatctcgttatgagtcaggaatagagatcaataagacatgacagatctgtaaatttgttttttagcacttgcagtttactgtcaatttgccaacaacaacaacgtcgaacactcgttaggttaatgttaaaatccaacagaaaccgtcagtcaaggttaagcatatggatagttatttttatgcactctttggggtatttgaaactgctctaggttccagcttcagtgtggagctgtagtttacaatacagatttaaatagttt

SEQ ID NO: 75432 - DNA, 3341 bp, Zea Mays
ggctgggacgctcagctcccgctcccggacgacgacgatggccttggcgctgcaatggcccctccaattcccactccagctccaggcgcggcctcccgccgttaccgcgggccatcaccgtcgccgccaccgagtcctcgccgtctgccgctccccgccgctcccagctcgctgttgtgccagcgccgccgctgcggccgacacggggaaggcgcagacagcggcgaggagggcttacccattcgatgagatcgagccgaggtggcagcggcactgggaggagcaccgcacgttccgcaccctggacatcggcgaggggctcgacacctccaagcccaagtgctacatcctcgacatgttcccctaccccagtggggctgggttgcatgttgggcacccccttggatacacggcaactgacattctgtcaagattcaagcgcatgaaaggcttcaacgttttgcatccaatgggatgggatgcatttggtcttcctgctgagcagtatgctattcagacgggaacccaccctaagattaccactgaaagaaacattgagcgctttcgcacacagcttaaatcgttgggtttttcatatgattgggatcgtgaaatctccacgacagagccgggttattataaatggacacaatggattttccttcaactgttaaagagaggacttgcttatcaggctggcattgatatcttacaatcaggctgaggtacctgtcaattggtgccctgctcttggaactgtcctggcgaatgaagaagtagtagatggtgtgagcgaacgtggtggctatcctgttatacgaaagccaatgcgccagtggatgctaaggataacatcttatgctgatcgtcttcttgaagatttgaatgatcttgattggcccgagagtatcaaggaaatgcaaagaaactggatagggagatcaaaaggtgctgagcttattttttctgcagttgaccaggaaggacatgacctgggtgccactttattggtttacacaacgaggcctgacacgatttttggtgcaacatatcttgttgtggcacctgagcatgttttactgtcatctctaacatctgaggaacaacgagcacatgtagaggaatacagagaactttcagcaagaaagagtgaactagaaaggactgaacttcagaaggaaaaaactggggttttcagtggttcttatgctaagaacccagcaaccggggaaatcattccaatatgggtggcagattatgttctaggaagctatggcactggggctatcatggcagtgcctgcacatgattctcgcgaccatgaatttgctgtgaaatatgaacttccaatcattaaggttgtaagtccaccgaatggtaattgtgatccagtggaggcatatgaagatgatggcatcatgattaattcatctagttcttcatctggactgaatattaacggaatgctttcccaagatgctgctaagaaagttactgagtggatagagaataatggttttggaaagaaaaaggtaaactacaagcttcgagattggctttttgccagacagcgctattggggtgaacctttccctgtgagctaccttgatgataccaatgaaatggttcctcttacagaagatgacttgcccttgacccttcctgaattggatgatttcactccaactggtactggggagccacctttgaccaaagcaacaaattgggttagaaccattgacccttcatctgggaagcctgcgagaagagaaacaagcaccatgccacaatgggctggatcttgctggtactatttgaggttcatggatcccaaaaactgcagtatattggttgataaggctaaagaaaggtattggggtccagttgacatctacgttggtggtgctgaacattctgtcttgcacttgctttatgcaagattttggcacaaggttctttatgacatgggtgtagtctccactaaagagcccttcaagtgcctgataaatcaaggattgatactaggagaaagacaatgaaggcagatgggtttctgcagactcagactcaagtttgattgattgctaccaagaaaaagtagctccagacaaggttacaaaagttggagatcattatgttctgaaggataatccaaacattcgtctgaatgctcgtgcctacaagatgagtaaaagtcgagggaatgtcatcaaccctgatgatgttgtttcagaatatggcgctgattctcttcgcttgtacgaaatgttcatggggccattgaggtgtgtataaatatttacagatgaagtacaactcagacaaagttgatgagatatatggtacttctagagattcaaagacatggagcactgggggaatcgaaggtgtgcaccgcttccttggacgaacgtggagactcatagttggtccacaattatctgatggatcatataatgatggaaccatgactaccgaagatgaaccaaccttggatcagcttcgagttcttcacagatgtattgcaaggtacgccctggccataacacgggtgtgttataacttccaagtacacaataagagaaaagcaggcccatcttataacattcaggtcacggaggaaattcaggaaacaagatttaacactgcaatatctgcaatgatggagtttgtgaatgctgcatacaagtgggaaacccagccaaaatctgttattgaatcctttgttctgctgctttcacccttcgcgccacacttggctgaggagctttggtttcgcctcggacatccacaatcattggcctatgaacagtttccagaggcaaaaagtgagtacctggaggaatcaaagcttgtactccctgtccaaatcaatggaaagaccaggggtacaatccttgttgacaaagcgtgctctgaggatgatgtttttcaaattgcagcctcggatgagaaactctccaaatatcttgatgggaaaggcatcaggaagaaaatttatgtgcctggaaggatcttgaatgttatcttagatcaacaaaagtcaaggacctgataattgctcttgtttgtccatttatctcgttatgagtcaggaatagagatcaataagacatgacagatctgtaaatttgttttttagcacttgcagtttactgtcaatttgccaacaacaacaacgtcgaacactcgttaggttaatgttaaaatccaacagaaaccgtcagtcaaggttaagcatatggatagttatttttatgcactctttggggtatttgaaactgctctaggttccagcttcagtgtggagctgtagtttacaatacagatttaaatagttt

SEQ ID NO: 75433 - DNA, 3485 bp, Zea Mays
ggctgggacgctcagctcccgctcccggacgacgacgatggccttggcgctgcaatggcccctccaattcccactccagctccaggcgcggcctcccgccgttaccgcgggccatcaccgtcgccgccaccgagtcctcgccgtctgccgctccccgccgctcccagctcgctgttgtgccagcgccgccgctgcggccgacacggggaaggcgcagacagcggcgaggagggcttacccattcgatgagatcgagccgaggtggcagcggcactgggaggagcaccgcacgttccgcaccctggacatcggcgaggggctcgacacctccaagcccaagtgctacatcctcgacatgttcccctaccccagtggggctgggttgcatgttgggcacccccttggatacacggcaactgacattctgtcaagattcaagcgcatgaaaggcttcaacgttttgcatccaatgggatgggatgcatttggtcttcctgctgagcagtatgctattcagacgggaacccaccctaagattaccactgaaagaaacattgagcgctttcgcacacagcttaaatcgttgggtttttcatatgattgggatcgtgaaatctccacgacagagccgggttattataaatggacacaatggattttccttcaactgttaaagagaggacttgcttatcaggctggcattgatatcttacaatcaggctgaggtacctgtcaattggtgccctgctcttggaactgtcctggcgaatgaagaagtagtagatggtgtgagcgaacgtggtggctatcctgttatacgaaagccaatgcgccagtggatgctaaggataacatcttatgctgatcgtcttcttgaagatttgaatgatcttgattggcccgagagtatcaaggaaatgcaaagaaactggatagggagatcaaaaggtgctgagcttattttttctgcagttgaccaggaaggacatgacctgggtgccactttattggtttacacaacgaggcctgacacgatttttggtgcaacatatcttgttgtggcacctgagcatgttttactgtcatctctaacatctgaggaacaacgagcacatgtagaggaatacagagaactttcagcaagaaagagtgaactagaaaggactgaacttcagaaggaaaaaactggggttttcagtggttcttatgctaagaacccagcaaccggggaaatcattccaatatgggtggcagattatgttctaggaagctatggcactggggctatcatggcagtgcctgcacatgattctcgcgaccatgaatttgctgtgaaatatgaacttccaatcattaaggttgtaagtccaccgaatggtaattgtgatccagtggaggcatatgaagatgatggcatcatgattaattcatctagttcttcatctggactgaatattaacggaatgctttcccaagatgctgctaagaaagttactgagtggatagagaataatggttttggaaagaaaaaggtaaactacaagcttcgagattggctttttgccagacagcgctattggggtgaacctttccctgtgagctaccttgatgataccaatgaaatggttcctcttacagaagatgacttgcccttgacccttcctgaattggatgatttcactccaactggtactggggagccacctttgaccaaagcaacaaattgggttagaaccattgacccttcatctgggaagcctgcgagaagagaaacaagcaccatgccacaatgggctggatcttgctggtactatttgaggttcatggatcccaaaaactgcagtatattggttgataaggctaaagaaaggtattggggtccagttgacatctacgttggtggtgctgaacattctgtcttgcacttgctttatgcaagattttggcacaaggttctttatgacatgggtgtagtctccactaaagagcccttcaagtgcctgataaatcaaggattgatactaggagaaattgagtatactgcatatagagacaatgaaggcagatgggtttctgcagactcagactcaagtttgattgattgctaccaagaaaaagtagctccagacaaggttacaaaagttggagatcattatgttctgaaggataatccaaacattcgtctgaatgctcgtgcctacaagatgagtaaaagtcgagggaatgtcatcaaccctgatgatgttgtttcagaatatggcgctgattctcttcgcttgtacgaaatgttcatggggccattgagagattcaaagacatggagcactgggggaatcgaaggtgtgcaccgcttccttggacgaacgtggagactcatagttggtccacaattatctgatggatcatataatgatggaaccatgactaccgaagatgaaccaaccttggatcagcttcgagttcttcacagatgtattgcaagggtcacggaggaaattcaggaaacaagatttaacactgcaatatctgcaatgatggagtttgtgaatgctgcatacaaggtgaaaccaaacttatcttaatttctctagcaatattagaatttataaatattggatttgacaagtgtaagtaaaattaatatcctcatcatcaagtacttccattatgctctattcctttttacacaagggaattactagtcaacattggctctattggatcttgccatgtccaaaatgacatgcatttatacatagagggagctaactagctaaggtcgtatattccatggtttacgcaagaacaggatgtgactcttattttctttcagtgggaaacccagccaaaatctgttattgaatcctttgttctgctgctttcacccttcgcgccacacttggctgaggagctttggtttcgcctcggacatccacaatcattggcctatgaacagtttccagaggcaaaaagtgagtacctggaggaatcaaagcttgtactccctgtccaaatcaatggaaagaccaggggtacaatccttgttgacaaagcgtgctctgaggatgatgtttttcaaattgcagcctcggatgagaaactctccaaatatcttgatgggaaaggcatcaggaagaaaatttatgtgcctggaaggatcttgaatgttatcttagatcaacaaaagtcaaggacctgataattgctcttgtttgtccatttatctcgttatgagtcaggaatagagatcaataagacatgacagatctgtaaatttgttttttagcacttgcagtttactgtcaatttgccaacaacaacaacgtcgaacactcgttaggttaatgttaaaatccaacagaaaccgtcagtcaaggttaagcatatggatagttatttttatgcactctttggggtatttgaaactgctctaggttccagcttcagtgtggagctgtagtttacaatacagatttaaatagttt

SEQ ID NO: 75434 - DNA, 3197 bp, Zea Mays
agcaggctgggacgctcagctcccgctcccggacgacgacgatggccttggcgctgcaatggcccctccaattcccactccagctccaggcgcggcctcccgccgttaccgcgggccatcaccgtcgccgccaccgagtcctcgccgtctgccgctccccgccgctcccagctcgctgttgtgccagcgccgccgctgcggccgacacggggaaggcgcagacagcggcgaggagggcttacccattcgatgagatcgagccgaggtggcagcggcactgggaggagcaccgcacgttccgcaccctggacatcggcgaggggctcgacacctccaagcccaagtgctacatcctcgacatgttcccctaccccagtggggctgggttgcatgttgggcacccccttggatacacggcaactgacattctgtcaagattcaagcgcatgaaaggcttcaacgttttgcatccaatgggatgggatgcatttggtcttcctgctgagcagtatgctattcagacgggaacccaccctaagattaccactgaaagaaacattgagcgctttcgcacacagcttaaatcgttgggtttttcatatgattgggatcgtgaaatctccacgacagagccgggttattataaatggacacaatggattttccttcaactgttaaagagaggacttgcttatcaggctggcattgatatcttacaatcaggctgaggtacctgtcaattggtgccctgctcttggaactgtcctggcgaatgaagaagtagtagatggtgtgagcgaacgtggtggctatcctgttatacgaaagccaatgcgccagtggatgctaaggataacatcttatgctgatcgtcttcttgaagatttgaatgatcttgattggcccgagagtatcaaggaaatgcaaagaaactggatagggagatcaaaaggtgctgagcttattttttctgcagttgaccaggaaggacatgacctgggtgccactttattggtttacacaacgaggcctgacacgatttttggtgcaacatatcttgttgtggcacctgagcatgttttactgtcatctctaacatctgaggaacaacgagcacatgtagaggaatacagagaactttcagcaagaaagagtgaactagaaaggactgaacttcagaaggaaaaaactggggttttcagtggttcttatgctaagaacccagcaaccggggaaatcattccaatatgggtggcagattatgttctaggaagctatggcactggggctatcatggcagtgcctgcacatgattctcgcgaccatgaatttgctgtgaaatatgaacttccaatcattaaggttgtaagtccaccgaatggtaattgtgatccagtggaggcatatgaagatgatggcatcatgattaattcatctagttcttcatctggactgaatattaacggaatgctttcccaagatgctgctaagaaagttactgagtggatagagaataatggttttggaaagaaaaaggtaaactacaagcttcgagattggctttttgccagacagcgctattggggtgaacctttccctgtgagctaccttgatgataccaatgaaatggttcctcttacagaagatgacttgcccttgacccttcctgaattggatgatttcactccaactggtactggggagccacctttgaccaaagcaacaaattgggttagaaccattgacccttcatctgggaagcctgcgagaagagaaacaagcaccatgccacaatgggctggatcttgctggtactatttgaggttcatggatcccaaaaactgcagtatattggttgataaggctaaagaaaggtattggggtccagttgacatctacgttggtggtgctgaacattctgtcttgcacttgctttatgcaagattttggcacaaggttctttatgacatgggtgtagtctccactaaagagcccttcaagtgcctgataaatcaaggattgatactaggagaaagacaatgaaggcagatgggtttctgcagactcagactcaagtttgattgattgctaccaagaaaaagtagctccagacaaggttacaaaagttggagatcattatgttctgaaggataatccaaacattcgtctgaatgctcgtgcctacaagatgagtaaaagtcgagggaatgtcatcaaccctgatgatgttgtttcagaatatggcgctgattctcttcgcttgtacgaaatgttcatggggccattgagagattcaaagacatggagcactgggggaatcgaaggtgtgcaccgcttccttggacgaacgtggagactcatagttggtccacaattatctgatggatcatataatgatggaaccatgactaccgaagatgaaccaaccttggatcagcttcgagttcttcacagatgtattgcaagggtcacggaggaaattcaggaaacaagatttaacactgcaatatctgcaatgatggagtttgtgaatgctgcatacaagtgggaaacccagccaaaatctgttattgaatcctttgttctgctgctttcacccttcgcgccacacttggctgaggagctttggtttcgcctcggacatccacaatcattggcctatgaacagtttccagaggcaaaaagtgagtacctggaggaatcaaagcttgtactccctgtccaaatcaatggaaagaccaggggtacaatccttgttgacaaagcgtgctctgaggatgatgtttttcaaattgcagcctcggatgagaaactctccaaatatcttgatgggaaaggcatcaggaagaaaatttatgtgcctggaaggatcttgaatgttatcttagatcaacaaaagtcaaggacctgataattgctcttgtttgtccatttatctcgttatgagtcaggaatagagatcaataagacatgacagatctgtaaatttgttttttagcacttgcagtttactgtcaatttgccaacaacaacaacgtcgaacactcgttaggttaatgttaaaatccaacagaaaccgtcagtcaaggttaagcatatggatagttatttttatgcactctttggggtatttgaaactgctctaggttccagcttcagtgtggagctgtagtttacaatacagatttaaatagttt

SEQ ID NO: 75435 - DNA, 3086 bp, Zea Mays
agcaggctgggacgctcagctcccgctcccggacgacgacgatggccttggcgctgcaatggcccctccaattcccactccagctccaggcgcggcctcccgccgttaccgcgggccatcaccgtcgccgccaccgagtcctcgccgtctgccgctccccgccgctcccagctcgctgttgtgccagcgccgccgctgcggccgacacggggaaggcgcagacagcggcgaggagggcttacccattcgatgagatcgagccgaggtggcagcggcactgggaggagcaccgcacgttccgcaccctggacatcggcgaggggctcgacacctccaagcccaagtgctacatcctcgacatgttcccctaccccagtggggctgggttgcatgttgggcacccccttggatacacggcaactgacattctgtcaagattcaagcgcatgaaaggcttcaacgttttgcatccaatgggatgggatgcatttggtcttcctgctgagcagtatgctattcagacgggaacccaccctaagattaccactgaaagaaacattgagcgctttcgcacacagcttaaatcgttgggtttttcatatgattgggatcgtgaaatctccacgacagagccgggttattataaatggacacaatggattttccttcaactgttaaagagaggacttgcttatcaggctgaggtacctgtcaattggtgccctgctcttggaactgtcctggcgaatgaagaagtagtagatggtgtgagcgaacgtggtggctatcctgttatacgaaagccaatgcgccagtggatgctaaggataacatcttatgctgatcgtcttcttgaagatttgaatgatcttgattggcccgagagtatcaaggaaatgcaaagaaactggatagggagatcaaaaggtgctgagcttattttttctgcagttgaccaggaaggacatgacctgggtgccactttattggtttacacaacgaggcctgacacgatttttggtgcaacatatcttgttgtggcacctgagcatgttttactgtcatctctaacatctgaggaacaacgagcacatgtagaggaatacagagaactttcagcaagaaagagtgaactagaaaggactgaacttcagaaggaaaaaactggggttttcagtggttcttatgctaagaacccagcaaccggggaaatcattccaatatgggtggcagattatgttctaggaagctatggcactggggctatcatggcagtgcctgcacatgattctcgcgaccatgaatttgctgtgaaatatgaacttccaatcattaaggttgtaagtccaccgaatggtaattgtgatccagtggaggcatatgaagatgatggcatcatgattaattcatctagttcttcatctggactgaatattaacggaatgctttcccaagatgctgctaagaaagttactgagtggatagagaataatggttttggaaagaaaaagaagatgacttgcccttgacccttcctgaattggatgatttcactccaactggtactggggagccacctttgaccaaagcaacaaattgggttagaaccattgacccttcatctgggaagcctgcgagaagagaaacaagcaccatgccacaatgggctggatcttgctggtactatttgaggttcatggatcccaaaaactgcagtatattggttgataaggctaaagaaaggtattggggtccagttgacatctacgttggtggtgctgaacattctgtcttgcacttgctttatgcaagattttggcacaaggttctttatgacatgggtgtagtctccactaaagagcccttcaagtgcctgataaatcaaggattgatactaggagaaattgagtatactgcatatagagacaatgaaggcagatgggtttctgcagactcagactcaagtttgattgattgctaccaagaaaaagtagctccagacaaggttacaaaagttggagatcattatgttctgaaggataatccaaacattcgtctgaatgctcgtgcctacaagatgagtaaaagtcgagggaatgtcatcaaccctgatgatgttgtttcagaatatggcgctgattctcttcgcttgtacgaaatgttcatggggccattgagagattcaaagacatggagcactgggggaatcgaaggtgtgcaccgcttccttggacgaacgtggagactcatagttggtccacaattatctgatggatcatataatgatggaaccatgactaccgaagatgaaccaaccttggatcagcttcgagttcttcacagatgtattgcaagggtcacggaggaaattcaggaaacaagatttaacactgcaatatctgcaatgatggagtttgtgaatgctgcatacaagtgggaaacccagccaaaatctgttattgaatcctttgttctgctgctttcacccttcgcgccacacttggctgaggagctttggtttcgcctcggacatccacaatcattggcctatgaacagtttccagaggcaaaaagtgagtacctggaggaatcaaagcttgtactccctgtccaaatcaatggaaagaccaggggtacaatccttgttgacaaagcgtgctctgaggatgatgtttttcaaattgcagcctcggatgagaaactctccaaatatcttgatgggaaaggcatcaggaagaaaatttatgtgcctggaaggatcttgaatgttatcttagatcaacaaaagtcaaggacctgataattgctcttgtttgtccatttatctcgttatgagtcaggaatagagatcaataagacatgacagatctgtaaatttgttttttagcacttgcagtttactgtcaatttgccaacaacaacaacgtcgaacactcgttaggttaatgttaaaatccaacagaaaccgtcagtcaaggttaagcatatggatagttatttttatgcactctttggggtatttgaaactgctctaggttccagcttcagtgtggagctgtagtttacaatacagatttaaatagttt

SEQ ID NO: 75436 - DNA, 3172 bp, Zea Mays
agcaggctgggacgctcagctcccgctcccggacgacgacgatggccttggcgctgcaatggcccctccaattcccactccagctccaggcgcggcctcccgccgttaccgcgggccatcaccgtcgccgccaccgagtcctcgccgtctgccgctccccgccgctcccagctcgctgttgtgccagcgccgccgctgcggccgacacggggaaggcgcagacagcggcgaggagggcttacccattcgatgagatcgagccgaggtggcagcggcactgggaggagcaccgcacgttccgcaccctggacatcggcgaggggctcgacacctccaagcccaagtgctacatcctcgacatgttcccctaccccagtggggctgggttgcatgttgggcacccccttggatacacggcaactgacattctgtcaagattcaagcgcatgaaaggcttcaacgttttgcatccaatgggatgggatgcatttggtcttcctgctgagcagtatgctattcagacgggaacccaccctaagattaccactgaaagaaacattgagcgctttcgcacacagcttaaatcgttgggtttttcatatgattgggatcgtgaaatctccacgacagagccgggttattataaatggacacaatggattttccttcaactgttaaagagaggacttgcttatcaggctgaggtacctgtcaattggtgccctgctcttggaactgtcctggcgaatgaagaagtagtagatggtgtgagcgaacgtggtggctatcctgttatacgaaagccaatgcgccagtggatgctaaggataacatcttatgctgatcgtcttcttgaagatttgaatgatcttgattggcccgagagtatcaaggaaatgcaaagaaactggatagggagatcaaaaggtgctgagcttattttttctgcagttgaccaggaaggacatgacctgggtgccactttattggtttacacaacgaggcctgacacgatttttggtgcaacatatcttgttgtggcacctgagcatgttttactgtcatctctaacatctgaggaacaacgagcacatgtagaggaatacagagaactttcagcaagaaagagtgaactagaaaggactgaacttcagaaggaaaaaactggggttttcagtggttcttatgctaagaacccagcaaccggggaaatcattccaatatgggtggcagattatgttctaggaagctatggcactggggctatcatggcagtgcctgcacatgattctcgcgaccatgaatttgctgtgaaatatgaacttccaatcattaaggttgtaagtccaccgaatggtaattgtgatccagtggaggcatatgaagatgatggcatcatgattaattcatctagttcttcatctggactgaatattaacggaatgctttcccaagatgctgctaagaaagttactgagtggatagagaataatggttttggaaagaaaaaggtaaactacaagcttcgagattggctttttgccagacagcgctattggggtgaacctttccctgtgagctaccttgatgataccaatgaaatggttcctcttacagaagatgacttgcccttgacccttcctgaattggatgatttcactccaactggtactggggagccacctttgaccaaagcaacaaattgggttagaaccattgacccttcatctgggaagcctgcgagaagagaaacaagcaccatgccacaatgggctggatcttgctggtactatttgaggttcatggatcccaaaaactgcagtatattggttgataaggctaaagaaaggtattggggtccagttgacatctacgttggtggtgctgaacattctgtcttgcacttgctttatgcaagattttggcacaaggttctttatgacatgggtgtagtctccactaaagagcccttcaagtgcctgataaatcaaggattgatactaggagaaagacaatgaaggcagatgggtttctgcagactcagactcaagtttgattgattgctaccaagaaaaagtagctccagacaaggttacaaaagttggagatcattatgttctgaaggataatccaaacattcgtctgaatgctcgtgcctacaagatgagtaaaagtcgagggaatgtcatcaaccctgatgatgttgtttcagaatatggcgctgattctcttcgcttgtacgaaatgttcatggggccattgagagattcaaagacatggagcactgggggaatcgaaggtgtgcaccgcttccttggacgaacgtggagactcatagttggtccacaattatctgatggatcatataatgatggaaccatgactaccgaagatgaaccaaccttggatcagcttcgagttcttcacagatgtattgcaagggtcacggaggaaattcaggaaacaagatttaacactgcaatatctgcaatgatggagtttgtgaatgctgcatacaagtgggaaacccagccaaaatctgttattgaatcctttgttctgctgctttcacccttcgcgccacacttggctgaggagctttggtttcgcctcggacatccacaatcattggcctatgaacagtttccagaggcaaaaagtgagtacctggaggaatcaaagcttgtactccctgtccaaatcaatggaaagaccaggggtacaatccttgttgacaaagcgtgctctgaggatgatgtttttcaaattgcagcctcggatgagaaactctccaaatatcttgatgggaaaggcatcaggaagaaaatttatgtgcctggaaggatcttgaatgttatcttagatcaacaaaagtcaaggacctgataattgctcttgtttgtccatttatctcgttatgagtcaggaatagagatcaataagacatgacagatctgtaaatttgttttttagcacttgcagtttactgtcaatttgccaacaacaacaacgtcgaacactcgttaggttaatgttaaaatccaacagaaaccgtcagtcaaggttaagcatatggatagttatttttatgcactctttggggtatttgaaactgctctaggttccagcttcagtgtggagctgtagtttacaatacagatttaaatagttt

SEQ ID NO: 75437 - DNA, 861 bp, Zea Mays
gatgatccatactagtatttccacggggaatgcctgtagaagtagtgatgtattcagctcatagatactcaatgcttcattctgctggccatttgttggacatctgtgttcacaatgtaggcctctttcatctggagcctgggaaaggctatcattttcctgatggaccgtttgttgagtataagggaataattcctccagatcaaataccggttaagaaaaatgaactggaaagagaggccaatagactaatttcagaaggagcgaaggtcttagcttctgtttttccttatgaggaggcagccatattatgcggaggttctttgcctagctacatttcaaaggatagcaatcctcgcattgttaagtttggggataaccctggtggtccttgcggtggcactcatgttgccgacatttcaatcatcaacagcctaaaggtgacaaacataagagtcaagaaaggcctcactaaagtctcatacagcatcagcccatgatccttttccagcagccgcagcagacaacacctggaatttattggagcgagaattattaattgaatcagaaggctgtactttagtttcgtggcatcacatgtatacgtagggtggcaaataaacaatttctatgtagtaaagtctgccagttcctcatgtacttcaatagatgatttgtttctgtactgagtcgtagcagagccgttaaggttctgatgtagatgatgacacatgtaaaactgccacggcaccatcatacaacaacatgaaggagatttaaatttgttagagcaactccaatagttatgtaaattttagctctctaaatcacagatttaaaaagttgctaaatgacttttga

SEQ ID NO: 75438 - DNA, 1379 bp, Zea Mays
caaagccaacctgctcccgtaattaggcgaccttgcagaattcctttttttatctccaggaaagttcagagacaaacagaaagctgggcgaagaacgaaggcacctcgaaaccaagcctggccatgagaccatcaaaatctgtaaacagcacgtagtcacggtggggcgcgggcctatatattgtcttgtcaggccttgttcgtctcttcagaatcttcagacatccgagcgtcttgcgcgttcgatttgaaccacttggcgctgctgcctgaccggtcctcacccctcaacccgccgaacttcctcgtcaccgccggcggcgatcgatcgttgccaagtctcccaccatcgcctccacgggaaaaaatggcgcaggaggctgcaccggcgaggccggtgggccccaccaggctcgtctacttcgatgatatgggggcactccaccactcatccgccaccgttctctccgtccaccaggttttccactacggaagatttgagggcacggagcaaggatgtgggactgtatttaaggaggggggaaccgttagcttgcaggtcgacgcagaacgacgcagctttaattcaaggcttcattctgctggccatttgttggacatctgtgttcacaatgtaggcctctttcatctggagcctgggaaaggctatcattttcctgatggaccgtttgttgagtataagggaataattcctccagatcaaataccggttaagaaaaatgaactggaaagagaggccaatagactaatttcagaaggagcgaaggtcttagcttctgtttttccttatgaggaggcagccatattatgcggaggttctttgcctagctacatttcaaaggatagcaatcctcgcattgttaagtttggggataaccctggtggtccttgcggtggcactcatgttgccgacatttcaatcatcaacagcctaaaggtgacaaacataagagtcaagaaaggcctcactaaagtctcatacagcatcagcccatgatccttttccagcagccgcagcagacaacacctggaatttattggagcgagaattattaattgaatcagaaggctgtactttagtttcgtggcatcacatgtatacgtagggtggcaaataaacaatttctatgtagtaaagtctgccagttcctcatgtacttcaatagatgatttgtttctgtactgagtcgtagcagagccgttaaggttctgatgtagatgatgacacatgtaaaactgccacggcaccatcatacaacaacatgaaggagatttaaatttgttagagcaactccaatagttatgtaaattttagctctctaaatcacagatttaaaaagttgctaaatgacttttga

SEQ ID NO: 75439 - DNA, 1569 bp, Zea Mays
aaactagcatttttttttacagaagcgtatgcgttaaccttttcccaaattcccagtttatgggtgggcaatgggcagtcaaagccaacctgctcccgtaattaggcgaccttgcagaattcctttttttatctccaggaaagttcagagacaaacagaaagctgggcgaagaacgaaggcacctcgaaaccaagcctggccatgagaccatcaaaatctgtaaacagcacgtagtcacggtggggcgcgggcctatatattgtcttgtcaggccttgttcgtctcttcagaatcttcagacatccgagcgtcttgcgcgttcgatttgaaccacttggcgctgctgcctgaccggtcctcacccctcaacccgccgaacttcctcgtcaccgccggcggcgatcgatcgttgccaagtctcccaccatcgcctccacgggaaaaaatggcgcaggaggctgcaccggcgaggccggtgggccccaccaggctcgtctacttcgatgatatgggggcactccaccactcatccgccaccgttctctccgtccaccaggaggagggcggccgggtagcggtggtgctggacgccacggtcttccacccgcagggcggcggccaaccggcggacacgggcgtcatctccgccggcggagccaggttccttgttgaggatgtgcgggcgaaagacggagtggttttccactacggaagatttgagggcacggagcaaggatgtgggactgtatttaaggaggggggaaccgttagcttgcaggtcgacgcagaacgacgcagctttaattcaaggcttcattctgctggccatttgttggacatctgtgttcacaatgtaggcctctttcatctggagcctgggaaaggctatcattttcctgatggaccgtttgttgagtataagggaataattcctccagatcaaataccggttaagaaaaatgaactggaaagagaggccaatagactaatttcagaaggagcgaaggcagccatattatgcggaggttctttgcctagctacatttcaaaggatagcaatcctcgcattgttaagtttggggataaccctggtggtccttgcggtggcactcatgttgccgacatttcaatcatcaacagcctaaaggtgacaaacataagagtcaagaaaggcctcactaaagtctcatacagcatcagcccatgatccttttccagcagccgcagcagacaacacctggaatttattggagcgagaattattaattgaatcagaaggctgtactttagtttcgtggcatcacatgtatacgtagggtggcaaataaacaatttctatgtagtaaagtctgccagttcctcatgtacttcaatagatgatttgtttctgtactgagtcgtagcagagccgttaaggttctgatgtagatgatgacacatgtaaaactgccacggcaccatcatacaacaacatgaaggagatttaaatttgttagagcaactccaatagttatgtaaattttagctctctaaatcacagatttaaaaagttgctaaatgacttttga

SEQ ID NO: 75440 - DNA, 1629 bp, Zea Mays
ttaaaacttgaccgagttgcctcaagtgtacaatccaaaggagttggatcggacgtagacccgcaattatacgagttcttctcaagtgctctctgaactctgcactgttcgcacaggtttctatttggtgcaacatcaaagttcgaagtttcaacctccgccactgcttgttgaggagatatagtttcgtttcacggaagtttcatcgaagcctcgaaggttcggtaatgttctgggcgcctccggaaccaagcgagaagcgagagaaacagacacatggtaataaactagcatttttttttacagaagcgtatgcgttaaccttttcccaaattcccagtttatgggtgggcaatgggcagtcaaagccaacctgctcccgtaattaggcgaccttgcagaattcctttttttatctccaggaaagttcagagacaaacagaaagctgggcgaagaacgaaggcacctcgaaaccaagcctggccatgagaccatcaaaatctgtaaacagcacgtagtcacggtggggcgcgggcctatatattgtcttgtcaggccttgttcgtctcttcagaatcttcagacatccgagcgtcttgcgcgttcgatttgaaccacttggcgctgctgcctgaccggtcctcacccctcaacccgccgaacttcctcgtcaccgccggcggcgatcgatcgttgccaagtctcccaccatcgcctccacgggaaaaaatggcgcaggaggctgcaccggcgaggccggtgggccccaccaggctcgtctacttcgatgatatgggggcactccaccactcatccgccaccgttctctccgtccaccaggcttcattctgctggccatttgttggacatctgtgttcacaatgtaggcctctttcatctggagcctgggaaaggctatcattttcctgatggaccgtttgttgagtataagggaataattcctccagatcaaataccggttaagaaaaatgaactggaaagagaggccaatagactaatttcagaaggagcgaaggtcttagcttctgtttttccttatgaggaggcagccatattatgcggaggttctttgcctagctacatttcaaaggatagcaatcctcgcattgttaagtttggggataaccctggtggtccttgcggtggcactcatgttgccgacatttcaatcatcaacagcctaaaggtgacaaacataagagtcaagaaaggcctcactaaagtctcatacagcatcagcccatgatccttttccagcagccgcagcagacaacacctggaatttattggagcgagaattattaattgaatcagaaggctgtactttagtttcgtggcatcacatgtatacgtagggtggcaaataaacaatttctatgtagtaaagtctgccagttcctcatgtacttcaatagatgatttgtttctgtactgagtcgtagcagagccgttaaggttctgatgtagatgatgacacatgtaaaactgccacggcaccatcatacaacaacatgaaggagatttaaatttgttagagcaactccaatagttatgtaaattttagctctctaaatcacagatttaaaaagttgctaaatgacttttga

SEQ ID NO: 75441 - DNA, 1704 bp, Zea Mays
aagagttcagcactcctctcgcgtcctcattcttcaaccgccacacaaacccctcgcttactgcacctttgcagcaccgctctctcgatcgaatcccaaggaacgaagacgacgacgatggcgtcgtctgcctgcttgctccaagcttccacggccttcgctccacgcttctccctcccgtcccgaccccagcccccgctacacctgcgtctccgcggctcccccaaccgtcgccgtggcatctcactcactgcttcctccgccgcgtccccggaagtcgagaaagagtcctcgccctcgtcctcgccgcaggaatctctgtctgctgtcgcggacagtgtgaaggtgctcaaggtggcagccaagacgaggaaagtacctgccccggaaattctctcggcgctgtccaagatcaagaaggcaaaactcgacacgtcggcattctttgagacactcggtggtaccgagtctccaggcaggacgtggatgcttatcttcactgcaaagggtcggctggagaaagggcagtatttcccagtgacagcagtccaacgcttcgatgctgcggtgagctgagcttatcatggcaacccctctatgaatatatgatatgcttgttctgatcagtggtacctgaacaatctagtacttgagtttctatgcatgctgaaacattccagttatggctgtgttcacagttcaacagcttcttgtccgacactgtatagttcttttcgctgaacaatgcaagaaatgcaggcactagaatatttttgctcttcatctctaggtatggggattgaggggattaaaactctttctattcaattttgactagcaagagatttaatacccttcaatccacttgtaaccttcaatccacttctaaccgaacaagcttttataagaatgcatcatatgttctcatttctctaagaaacaatgttcatcaatatgcccattgttatgtactaatgctcaattgaggtcaaccattaccaaaagctagcaccgttaactgcatgagcattaaaaaacattagaatttgcgaatttgtacactgcgggtccactatagttcgcgagctagcttgtgctgaactccgatggagtatatgactaccgtgactattatccgcagggcaaacgcatcgagaatggcatatatttgggccccatcgggtgcttgaccttcgaagggaggctgtcatggaaaaagaaaatacttgcgttcatcttcgagcgggttcgcatcaaggtcggaccgtttggtcccctggaaatcagcctcggaagcggtgacggtggtagggagcccagcacgaaggaccccttcttcgtttggttctatgttgacgaagagatcgctgttgcgcaaggcagaggcgggggcgtagcttactggtgccgatgtcagcgtgtcccctgaagatccagacatcctcatctcgcttcaatgatcactgtacaatatcaggataaatggataatgttgagtctctagtttgtagggttcatgttcatctttgtactatctgctttgtctccgaaaacgagaaaaaaaggcaattggaggtgtaaataatgaaatgctattaaaatgatacacttatgtttgtgtagtatacggttgataatgtttgcaattaactagtaccccttccatcccataagtatacatctcatttatcagtgagtgaaact

SEQ ID NO: 75442 - DNA, 1135 bp, Zea Mays
aagagttcagcactcctctcgcgtcctcattcttcaaccgccacacaaacccctcgcttactgcacctttgcagcaccgctctctcgatcgaatcccaaggaacgaagacgacgacgatggcgtcgtctgcctgcttgctccaagcttccacggccttcgctccacgcttctccctcccgtcccgaccccagcccccgctacacctgcgtctccgcggctcccccaaccgtcgccgtggcatctcactcactgcttcctccgccgcgtccccggaagtcgagaaagagtcctcgccctcgtcctcgccgcaggaatctctgtctcgtaggctgtcgcggacagtgtgaaggtgctcaaggtggcagccaagacgaggaaagtacctgccccggaaattctctcggcgctgtccaagatcaagaaggcaaaactcgacacgtcggcattctttgagacactcggtggtaccgagtctccaggcaggacgtggatgcttatcttcactgcaaagggtcggctggagaaagggcagtatttcccagtgacagcagtccaacgcttcgatgctgcgggcaaacgcatcgagaatggcatatatttgggccccatcgggtgcttgaccttcgaagggaggctgtcatggaaaaagaaaatacttgcgttcatcttcgagcgggttcgcatcaaggtcggaccgtttggtcccctggaaatcagcctcggaagcggtgacggtggtagggagcccagcacgaaggaccccttcttcgtttggttctatgttgacgaagagatcgctgttgcgcaaggcagaggcgggggcgtagcttactggtgccgatgtcagcgtgtcccctgaagatccagacatcctcatctcgcttcaatgatcactgtacaatatcaggataaatggataatgttgagtctctagtttgtagggttcatgttcatctttgtactatctgctttgtctccgaaaacgagaaaaaaaggcaattggaggtgtaaataatgaaatgctattaaaatgatacacttatgtttgtgtagtatacggttgataatgtttgcaattaactagtaccccttccatcccataagtatacatctcatttatcagtgagtgaaact

SEQ ID NO: 75443 - DNA, 951 bp, Zea Mays
  misc_feature (950)..(951): n is a, c, g, or t
tggatgtggctgggatttgagtgaattgtggtctaagaacaagagggaaggatctttctccagacttcgcaattttggacgacgaggttttgtgttatctggtttgtcgggatggatgccaaaaagttcctgcagctggtcgaagagaagaaaaggaggatcctcgagaagaaagaagccccactaaagtggcagcagaagctagaagcagcagttaacgtcaaagctgatgcagaagcgaaggcgaaaaaactaaaatcaagaaagcataggaggagaggagattcttcctcggactctgacagtgactatgacagcgatgttgatcggaaacaccggaggaggaaggatcgtagaaggaacaagaagcatgagcattctgactctgatgatgccaggagaggcaagcgtaggtccaaaaagggctcagactcaagtgatgagagcaaccgtgaatatgaaagcgggtctgaagaagaacatacaaagaagaagcgtttgcacagaagaaggcatcacagacactcttcaaggtcagactctgaagacaacagtgatgaggaagagcggagatctgccaaggaccattctcagccccgcagacgccaccatcagtcttctgatgatggctcggacaaggtcaggttgagacatgggaagcgtctgagatcaagtgacgagaatgctcggccagattccaacagccataagcatctcaggagccaatccttggaggagtcatcagatgatagagatgatgatggaccagagaagataagaaatggcaaaaggtatcacaagaatcatcaccgtcaccaccatcatcatcgtcaccatcggcaccaccatgaaagacataataactcagcagaacctaatgacaggaggcaagtactgaaagatgaccagagggcccttgaaggtagcagtgcagactgaaggtatccacnn

SEQ ID NO: 75444 - DNA, 1012 bp, Zea Mays
  misc_feature (1011)..(1012): n is a, c, g, or t
gtttcctcccgcatgaagaaatcgttgaattttgaaagtatatgatgctatgatggtagcgcgtttgggttccagatcggggtgaattgtggtctaagaacaagagggaaggatctttctccagacttcgcaattttggacgacgaggttttgtgttatctggtttgtcgggatggatgccaaaaagttcctgcagctggtcgaagagaagaaaaggaggatcctcgagaagaaagaagccccactaaagtggcagcagaagctagaagcagcagttaacgtcaaagctgatgcagaagcgaaggcgaaaaaactaaaatcaagaaagcataggaggagaggagattcttcctcggactctgacagtgactatgacagcgatgttgatcggaaacaccggaggaggaaggatcgtagaaggaacaagaagcatgagcattctgactctgatgatgccaggagaggcaagcgtaggtccaaaaagggctcagactcaagtgatgagagcaaccgtgaatatgaaagcgggtctgaagaagaacatacaaagaagaagcgtttgcacagaagaaggcatcacagacactcttcaaggtcagactctgaagacaacagtgatgaggaagagcggagatctgccaaggaccattctcagccccgcagacgccaccatcagtcttctgatgatggctcggacaaggtcaggttgagacatgggaagcgtctgagatcaagtgacgagaatgctcggccagattccaacagccataagcatctcaggagccaatccttggaggagtcatcagatgatagagatgatgatggaccagagaagataagaaatggcaaaaggtatcacaagaatcatcaccgtcaccaccatcatcatcgtcaccatcggcaccaccatgaaagacataataactcagcagaacctaatgacaggaggcaagtactgaaagatgaccagagggcccttgaaggtagcagtgcagactgaaggtatccacnn

SEQ ID NO: 75445 - DNA, 1432 bp, Zea Mays
ccaccgcctgcgaccgcgtgctcctcattgggtttggcttcttggactgatgggcgaccatctcgcgttgatcgtggaccggctgctgacagagtcgacgctggaggcggcgatcggcggtgggaagcacatggtcgatctgcgtcaggagacggtggatgtcgagtactgccatcgcgggctaggcggcggctcggcgaccaaggtggtggagtgcaggatttgccaggaggaggactgggacacctgcatggaggccccctgcgcctgttgtggcagcctcaagtatgcgcatcggaaatgcattcagcgctggtgcaatgagaaaggcgacactatgtgtgaaatatgcctgcaggtaagaacttttaggagatctatgcatattgtttataggttagaaaatttcaactggtgatacagttttaagttttaacatatgtgcaactatggaaacatgcctatggatttaattttgatatgtttctttagcaattcaggccaggttatacttctccacaacagctgtttcactatggaagtataccaatgaatttcagagggaactgggagattgccaggcaagatctcaatgattcccagataataacaatgatgcccacggagcgtgattttatggacaattacgatgactactttcctatcaggacaagaagcagcaccttgtgttgccggacaattgccataattttcatgtcactcctggtccttcgccacactcttcctcttgtgattggtgacaatggggagtactcattggccttattctcgcttctggtgctgagaactgcgggaatcctctttccaatcctggtgatggtgagagcattggcaagcttccatcatcgacggcggcagcaggaaagccaggaagcatatatatcttcatcagagagcgaggaggaagaggaagagtatacagttgccaattctgcacaaacaaactactcgcaaccgcgcttcataccagtctactgacatggccaagaacaagccttccaacctcacatctgacagggaattccagcgcctgagtttagctgacagatgcaaggatgaatggatgatcacaaggggggaaattacaaaattgtgaatgtggtgacatagtaagatagcctgaagccactcgcttctatgcccatagagaagaatgtagtggccctgctacttgtacataggagagagtacagcagcagagtgctgacaaacccggatactgtgactcgagtctctactgcagtaacccttgtgcactgctctccccgtctcaaattatttgttatgaccttacgtagtttttgttatgcatctagatatcaactatatctagatacatcacaaaaatatttacctaagaaagttaaataatttataatttgaatttaaggtcctctttatttactctata

SEQ ID NO: 75446 - DNA, 1752 bp, Zea Mays
ctcttctaatttaaacctctgctgcaagggagcgagagagagagagagaggagaggcacacagcgcgcagagagactagagagagagggtttgtcctcctgcctgccttggcttggctagcttggcctcccctccacctccatcggtgtattacatccgagggcactccatctcttgcgtcccttaacccctccaccaatccaatccaatcccttaaccccgcaccgaatccagacttcgaagcttcctcttcctcccggtcccggccccggccccggccccggagccctgttcttggtacttaggacaaggactgatgggcgaccatctcgcgttgatcgtggaccggctgctgacagagtcgacgctggaggcggcgatcggcggtgggaagcacatggtcgatctgcgtcaggagacggtggatgtcgagtactgccatcgcgggctaggcggcggctcggcgaccaaggtggtggagtgcaggatttgccaggaggaggactgggacacctgcatggaggccccctgcgcctgttgtggcagcctcaagttcctttcttgcagtatgcgcatcggaaatgcattcagcgctggtgcaatgagaaaggcgacactatgtgtgaaatatgcctgcagcaattcaggccaggttatacttctccacaacagctgtttcactatggaagtataccaatgaatttcagagggaactgggagattgccaggcaagatctcaatgattcccagataataacaatgatgcccacggagcgtgattttatggacaattacgatgactactttcctatcaggacaagaagcagcaccttgtgttgccggacaattgccataattttcatgtcactcctggtccttcgccacactcttcctcttgtgattggtgacaatggggagtactcattggccttattctcgcttctggtgctgagaactgcgggaatcctctttccaatcctggtgatggtgagagcattggcaagcttccatcatcgacggcggcagcaggtaatttcgttactgagctgcaccgtgtcatgcatcctgatcatgttcagttcagcagaagcagatatcgcataattgcatgtcacacctgtggaaatttctccattcgtagtagtagaaacatagatttgtatgaggcataactctcggatctagatcatttaacactgcaggaaagccaggaagcatatatatcttcatcagagagcgaggaggaagaggaagagtatacagttgccaattctgcacaaacaaactactcgcaaccgcgcttcataccagtctactgacatggccaagaacaagccttccaacctcacatctgacagggaattccagcgcctgagtttagctgacagatgcaaggatgaatggatgatcacaaggggggaaattacaaaattgtgaatgtggtgacatagtaagatagcctgaagccactcgcttctatgcccatagagaagaatgtagtggccctgctacttgtacataggagagagtacagcagcagagtgctgacaaacccggatactgtgactcgagtctctactgcagtaacccttgtgcactgctctccccgtctcaaattatttgttatgaccttacgtagtttttgttatgcatctagatatcaactatatctagatacatcacaaaaatatttacctaagaaagttaaataatttataatttgaatttaaggtcctctttatttactctata

SEQ ID NO: 75447 - DNA, 1689 bp, Zea Mays
ctcttctaatttaaacctctgctgcaagggagcgagagagagagagagaggagaggcacacagcgcgcagagagactagagagagagggtttgtcctcctgcctgccttggcttggctagcttggcctcccctccacctccatcggtgtattacatccgagggcactccatctcttgcgtcccttaacccctccaccaatccaatccaatcccttaaccccgcaccgaatccagacttcgaagcttcctcttcctcccggtcccggccccggccccggccccggagccctgttcttggtacttaggacaagacgctccgagaccctcgagattgagagctcgctcgctcgctcggtgtcttcgccagctgcccaccctccttcctgctcgtccccccgctcgcgcctcctcttcctcggactgatgggcgaccatctcgcgttgatcgtggaccggctgctgacagagtcgacgctggaggcggcgatcggcggtgggaagcacatggtcgatctgcgtcaggagacggtggatgtcgagtactgccatcgcgggctaggcggcggctcggcgaccaaggtggtggagtgcaggatttgccaggaggaggactgggacacctgcatggaggccccctgcgcctgttgtggcagcctcaagtatgcgcatcggaaatgcattcagcgctggtgcaatgagaaaggcgacactatgtgtgaaatatgcctgcagcaattcaggccaggttatacttctccacaacagctgtttcactatggaagtataccaatgaatttcagagggaactgggagattgccaggcaagatctcaatgattcccagataataacaatgatgcccacggagcgtgattttatggacaattacgatgactactttcctatcaggacaagaagcagcaccttgtgttgccggacaattgccataattttcatgtcactcctggtccttcgccacactcttcctcttgtgattggtgacaatggggagtactcattggccttattctcgcttctggtgctgagaactgcgggaatcctctttccaatcctggtgatggtgagagcattggcaagcttccatcatcgacggcggcagcagatcatttaacactgcaggaaagccaggaagcatatatatcttcatcagagagcgaggaggaagaggaagagtatacagttgccaattctgcacaaacaaactactcgcaaccgcgcttcataccagtctactgacatggccaagaacaagccttccaacctcacatctgacagggaattccagcgcctgagtttagctgacagatgcaaggatgaatggatgatcacaaggggggaaattacaaaattgtgaatgtggtgacatagtaagatagcctgaagccactcgcttctatgcccatagagaagaatgtagtggccctgctacttgtacataggagagagtacagcagcagagtgctgacaaacccggatactgtgactcgagtctctactgcagtaacccttgtgcactgctctccccgtctcaaattatttgttatgaccttacgtagtttttgttatgcatctagatatcaactatatctagatacatcacaaaaatatttacctaagaaagttaaataatttataatttgaatttaaggtcctctttatttactctata

SEQ ID NO: 75448 - DNA, 1668 bp, Zea Mays
tgaagctgttgccgggcgatgatacgatatgatatgatgtaataggataccagtgccatttcccacccattaaccttaccttgcctctcttctaatttaaacctctgctgcaagggagcgagagagagagagagaggagaggcacacagcgcgcagagagactagagagagagggtttgtcctcctgcctgccttggcttggctagcttggcctcccctccacctccatcggtgtattacatccgagggcactccatctcttgcgtcccttaacccctccaccaatccaatccaatcccttaaccccgcaccgaatccagacttcgaagcttcctcttcctcccggtcccggccccggccccggccccggagccctgttcttggtacttaggacaaggactgatgggcgaccatctcgcgttgatcgtggaccggctgctgacagagtcgacgctggaggcggcgatcggcggtgggaagcacatggtcgatctgcgtcaggagacggtggatgtcgagtactgccatcgcgggctaggcggcggctcggcgaccaaggtggtggagtgcaggatttgccaggaggaggactgggacacctgcatggaggccccctgcgcctgttgtggcagcctcaagtatgcgcatcggaaatgcattcagcgctggtgcaatgagaaaggcgacactatgtgtgaaatatgcctgcagcaattcaggccaggttatacttctccacaacagctgtttcactatggaagtataccaatgaatttcagagggaactgggagattgccaggcaagatctcaatgattcccagataataacaatgatgcccacggagcgtgattttatggacaattacgatgactactttcctatcaggacaagaagcagcaccttgtgttgccggacaattgccataattttcatgtcactcctggtccttcgccacactcttcctcttgtgattggtgacaatggggagtactcattggccttattctcgcttctggtgctgagaactgcgggaatcctctttccaatcctggtgatggtgagagcattggcaagcttccatcatcgacggcggcagcagatcatttaacactgcaggaaagccaggaagcatatatatcttcatcagagagcgaggaggaagaggaagagtatacagttgccaattctgcacaaacaaactactcgcaaccgcgcttcataccagtctactgacatggccaagaacaagccttccaacctcacatctgacagggaattccagcgcctgagtttagctgacagatgcaaggatgaatggatgatcacaaggggggaaattacaaaattgtgaatgtggtgacatagtaagatagcctgaagccactcgcttctatgcccatagagaagaatgtagtggccctgctacttgtacataggagagagtacagcagcagagtgctgacaaacccggatactgtgactcgagtctctactgcagtaacccttgtgcactgctctccccgtctcaaattatttgttatgaccttacgtagtttttgttatgcatctagatatcaactatatctagatacatcacaaaaatatttacctaagaaagttaaataatttataatttgaatttaaggtcctctttatttactctata

SEQ ID NO: 75449 - DNA, 1758 bp, Zea Mays
tgaagctgttgccgggcgatgatacgatatgatatgatgtaataggataccagtgccatttcccacccattaaccttaccttgcctctcttctaatttaaacctctgctgcaagggagcgagagagagagagagaggagaggcacacagcgcgcagagagactagagagagagggtttgtcctcctgcctgccttggcttggctagcttggcctcccctccacctccatcggtgtattacatccgagggcactccatctcttgcgtcccttaacccctccaccaatccaatccaatcccttaaccccgcaccgaatccagacttcgaagcttcctcttcctcccggtcccggccccggccccggccccggagccctgttcttggtacttaggacaagacgctccgagaccctcgagattgagagctcgctcgctcgctcggtgtcttcgccagctgcccaccctccttcctgctcgtccccccgctcgcgcctcctcttcctcggactgatgggcgaccatctcgcgttgatcgtggaccggctgctgacagagtcgacgctggaggcggcgatcggcggtgggaagcacatggtcgatctgcgtcaggagacggtggatgtcgagtactgccatcgcgggctaggcggcggctcggcgaccaaggtggtggagtgcaggatttgccaggaggaggactgggacacctgcatggaggccccctgcgcctgttgtggcagcctcaagtatgcgcatcggaaatgcattcagcgctggtgcaatgagaaaggcgacactatgtgtgaaatatgcctgcagcaattcaggccaggttatacttctccacaacagctgtttcactatggaagtataccaatgaatttcagagggaactgggagattgccaggcaagatctcaatgattcccagataataacaatgatgcccacggagcgtgattttatggacaattacgatgactactttcctatcaggacaagaagcagcaccttgtgttgccggacaattgccataattttcatgtcactcctggtccttcgccacactcttcctcttgtgattggtgacaatggggagtactcattggccttattctcgcttctggtgctgagaactgcgggaatcctctttccaatcctggtgatggtgagagcattggcaagcttccatcatcgacggcggcagcaggaaagccaggaagcatatatatcttcatcagagagcgaggaggaagaggaagagtatacagttgccaattctgcacaaacaaactactcgcaaccgcgcttcataccagtctactgacatggccaagaacaagccttccaacctcacatctgacagggaattccagcgcctgagtttagctgacagatgcaaggatgaatggatgatcacaaggggggaaattacaaaattgtgaatgtggtgacatagtaagatagcctgaagccactcgcttctatgcccatagagaagaatgtagtggccctgctacttgtacataggagagagtacagcagcagagtgctgacaaacccggatactgtgactcgagtctctactgcagtaacccttgtgcactgctctccccgtctcaaattatttgttatgaccttacgtagtttttgttatgcatctagatatcaactatatctagatacatcacaaaaatatttacctaagaaagttaaataatttataatttgaatttaaggtcctctttatttactctata

SEQ ID NO: 75450 - DNA, 188 bp, Zea Mays
cgcggtgcgcgtggggccgaaggctggacgagcggagcagccgaggcgtggggccgaagggtggaggagccgaggtgcagggtcggaggggtggaggccatgcagtggaggagcggacggcggagaagcggacgagcggggaaggcggagggggagtcggccgcgggttccgtgaaggggcggcggcg

SEQ ID NO: 75451 - DNA, 662 bp, Zea Mays
aaaagtgtttgacatgctaatttccgcaagtcatcctgtctattttgctccaataatgtctctacaattgttagcaagctgttggcaaaaagtggcctgcaaatcaatggcttcacccattacagtaattgttcatgtttataaactaattcttattaaagttccaataaaaatgagtaagagcacgttatacgaaaaagaactaaatttttgctccaagtacaaattcaaatggtgtcatagagcaaggtccatcaaaattgacaaaaacaaataacaatcattgaagaaaaaattagaaactgtcagaagagagcaaattataacgctttgaaactataaatgtgtggcatatgcaaaagagaaaatgcatatatgtttacaagtagaaaaacttacaactgctcctgacaagaacatatcacctttcgatagattgccataacaactttcactgaaccatagcgctcagccctaaattccttgtagcatttttgctctaagtaaactgtaatctgtaatgggacttcacgatggttttcataattgaactcatgttacacttaaaactatacgggcaaagcataaaaggaaataaacctttggaacacgcataggattccttgaaatatattcgcacagtttccctatcttgcgatcat

SEQ ID NO: 75452 - DNA, 476 bp, Zea Mays
accagatttctccatcacaatctgcatatccagcaggacacacagcgcaaatcctttagaaggtgaccatagattgttattatcaaaataacgaaatatagcttccagaactcgtcgcgttgttgttgtttccctggatattctagcaaggttatgtagacaaatccctgaccaaaaatttgggcttgttgattcttctctgtgggaaaatagtttagaagagataatatattagataaattcataaagtacaaaactttcaagtattccatatgcccgaagtttatttacattgtcaaacttaattcaccatgaacagctctaataactttccatgaaggaaccctggtcaaaatggtaacagcaggaggttcatgaccttcggctttgagcacttcatccacccactgagttcgaatatcctcaacagcagcatcattatcagcatttgcatatgggctctcataattttccag

SEQ ID NO: 75453 - DNA, 704 bp, Zea Mays
gaccttttcctgatatgaagttggttcactcgaagtacttgtatctgtggaagaggggagagaaatatctcttgtactaaccatcctttgaatagtctgtgacttgaataattttgcatcatttgcactgatctcatttgcattctcactgatgggcagtagctttgtgttatcctggagtgcactttcacgaaatgaaagcatatctcttttaagtttcccaaacaaagcagcagaagatgaaaacactgatgttgttctagataatgtccttcggagatcaatcttccttgtctgtgaagtgtctgcaaatgaaaacggagcaacggaagagggaacaagaacaacagagaaaatccgatgtgctcctaaatgtgtctcacaatctggatagagcattgctaaaagaagttgatgaaacaacgcctcaggaaatgcctacagtgtgtagtatatcacttaaagagctggtatagttagcagaggatgcagaataatattgttaatcaacctactttgctctgatgtgacaagtttggcaatgatgcaactatttgagcagtgcgatatgctgcagagatagtagaccgtgcaacaatcatagaactcgaaatattttccagtactacagctaacgtatcaaggataggtccagcatcaccgacctgaagaggataaaaaaagttgaacaaattatccataga

SEQ ID NO: 75454 - DNA, 2880 bp, Zea Mays
tgaactactagtttctattaatattttacacatatacccgctatatatacatgtaggcccctgattgtattcagcagtatttgatcctttgggatgctgtggacactggacagccttgttttaactcatgaggatgaaaacttctggaggcatgaggctagtggaagctactcctccaagctttgttataaagcttttcaggggttctattacctttgaaccttgaaaaagggtttagaagacctgggctccacctaagcgtaaaacattcctttggttggctattaagggtgtgtttggttctgcttttagaacctgcttctgcttcgaaaaagtagaaagttgaaccaaagggctcccatctggtccctgctttttccaccgcaactgcttttctgtagttcaactcacgaagcaggcagacagccagacccctgcttttccagcggtggcagcgaaccaagttcgaagacattaaccacatgctatcgattaaggggtaccgaacggttatttccctttcttcctctatttatctatatggacttatttatttatctaatatatattttaattattaagttattttaaatttatttcctagttatctatatgtatgtaatattataattatgcgtcgatcgatccctgaggatctccagggtaggtgttttaactgtctggcctcctctcatcgggcggcggattgccgacgttcggtgcgctgctttacatgttgggggctcggacatcgtgcagttaagtgcaaggttcgtgctacgccggtgatcaaagcttcagtatcggtgtgggatcgtcttggccctcagctggttcacaagcctgtggacattcctagacgcgccatggagtggcgcagggtctcttcgccgatcccggccatccagagggccggtgtggctgatcctaccttgggtggcgcgaagaaacgccgccatcgtacgcggggtcgaaggcctaagaccgcccccgttgcaccttcggaggattcccgtgaagttgcacctccacccggttcctcttccccagagccggtcagggtgcatgcccctcaaccggttgttcctgatatggtggaagccactcatctctgcattttggaccgtgcggatgcgcttgctagagaagaactgcggttgcgacggtgtgctctgtttgtcgttgtcactggttcaagaccgagggtggctgctgagactcttgctgatgaggtggctgctggttttgggctggatgcgtcgtccttctccgttcatcgttcgtgcccagaagattttgtcttgatcctgaattcggaagagttggctaatcaggtgtacaacaatggtgttgttttcgattctccttctgggtctttcaagttcctgaggtggtctagacttgcccatgccgaggtggtggcctttccatcccctgttcttgtggagttcaaaggggttccaattcatgcttgggatttggctactgctcagaatttgttgagggatcactgcactgatgtggagctccatcctgacacggtgaatcgacacgacttctcctccttcaaggtttttggatggtgccgacgtccacacctcattccaaatttggtggagctccttgttccggaacctttgatgatgacgcctggttctacctctcctgagagaagattgctcgcttaccaagtgactgcccatgtgtctctgatctctccgccggtgcatagcgctgctgcacctccgccgccgacgtttgatgatgatcaggacaacgggactcgtaggcgcaggctcaacagttcagtccagatggggcatgctgagtccggggaagcacttgcagcacgaaggcccgtccgtgaaaggctgggtgttgccccggtctctgttcgacaagtggaggctgggttgtccgtgaaagactcggcgtcttccgttgccttggttactggggaaacgcatacagaagctgtggagccggtgattggctgcattgatactgggctgagtctggccggtgttgacgttgactcttctgttccggcggtggagactttgagtgcatctccatccctcccgggtggtcctaccatcgctacccgtgtggggactgtgttgaagccgtccatgaaggctgttggggcagggctcaggatgtggccttgttcccccatcaaatatttcaaaaggaagcgtagaggggctgctgctcaacaatcccctctctcggctgctcagtcagcgacctccgctgatttcattgccagaatgtccaggcctgccgctcgggtcctgtgtgtgtcgcagaagcagaagcggcagcgtcgccccagggcacctcgtgagggggctcttcctcgacgaagcaggcgcttggcttgagcagatgttgaaaaggtaatgaccccagcacaagtttcgaaaggaaaatggaggattgctaatgagctcggccttcttggtggggatccatctgaatcgctgtccctaaaggttctcgataactatgccaaggtttttggtgagcggttgactgatttgcaagttaaagctcttgcggctctattcaactggactgtcccagaagacttgcagggtgcagtggtgcaggcctgatcgcccctgtgtgtattgatggtcgttttttcaatgtttttccaaatggatccgtcaaaaattgtatgctggaacgtgcggggtcttaatggctcggcccgtcaggatgttgttcgttgtttggtggactcagtcaaagctgatgttgtttgcctccaggaaacaaaaatgtcagttttttctcgcttgtttgtgttccggttgcttggatctgagtttcagaattttgttttcacaccttcagttggggctagtggag

SEQ ID NO: 75455 - DNA, 726 bp, Zea Mays
atcttcttttgaaccatagagtttcgtgcaggactcattagcactatcaagagcctgcaatctacagtcttctattaaacaaagaaatggatcaacctgcaacaaggcacatagaaaataacaggagaattatataataatctcatttcttggaccaatggtccaccgctgctgaacagcccactcgagatcaatttgtaatagacaggtctgtaaagtagtaggttaaatagttctgtacttgctttcaatgaaagaagggcaacaattgactcaataacttctaaactgcgataagcaaaaataggccagtctggcccaattagacatgccctgacagatccaataagaacttcaacatgagccctggtagtacttcctgagaccctgaacatgaaatctcaggcctgaaagcaaaaggagagctttgctggctcaggcatgggaagatgttccaagcccaaaggtcgtctgcggcctgggatctgctcaggttggattggaatttgagtgtttcgtaaacatgtctttagctggctaatacagtgccaaaattcactgtggactttttagtcgcctgtatggttcacatacatgacttcaccgcaaatactaatgaagcaaggaactgtgtttcacttactgtactttctgtcaacacttgcttcacaactggaatgagcgcaagaacgttaaaagctttcgaaaaaaacacgagcattgaag

SEQ ID NO: 75456 - DNA, 682 bp, Zea Mays
ttaggattgaaaacgcacctgcaggcaggccctgaagcgattcatcatttttcactcttttttgtttatattttgagaaataaaatgggttgattctctgcccctcatcatccgtcgtttgctaataattagtacaaagcatgagagagagatagaatggttctgtcaaaagcaatgaaataaactcaatgatgcaccccctatatttcccatgcatggtagacgagaaccatttacaaaacagggaaatcatgtcatctggcactcacacacgacagcacatattttagcatgcatgagctctggaaccaccaatttttaggcgtccactgaacacgttcttggttatagagatccacatcgcagaagagatcatcttagcacccagacgttgcaaggaaccggtcgtagggacacagcgctggcagcttacaggaattggggtgccattgttcatcagctgtgcagagaaacgtatctgcttgaggatcctgccgagatgactgctcgacggaagattcaccagcctgaaagttaagaaccttgtgagcacatgcacatttagttccacctgggttgaatctcaatatctcattttaaattcacctgtcagataaaatattgaaaccgcaactttttaaaggaaatgcaaaataaaaataagtggcaaaaatgtactcag

SEQ ID NO: 75457 - DNA, 1556 bp, Zea Mays
ccttgattgatttctgttaggtttcaactctacaccaacttgtttgagactaaaaggatttattgttattgttgttgttgttgcttaactgatattggagaagcattattgttcaatacttgaaatttgctacatgcatgcctatatgacacttttgtctcgaacaggcagggaaattgtatcattgaaaaagaagaaataactataaaacatttgaggacaaatgttaagatttatatttggatctgtgttttggcgaatgggaaaatctcaaacatccatacaagacaggatgggactacttcaggtggctgccataaacacagcaatggctgcattgacaaagactgtgggagttttcccaaaagaacggagtatagttgacagagaacgagcaaaaggttcctatgcacttggaccatatctttcatctaagttgttggctgagattcccattggagcagcatttccattgatatttggatcaattctctatccaatggctaaacttcacccaacattttctagatttgccaaattctgtggtattgtgactgttgagtcatttgctgcatcagcaatgggtctcactgttggagcaatggctcctacaactgaagctgcaatggctcttgggccatcccttatgacagtgtttattgtatttggaggatactatgttaaccctgacaatactccagtcatatttcgttggatcccaagaatatctctcattagatgggcctttcaagggctttgcattaacgagttcaagggtctgcaatttgagcaacaacattcatatgacattcaaacgggtgaacaggccttggaaaggttttcattgggaggaattcgaattgcagatactctggttgcacagggtaggattctgatgttctggtactggtcaacctaccttcttctgaagaaaaacagaccgaagtatcagcagctccttccaccattggaacaagataaaaataagccgcaggtggaataagcttttcatttgcagacttcgaaagaataaattaaggtagggcatctttgaatcaatcatttctttgcagtggtcctaattcaacaaaaaggctttatgtggggggaacatattgcaattagcaacgcaatcaatgtactatattgaatctccattacttctatacctttctgttcgttatcgtttccttcactaagtttttctcatgggaaaattatcgccaataaaacttgccctgggccctggttagagttaatggaatatgaactcccagtctcatgatgacagttctgccatgatatagttattacagtatctggttattccctatagtttatagttatttcagtgtctggttattccctatagcccctgtttgtttcggcttttcgcagcttctggccaccaaaagctgctgcggactgccaaacactcagcttttcagtcagtttctataaaattcgtttgggtaaaaaccattcaaagtcaacataaatatataatcggttgagtcgtcgcaatagtagtaatccgtcactttatagatcctgag

SEQ ID NO: 75458 - DNA, 2764 bp, Zea Mays
atgccgcaacaaactcatcacgaccacacaaactggcggaactgctctcagctctcctcacgccttgcagaagcgcagaggctaaacccccgtctaaccctgctgccgcttgccactactccgcttcgttctccgccgcctccccggacgtccggaaacttctagattgaagggggatagccattggcgtcagcgtgtgtgatggaggtcaggggactggggcagctcctggcggcgctggccgcggcgttcttcgtccgcgccatcgcgggacccggtcccgccctccttccgccggcggaggacacggagaccgacgaggccgacgcggaggctggcgagggaggtggtggtggtgtgccgcccgtgaccatccggtgggctcgcatcacctgtgcattgaagaacaagcgcggggaagtggcaaggtttctgttgtcaaatgtgtcaggggaggcgaaaccggggaggctgcttgcactaatggggccatcgggctctggcaaaacaactttgctcaatgtgctagcagggcagctcgccgcatcgtcttccttgcacctttccgggtttctgtatatcaatggtcggcctatctcgaagggcggatataagattgcttttgtcaggcaggaagacctgttcttctcacagctcactgtgcgggagacgctctcacttgctgctgagctccagcttcctgacttgtgggctcctgagagaaaggagagctatgtcaatgatcttttgttacgtatggggttggtcaattgtgctgattctattgttggtgatgcaaaagttcgtggaataagtgggggtgagaagaagcgcctctcacttgcatgtgagttgattgctagcccttcagtcatctttgcagacgaaccaacaacaggccttgatgccttccaagctgagaaggtcatggagactcttcgtcaacttgctcaggatgggcacactgttatctgttcgatacaccagccaagaggttcagtctatggcaaatttgatgacatcgtactactgtcagatggagaaactgtatacatgggacctgcaaaagaagaacctctaacatacttctcatcattagggttattgtaccagtgtccagatcatatgaaccctgccgagttcttggctgatctcatttccattgattatggctcaactgaaagtgtacagtcatcacagaaaaggatcgagaatctcattgaggcgttttctaacaaatctgtggtcactgaaggtaacaatttaattgcaattccagaggatcctgaattgtctgccaaacttgttcggaagactacagtgaagaaaagacatggttggtggaggcaatttcgtttgctttttaagcgagcatggatgcaggcttttcgtgatggaccaacaaacaaagtgagatcacgaatgtctgttgcttcagcagttatatttggatctgtgttttggcgaatgggaaaatctcaaacatccatacaagacaggatgggactacttcaggtggctgccataaacacagcaatggctgcattgacaaagactgtgggagttttcccaaaagaacggagtatagttgacagagaacgagcaaaaggttcctatgcacttggaccatatctttcatctaagttgttggctgagattcccattggagcagcatttccattgatatttggatcaattctctatccaatggctaaacttcacccaacattttctagatttgccaaattctgtggtattgtgactgttgagtcatttgctgcatcagcaatgggtctcactgttggagcaatggctcctacaactgaagctgcaatggctcttgggccatcccttatgacagtgtttattgtatttggaggatactatgttaaccctgacaatactccagtcatatttcgttggatcccaagaatatctctcattagatgggcctttcaagggctttgcattaacgagttcaagggtctgcaatttgagcaacaacattcatatgacattcaaacgggtgaacaggccttggaaaggttttcattgggaggaattcgaattgcagatactctggttgcacagggtaggattctgatgttctggtactggtcaacctaccttcttctgaagaaaaacagaccgaagtatcagcagctccttccaccattggaacaagataaaaataagccgcaggtggaataagcttttcatttgcagacttcgaaagaataaattaaggtagggcatctttgaatcaatcatttctttgcagtggtcctaattcaacaaaaaggctttatgtggggggaacatattgcaattagcaacgcaatcaatgtactatattgaatctccattacttctatacctttctgttcgttatcgtttccttcactaagtttttctcatgggaaaattatcgccaataaaacttgccctgggccctggttagagttaatggaatatgaactcccagtctcatgatgacagttctgccatgatatagttattacagtatctggttattccctatagtttatagttatttcagtgtctggttattccctatagcccctgtttgtttcggcttttcgcagcttctggccaccaaaagctgctgcggactgccaaacactcagcttttcagtcagtttctataaaattcgtttgggtaaaaaccattcaaagtcaacataaatatataatcggttgagtcgtcgcaatagtagtaatccgtcactttatagatcctgag

SEQ ID NO: 75459 - DNA, 3322 bp, Zea Mays
ctcccatctcgtggctcatgggtcatgccgcaacaaactcatcacgaccacacaaactggcggaactgctctcagctctcctcacgccttgcagaagcgcagaggctaaacccccgtctaaccctgctgccgcttgccactactccgcttcgttctccgccgcctccccggacgtccggaaacttctagattgaagggggatagccattggcgtcagcgtgtgtgatggaggtcaggggactggggcagctcctggcggcgctggccgcggcgttcttcgtccgcgccatcgcgggacccggtcccgccctccttccgccggcggaggacacggagaccgacgaggccgacgcggaggctggcgagggaggtggtggtggtgtgccgcccgtgaccatccggtgggctcgcatcacctgtgcattgaagaacaagcgcggggaagtggcaaggtttctgttgtcaaatgtgtcaggggaggcgaaaccggggaggctgcttgcactaatggggccatcgggctctggcaaaacaactttgctcaatgtgctagcagggcagctcgccgcatcgtcttccttgcacctttccgggtttctgtatatcaatggtcggcctatctcgaagggcggatataagattgcttttgtcaggcaggaagacctgttcttctcacagctcactgtgcgggagacgctctcacttgctgctgagctccagcttcctgacttgtgggctcctgagagaaaggagagctatgtcaatgatcttttgttacgtatggggttggtcaattgtgctgattctattgttggtgatgcaaaagttcgtggaataagtgggggtgagaagaagcgcctctcacttgcatgtgagttgattgctagcccttcagtcatctttgcagacgaaccaacaacaggccttgatgccttccaagctgagaaggtcatggagactcttcgtcaacttgctcaggatgggcacactgttatctgttcgatacaccagccaagaggttcagtctatggcaaatttgatgacatcgtactactgtcagatggagaaactgtatacatgggacctgcaaaagaagaacctctaacatacttctcatcattagggttattgtgctacacccttccctttccttccagtcttttcttaagtattttattatcatgatttctacttgatttgaatgtgtttttgtctatatacttttgtgtgtgctcactttttggcttgcctgatctagcatagcataataaataattcatttccaatcctgaacagtgaacatgtaccccttctcaaacctattttgttttgagtataacaaaacaatctggccttgtggtgtgcactttcattgtttgcatttccaataaaactaattacttcatgtcactgactacatttattcttattgtccttgtacacatcaaaattccaatattagctatgctgaaacttttgaaggttaattgttgcatgtttgtaccatgcacatgcagaatgcctctggtctctgtctatttgggttttgatcaataagaaactgtgccttttcttttgttacataaatggccaatataccatgatgctgattttaattttgttactatcgcccattgataacttgagttttgatgatttattaggtaccagtgtccagatcatatgaaccctgccgagttcttggctgatctcatttccattgattatggctcaactgaaagtgtacagtcatcacagaaaaggatcgagaatctcattgaggcgttttctaacaaatctgtggtcactgaaggtaacaatttaattgcaattccagaggatcctgaattgtctgccaaacttgttcggaagactacagtgaagaaaagacatggttggtggaggcaatttcgtttgctttttaagcgagcatggatgcaggcttttcgtgatggaccaacaaacaaagtgagatcacgaatgtctgttgcttcagcagttatatttggatctgtgttttggcgaatgggaaaatctcaaacatccatacaagacaggatgggactacttcaggtggctgccataaacacagcaatggctgcattgacaaagactgtgggagttttcccaaaagaacggagtatagttgacagagaacgagcaaaaggttcctatgcacttggaccatatctttcatctaagttgttggctgagattcccattggagcagcatttccattgatatttggatcaattctctatccaatggctaaacttcacccaacattttctagatttgccaaattctgtggtattgtgactgttgagtcatttgctgcatcagcaatgggtctcactgttggagcaatggctcctacaactgaagctgcaatggctcttgggccatcccttatgacagtgtttattgtatttggaggatactatgttaaccctgacaatactccagtcatatttcgttggatcccaagaatatctctcattagatgggcctttcaagggctttgcattaacgagttcaagggtctgcaatttgagcaacaacattcatatgacattcaaacgggtgaacaggccttggaaaggttttcattgggaggaattcgaattgcagatactctggttgcacagggtaggattctgatgttctggtactggtcaacctaccttcttctgaagaaaaacagaccgaagtatcagcagctccttccaccattggaacaagataaaaataagccgcaggtggaataagcttttcatttgcagacttcgaaagaataaattaaggtagggcatctttgaatcaatcatttctttgcagtggtcctaattcaacaaaaaggctttatgtggggggaacatattgcaattagcaacgcaatcaatgtactatattgaatctccattacttctatacctttctgttcgttatcgtttccttcactaagtttttctcatgggaaaattatcgccaataaaacttgccctgggccctggttagagttaatggaatatgaactcccagtctcatgatgacagttctgccatgatatagttattacagtatctggttattccctatagtttatagttatttcagtgtctggttattccctatagcccctgtttgtttcggcttttcgcagcttctggccaccaaaagctgctgcggactgccaaacactcagcttttcagtcagtttctataaaattcgtttgggtaaaaaccattcaaagtcaacataaatatataatcggttgagtcgtcgcaatagtagtaatccgtcactttatagatcctgag

SEQ ID NO: 75460 - DNA, 2238 bp, Zea Mays
cgatgaacccatcagaagcattcaggtcccgtgccaagaatgcagcagctgggacggttgggtcgccggcgaacggcggcgacagctcgaagcagacatcaggtgtgaggcaccttcaagcttagtcgggcggcctgcaagatcaaggtgcatggtcgtcgaaggatggcgacggcgtatcctcgtcctcgttcgggcaaggcgaatcaggcaggcatctatttggaggtccagtaagctcgttcgaggagaagcagagagatgatgccgttcatgagaaggatgatgatgacccacgtgctggagttgctgctcttcctcccttgtcatcagacatcatgcaggaatcaggaggaggtcttgaagatctggaactgcaggtgcagaatgctattgcagcagcagcagctgcagctccacccaaggaaagcaatagtgtcagcagcaacgatcctggcagctcgtcctctgagatttttccgtctggtccaggaccagctgatcaagtccctgttcctgctacctctccagaaattgagcccctttttgcaaaccaaattcctgctgcttcttcggaggttaaggccgcccctccatttcatttggatccacctgtcgctgacgctgaggccaagcaaacagcgccgctgcgggagtggaagccgctgtgcgacctgacgtcgaaccgtcgcatcgactggtgcgagctggagggcgacgtccgcgtggtcggcggctccaacggcagcgtcaccctggtggcagcccctggcgcggacgagcgcagctttcacgaggagtcgtggagcatcaagccgtacccgcgcaaggcggacccgaacgccatgcgcagcgtgcgcgcgctggcggtgcggtcggtggccacggcgccgccggtggcctgcacggactggcacggcgtgccggcgctggtgttctcggcgcgcgggtacacggggaactacttccacgcgtacacggacgtgatcctgccgctgttcctgacggcgcggcagtacgcgggcgaggtgctgctgctggtgaccggcttccaggcgtggtgggtgggcaagtacctgccggtgttccggagcctgtccaactacgagccggtggacctggaccgggaccgggacccgcgcgtgcgctgcttccgccgcgtccaggtggggctcaccagccacgacgacttcagcatcgacccgcgccgcgcgcccaacggctactccatgctggacttcacccggttcatgcgcgccacctacgggctcccgcgcgacgccgtgccgcggcgggggcgggggcggccaaggccgcggctcctggtgatcgcgcgcgcgcgcacgcggcggttcctcaacgcggaggacatcgtgcgcggcgcgcggaaggtggggttcgaggtggtggtgtcggaggtggcgcaggaggtggcggcgttcgcggagctggtgaacacgtgcgacgcggtggtgggcgtgcacggagcggggctgaccaacatggtgttcctgcccccgggcggggtggtcatccaggtgctgccgctgggcccgctggagttcgtggccagctacttccggggcccggccagggacatggggctcagctacctcgagtaccgcatctcgccggaggagagcacgctgctggaccagtacccgcgggaccaccccgtgctcacggatcccatgagcgtccaggccaaggactgggtgtccttcatgggggtctacctcttcaagcaggacgtccgcctcgacatgaagcgattccgccctgtcctcaagaaggcactcgcgcgacttagagccaaacccaggaataacaacaacaaatgatcgatcgatgatcacatcatcgtccgtcccagtgtaattttggtacctcctgcttcctctgatctgtaggtaactcgatctttattttgaaccgagagctttcactcttctaattaatatatatagtctccgtcattgagccgatcaaggtacacgcacattttgtacaccgtctctgccacgttgccatagcagatcgttatatatatatgcacatgataggtcaactacctacatgctatacgttgtactattttatgcggcaaacttccaatataatggacctcgaaagcggagaaatatgtgcaggcacacacattattaaaagatattgtcgctctcgatgatttgcatgcattaattgccacggcaagatgactgcaaaggaacatggaat

SEQ ID NO: 75461 - DNA, 2311 bp, Zea Mays
gtcaaactcgacgccgtccgcatcgtcatgagcaagcaaccgatgaacccatcagaagcatagtcaggtcccgtgccaagaatgcagcagctgggacggttgggtcgccggcgaacggcggcgacagctcgaagcagacatcaggtgtgaggcaccttcaagcttgtacgtacagtacagatactaagtagccagcagtgacagtcgggcggcctgcaagatcaaggtgcatggtcgtcgaaggatggcgacggcgtatcctcgtcctcgttcgggcaaggcgaatcaggcaggcatctatttggagtaagctcgttcgaggagaagcagagagatgatgccgttcatgagaaggatgatgatgacccacgtgctggagttgctgctcttcctcccttgtcatcagacatcatgcaggaatcaggaggaggtcttgaagatctggaactgcaggtgcagaatgctattgcagcagcagcagctgcagctccacccaaggaaagcaatagtgtcagcagcaacgatcctggcagctcgtcctctgagatttttccgtctggtccaggaccagctgatcaagtccctgttcctgctacctctccagaaattgagcccctttttgcaaaccaaattcctgctgcttcttcggaggttaaggccgcccctccatttcatttggatccacctgtcgctgacgctgaggccaagcaaacagcgccgctgcgggagtggaagccgctgtgcgacctgacgtcgaaccgtcgcatcgactggtgcgagctggagggcgacgtccgcgtggtcggcggctccaacggcagcgtcaccctggtggcagcccctggcgcggacgagcgcagctttcacgaggagtcgtggagcatcaagccgtacccgcgcaaggcggacccgaacgccatgcgcagcgtgcgcgcgctggcggtgcggtcggtggccacggcgccgccggtggcctgcacggactggcacggcgtgccggcgctggtgttctcggcgcgcgggtacacggggaactacttccacgcgtacacggacgtgatcctgccgctgttcctgacggcgcggcagtacgcgggcgaggtgctgctgctggtgaccggcttccaggcgtggtgggtgggcaagtacctgccggtgttccggagcctgtccaactacgagccggtggacctggaccgggaccgggacccgcgcgtgcgctgcttccgccgcgtccaggtggggctcaccagccacgacgacttcagcatcgacccgcgccgcgcgcccaacggctactccatgctggacttcacccggttcatgcgcgccacctacgggctcccgcgcgacgccgtgccgcggcgggggcgggggcggccaaggccgcggctcctggtgatcgcgcgcgcgcgcacgcggcggttcctcaacgcggaggacatcgtgcgcggcgcgcggaaggtggggttcgaggtggtggtgtcggaggtggcgcaggaggtggcggcgttcgcggagctggtgaacacgtgcgacgcggtggtgggcgtgcacggagcggggctgaccaacatggtgttcctgcccccgggcggggtggtcatccaggtgctgccgctgggcccgctggagttcgtggccagctacttccggggcccggccagggacatggggctcagctacctcgagtaccgcatctcgccggaggagagcacgctgctggaccagtacccgcgggaccaccccgtgctcacggatcccatgagcgtccaggccaaggactgggtgtccttcatgggggtctacctcttcaagcaggacgtccgcctcgacatgaagcgattccgccctgtcctcaagaaggcactcgcgcgacttagagccaaacccaggaataacaacaacaaatgatcgatcgatgatcacatcatcgtccgtcccagtgtaattttggtacctcctgcttcctctgatctgtaggtaactcgatctttattttgaaccgagagctttcactcttctaattaatatatatagtctccgtcattgagccgatcaaggtacacgcacattttgtacaccgtctctgccacgttgccatagcagatcgttatatatatatgcacatgataggtcaactacctacatgctatacgttgtactattttatgcggcaaacttccaatataatggacctcgaaagcggagaaatatgtgcaggcacacacattattaaaagatattgtcgctctcgatgatttgcatgcattaattgccacggcaagatgactgcaaaggaacatggaat

SEQ ID NO: 75462 - DNA, 2308 bp, Zea Mays
cctcgtgacctgcgcctactacttctccaccgtcaaactcgacgccgtccgcatcgtcatgagcaagcaaccgatgaacccatcagaagcatgcaaggatccactcgaaccgagctctctcgcacactctctctgcatttgcctcttgtgatcgcttcttgtaaggcttgttgactaactgtgctgtaatctctcttatatatgtttcttgatgcagtcaggtcccgtgccaagaatgcagcagctgggacggttgggtcgccggcgaacggcggcgacagctcgaagcagacatcaggtccagtaagctcgttcgaggagaagcagagagatgatgccgttcatgagaaggatgatgatgacccacgtgctggagttgctgctcttcctcccttgtcatcagacatcatgcaggaatcaggaggaggtcttgaagatctggaactgcaggtgcagaatgctattgcagcagcagcagctgcagctccacccaaggaaagcaatagtgtcagcagcaacgatcctggcagctcgtcctctgagatttttccgtctggtccaggaccagctgatcaagtccctgttcctgctacctctccagaaattgagcccctttttgcaaaccaaattcctgctgcttcttcggaggttaaggccgcccctccatttcatttggatccacctgtcgctgacgctgaggccaagcaaacagcgccgctgcgggagtggaagccgctgtgcgacctgacgtcgaaccgtcgcatcgactggtgcgagctggagggcgacgtccgcgtggtcggcggctccaacggcagcgtcaccctggtggcagcccctggcgcggacgagcgcagctttcacgaggagtcgtggagcatcaagccgtacccgcgcaaggcggacccgaacgccatgcgcagcgtgcgcgcgctggcggtgcggtcggtggccacggcgccgccggtggcctgcacggactggcacggcgtgccggcgctggtgttctcggcgcgcgggtacacggggaactacttccacgcgtacacggacgtgatcctgccgctgttcctgacggcgcggcagtacgcgggcgaggtgctgctgctggtgaccggcttccaggcgtggtgggtgggcaagtacctgccggtgttccggagcctgtccaactacgagccggtggacctggaccgggaccgggacccgcgcgtgcgctgcttccgccgcgtccaggtggggctcaccagccacgacgacttcagcatcgacccgcgccgcgcgcccaacggctactccatgctggacttcacccggttcatgcgcgccacctacgggctcccgcgcgacgccgtgccgcggcgggggcgggggcggccaaggccgcggctcctggtgatcgcgcgcgcgcgcacgcggcggttcctcaacgcggaggacatcgtgcgcggcgcgcggaaggtggggttcgaggtggtggtgtcggaggtggcgcaggaggtggcggcgttcgcggagctggtgaacacgtgcgacgcggtggtgggcgtgcacggagcggggctgaccaacatggtgttcctgcccccgggcggggtggtcatccaggtgctgccgctgggcccgctggagttcgtggccagctacttccggggcccggccagggacatggggctcagctacctcgagtaccgcatctcgccggaggagagcacgctgctggaccagtacccgcgggaccaccccgtgctcacggatcccatgagcgtccaggccaaggactgggtgtccttcatgggggtctacctcttcaagcaggacgtccgcctcgacatgaagcgattccgccctgtcctcaagaaggcactcgcgcgacttagagccaaacccaggaataacaacaacaaatgatcgatcgatgatcacatcatcgtccgtcccagtgtaattttggtacctcctgcttcctctgatctgtaggtaactcgatctttattttgaaccgagagctttcactcttctaattaatatatatagtctccgtcattgagccgatcaaggtacacgcacattttgtacaccgtctctgccacgttgccatagcagatcgttatatatatatgcacatgataggtcaactacctacatgctatacgttgtactattttatgcggcaaacttccaatataatggacctcgaaagcggagaaatatgtgcaggcacacacattattaaaagatattgtcgctctcgatgatttgcatgcattaattgccacggcaagatgactgcaaaggaacatggaat

SEQ ID NO: 75463 - DNA, 2443 bp, Zea Mays
cacacagcgaggtgcctggggcctggctgtgccgtggtgggtcgtcgacgtacgcgaggagcaatggagggcggcgggaagttagtagcatacaggtatggcggcggcgtggagccccgcaagttcgggctcggcggccttgtcgccggcctcctcctcgtgacctgcgcctactacttctccaccgtcaaactcgacgccgtccgcatcgtcatgagcaagcaaccgatgaacccatcagaagcattcaggtcccgtgccaagaatgcagcagctgggacggttgggtcgccggcgaacggcggcgacagctcgaagcagacatcagagtcgggcggcctgcaagatcaaggtgcatggtcgtcgaaggatggcgacggcgtatcctcgtcctcgttcgggcaaggcgaatcaggcaggcatctatttggaggtccagtaagctcgttcgaggagaagcagagagatgatgccgttcatgagaaggatgatgatgacccacgtgctggagttgctgctcttcctcccttgtcatcagacatcatgcaggaatcaggaggaggtcttgaagatctggaactgcaggtgcagaatgctattgcagcagcagcagctgcagctccacccaaggaaagcaatagtgtcagcagcaacgatcctggcagctcgtcctctgagatttttccgtctggtccaggaccagctgatcaagtccctgttcctgctacctctccagaaattgagcccctttttgcaaaccaaattcctgctgcttcttcggaggttaaggccgcccctccatttcatttggatccacctgtcgctgacgctgaggccaagcaaacagcgccgctgcgggagtggaagccgctgtgcgacctgacgtcgaaccgtcgcatcgactggtgcgagctggagggcgacgtccgcgtggtcggcggctccaacggcagcgtcaccctggtggcagcccctggcgcggacgagcgcagctttcacgaggagtcgtggagcatcaagccgtacccgcgcaaggcggacccgaacgccatgcgcagcgtgcgcgcgctggcggtgcggtcggtggccacggcgccgccggtggcctgcacggactggcacggcgtgccggcgctggtgttctcggcgcgcgggtacacggggaactacttccacgcgtacacggacgtgatcctgccgctgttcctgacggcgcggcagtacgcgggcgaggtgctgctgctggtgaccggcttccaggcgtggtgggtgggcaagtacctgccggtgttccggagcctgtccaactacgagccggtggacctggaccgggaccgggacccgcgcgtgcgctgcttccgccgcgtccaggtggggctcaccagccacgacgacttcagcatcgacccgcgccgcgcgcccaacggctactccatgctggacttcacccggttcatgcgcgccacctacgggctcccgcgcgacgccgtgccgcggcgggggcgggggcggccaaggccgcggctcctggtgatcgcgcgcgcgcgcacgcggcggttcctcaacgcggaggacatcgtgcgcggcgcgcggaaggtggggttcgaggtggtggtgtcggaggtggcgcaggaggtggcggcgttcgcggagctggtgaacacgtgcgacgcggtggtgggcgtgcacggagcggggctgaccaacatggtgttcctgcccccgggcggggtggtcatccaggtgctgccgctgggcccgctggagttcgtggccagctacttccggggcccggccagggacatggggctcagctacctcgagtaccgcatctcgccggaggagagcacgctgctggaccagtacccgcgggaccaccccgtgctcacggatcccatgagcgtccaggccaaggactgggtgtccttcatgggggtctacctcttcaagcaggacgtccgcctcgacatgaagcgattccgccctgtcctcaagaaggcactcgcgcgacttagagccaaacccaggaataacaacaacaaatgatcgatcgatgatcacatcatcgtccgtcccagtgtaattttggtacctcctgcttcctctgatctgtaggtaactcgatctttattttgaaccgagagctttcactcttctaattaatatatatagtctccgtcattgagccgatcaaggtacacgcacattttgtacaccgtctctgccacgttgccatagcagatcgttatatatatatgcacatgataggtcaactacctacatgctatacgttgtactattttatgcggcaaacttccaatataatggacctcgaaagcggagaaatatgtgcaggcacacacattattaaaagatattgtcgctctcgatgatttgcatgcattaattgccacggcaagatgactgcaaaggaacatggaat

SEQ ID NO: 75464 - DNA, 2870 bp, Zea Mays
ctctcacagtcacagcatccttccttgcttctcgtctcgtcgcctctcggagatcagaaagagaacaccggacacctagcctgcgcccttgccttccctccgcgcgcgcgtgctatctatggcgatggaagacgtcgcgggtgcctcctcctcctcggtggcggccgccgcctccgaccccacgcacggctggcagacggtgtcgtaccccaagcgccaccgcaagcaggcgcatcagccaccccgcgccatggctcccgatctggcgctgcaggccaacggcaaaggctccggtgtcttcgacgccgtcgagaagcgctcccaggagcgccaccgcgcgctgcagcagcagctcgcatccagggcggccgacctcgacgacgcgcggatcgccccggtcacaggcggcgcttactccgacgactccgactccgacgaggccaccgccccgcgccaggtgggggaggtgaagaagcctaagaagcctaaaaagcctaaggtgacggtcgccgaggctgccgccctgatcgacgccgagaacctcgcagcgcacctcgtcgagatctcgtcatcatacgagaatcaacaggacattcaactcatgaggtttgctgattactttggccgggcatttgtagctgtaagcgcatcccaatttgcatgggcaaagatgttcaaggaatcaacagtgtctaagatggttgacgaggtttatgttttcatgttacattactgtgctgtagtcgcacgtagtgatgtactcgagattcatgcttggtgccaaaatttggaaaatccatgcattaatgtcttcggtttgagaaaccgttatgacacttttgtcgtatcttaacgaactgagagaaccaaccgagatcccactgtgccatattcctgaggctgtcatcaagactgcgagtgattggatcagtcaaagatcttatgatgccctgggagactttgttttgtggtgtatagatagcatcatgtctgaattgtcaggcccatcagcaggacctaagggttcaaagaaggttgcccaacagtctccaagggcccaggttgcaatctttgttgttcttgccatgactttaagaagaaagcctgatgtacttgtaaatgttatgccaaagataatgggaaacaataaatatcttggacaggaaaagcttcccatcattgtctggtttattgctcaggcatctcaaggtgacctagtgactggcatgttttgctgggctcattttctatttcccacgttatgtgcgaagccaagtgggaatccccttgcaagagatttggttttgcagttgcttgaaagaattttatctgtcaccaaagctcgttctatcttattgaatggtgctgttagaaagggggaacgcctagttccccctgtttcatttgacttgttcatgagagccacatttccggtttctggtgctcgggtgaaggctacagaaaggtttgaagtagcttatcgaacaatcaaggagttggctcttgccggttctcctggctctaaaactgtgaaacaagcatcacagcaacttttacctttgtgtgcaaaagcaatgcaagaaaacaatgcagagctcaccagggaggctgttgatgtgttcatttggtgcttgacacaaaatgcagagtcctacaagcagtgggaaagaatttatcctgaaaatactgaagccagtgttgctgtcctgagcaaaattgtgattgattggaaggatgtgtctcctaagctcagttctgaagctctcaaggcaacagtgaagaacttgaaggctaagaatgaggcagcgctggagtcagcaacagatgctggaaagcaggcatctatcaagaagcagacaagcactgcaagacttgagcaggggtcagagcagctgctcggaggccggcctggccctgccctgggtgtgctcgccactgtcgcagagtgctcagtggaacccgcggcacaaactacaaagggacctgactcgaatggcagctcgtcacctctcccacctgtcctccccagcgtctgcttccctcctcggccccgagccatggcgccctgcgcgtccccgtccgccctcgcgctctccgccagcacgcgggtcagcagcttcccactgacgctgcgcccgcggccgcggccggaggcgcgtgtgccgcgcgcgcccggcggcgcccagctccgcccggcgaccgcgtgctcttggccgcgccccttgctgcccgagctcgcgccggcgttccctcgtgccggcgcccgcagcgccggcagaccgcagccgctgttccggccccgcgcaatgatgacgacgtctcagatcgccagctgcgccttcaccgtgggcacggtcgccgtcctccccttctacacgctcatggtcgtcgcccccaacgccgacatcaccaaacgcacggtggagagcagcgccccctacgtcgccctaggcctcctctacgcctacctgctctacctgtcttggacccccgacacccttcgcgccatgttcgcgagcaagtactggctccccgagctgccgggcatcgtcaggatgttcgcgagcgagatgaccgtcgcctccgcatggatccacctcctagcagtcgatctcttcgcggcgaggcaggtctaccacgacggtctcaagaacaacatcgagaccaggcattcggtctcgctgtgcctgctcttctgcccggtcgggatcctggctcatgtggtaaccaaggtattggcaggggcagctggccgctcacattgatgattggaattgggtggttgtatctaggattcccgttttgtttagctggtggagtttatgagatctggatatgaataaagcttgttcaaggcactgattctttca

SEQ ID NO: 75465 - DNA, 2890 bp, Zea Mays
ctctcacagtcacagcatccttccttgcttctcgtctcgtcgcctctcggagatcagaaagagaacaccggacacctagcctgcgcccttgccttccctccgcgcgcgcgtgctatctatggcgatggaagacgtcgcgggtgcctcctcctcctcggtggcggccgccgcctccgaccccacgcacggctggcagacggtgtcgtaccccaagcgccaccgcaagcaggcgcatcagccaccccgcgccatggctcccgatctggcgctgcaggccaacggcaaaggctccggtgtcttcgacgccgtcgagaagcgctcccaggagcgccaccgcgcgctgcagcagcagctcgcatccagggcggccgacctcgacgacgcgcggatcgccccggtcacaggcggcgcttactccgacgactccgactccgacgaggccaccgccccgcgccaggtgggggaggtgaagaagcctaagaagcctaaaaagcctaaggtgacggtcgccgaggctgccgccctgatcgacgccgagaacctcgcagcgcacctcgtcgagatctcgtcatcatacgagaatcaacaggacattcaactcatgaggtttgctgattactttggccgggcatttgtagctgtaagcgcatcccaatttgcatgggcaaagatgttcaaggaatcaacagtgtctaagatggttgacgaggtttatgttttcatgttacattactgtgctgtagtcgcacgtagtgatgtactcgagattcatgcttggtgccaaaatttggaaaatccatgcattaatgtcttcggtttgagaaaccgttatgacacttttgtcgtatcttaacgaactgagagaaccaaccgagatcccactgtgccatattcctgaggctgtcatcaagactgcgagtgattggatcagtcaaagatcttatgatgccctgggagactttgttttgtggtgtatagatagcatcatgtctgaattgtcaggcccatcagcaggacctaagggttcaaagaaggttgcccaacagtctccaagggcccaggttgcaatctttgttgttcttgccatgactttaagaagaaagcctgatgtacttgtaaatgttatgccaaagataatgggaaacaataaatatcttggacaggaaaagcttcccatcattgtctggtttattgctcaggcatctcaaggtgacctagtgactggcatgttttgctgggctcattttctatttcccacgttatgtgcgaagccaagtgggaatccccttgcaagagatttggttttgcagttgcttgaaagaattttatctgtcaccaaagctcgttctatcttattgaatggtgctgttagaaagggggaacgcctagttccccctgtttcatttgacttgttcatgagagccacatttccggtttctggtgctcgggtgaaggctacagaaaggtttgaagtagcttatcgaacaatcaaggagttggctcttgccggttctcctggctctaaaactgtgaaacaagcatcacagcaacttttacctttgtgtgcaaaagcaatgcaagaaaacaatgcagagctcaccagggaggctgttgatgtgttcatttggtgcttgacacaaaatgcagagtcctacaagcagtgggaaagaatttatcctgaaaatactgaagccagtgttgctgtcctgagcaaaattgtgattgattggaaggatgtgtctcctaagctcagttctgaagctctcaaggcaacagtgaagaacttgaaggctaagaatgaggcagcgctggagtcagcaacagatgctggaaagcaggcatctatcaagaagcagacaagcactgcaagacttgagcaggggtcagagcagctgctcggaggccggcctggccctgccctgggtgtgctcgccactgtcgcagagtgctcagtggaacccgcggcacaaactacaaagggacctgactcgaatggcagctcgtcacctctcccacctgtcctccccagcgtctgcttccctcctcggccccgagccatggcgccctgcgcgtccccgtccgccctcgcgctctccgccagcacgcgggtcagcagcttcccactgacgctgcgcccgcggccgcggccggaggcgcgtgtgccgcgcgcgcccggcggcgcccagctccgcccggcgaccgcgtgctcttggccgcgccccttgctgcccgagctcgcgccggcgttccctcgtgccggcgcccgcagcgccggcagaccgcagccgctgttccggccccgcgcaatgatgacgacgtctcagatcgccagctgcgccttcaccgtgggcacggtcgccgtcctccccttctacacgctcatggtcgtcgcccccaacgccgacatcaccaaacgcacggtggagagcagcgccccctacgtcgccctaggcctcctctacgcctacctgctctacctgtcttggacccccgacacccttcgcgccatgttcgcgagcaagtactggctccccgaggaatgggatgcactttgcagctgccgggcatcgtcaggatgttcgcgagcgagatgaccgtcgcctccgcatggatccacctcctagcagtcgatctcttcgcggcgaggcaggtctaccacgacggtctcaagaacaacatcgagaccaggcattcggtctcgctgtgcctgctcttctgcccggtcgggatcctggctcatgtggtaaccaaggtattggcaggggcagctggccgctcacattgatgattggaattgggtggttgtatctaggattcccgttttgtttagctggtggagtttatgagatctggatatgaataaagcttgttcaaggcactgattctttca

SEQ ID NO: 75466 - DNA, 2701 bp, Zea Mays
ctctcacagtcacagcatccttccttgcttctcgtctcgtcgcctctcggagatcagaaagagaacaccggacacctagcctgcgcccttgccttccctccgcgcgcgcgtgctatctatggcgatggaagacgtcgcgggtgcctcctcctcctcggtggcggccgccgcctccgaccccacgcacggctggcagacggtgtcgtaccccaagcgccaccgcaagcaggcgcatcagccaccccgcgccatggctcccgatctggcgctgcaggccaacggcaaaggctccggtgtcttcgacgccgtcgagaagcgctcccaggagcgccaccgcgcgctgcagcagcagctcgcatccagggcggccgacctcgacgacgcgcggatcgccccggtcacaggcggcgcttactccgacgactccgactccgacgaggccaccgccccgcgccaggtgggggaggtgaagaagcctaagaagcctaaaaagcctaaggtgacggtcgccgaggctgccgccctgatcgacgccgagaacctcgcagcgcacctcgtcgagatctcgtcatcatacgagaatcaacaggacattcaactcatgaggtttgctgattactttggccgggcatttgtagctgtaagcgcatcccaatttgcatgggcaaagatgttcaaggaatcaacagtgtctaagatggttgacatcccactgtgccatattcctgaggctgtcatcaagactgcgagtgattggatcagtcaaagatcttatgatgccctgggagactttgttttgtggtgtatagatagcatcatgtctgaattgtcaggcccatcagcaggacctaagggttcaaagaaggttgcccaacagtctccaagggcccaggttgcaatctttgttgttcttgccatgactttaagaagaaagcctgatgtacttgtaaatgttatgccaaagataatgggaaacaataaatatcttggacaggaaaagcttcccatcattgtctggtttattgctcaggcatctcaaggtgacctagtgactggcatgttttgctgggctcattttctatttcccacgttatgtgcgaagccaagtgggaatccccttgcaagagatttggttttgcagttgcttgaaagaattttatctgtcaccaaagctcgttctatcttattgaatggtgctgttagaaagggggaacgcctagttccccctgtttcatttgacttgttcatgagagccacatttccggtttctggtgctcgggtgaaggctacagaaaggtttgaagtagcttatcgaacaatcaaggagttggctcttgccggttctcctggctctaaaactgtgaaacaagcatcacagcaacttttacctttgtgtgcaaaagcaatgcaagaaaacaatgcagagctcaccagggaggctgttgatgtgttcatttggtgcttgacacaaaatgcagagtcctacaagcagtgggaaagaatttatcctgaaaatactgaagccagtgttgctgtcctgagcaaaattgtgattgattggaaggatgtgtctcctaagctcagttctgaagctctcaaggcaacagtgaagaacttgaaggctaagaatgaggcagcgctggagtcagcaacagatgctggaaagcaggcatctatcaagaagcagacaagcactgcaagacttgagcaggggtcagagcagctgctcggaggccggcctggccctgccctgggtgtgctcgccactgtcgcagagtgctcagtggaacccgcggcacaaactacaaagggacctgactcgaatggcagctcgtcacctctcccacctgtcctccccagcgtctgcttccctcctcggccccgagccatggcgccctgcgcgtccccgtccgccctcgcgctctccgccagcacgcgggtcagcagcttcccactgacgctgcgcccgcggccgcggccggaggcgcgtgtgccgcgcgcgcccggcggcgcccagctccgcccggcgaccgcgtgctcttggccgcgccccttgctgcccgagctcgcgccggcgttccctcgtgccggcgcccgcagcgccggcagaccgcagccgctgttccggccccgcgcaatgatgacgacgtctcagatcgccagctgcgccttcaccgtgggcacggtcgccgtcctccccttctacacgctcatggtcgtcgcccccaacgccgacatcaccaaacgcacggtggagagcagcgccccctacgtcgccctaggcctcctctacgcctacctgctctacctgtcttggacccccgacacccttcgcgccatgttcgcgagcaagtactggctccccgagctgccgggcatcgtcaggatgttcgcgagcgagatgaccgtcgcctccgcatggatccacctcctagcagtcgatctcttcgcggcgaggcaggtctaccacgacggtctcaagaacaacatcgagaccaggcattcggtctcgctgtgcctgctcttctgcccggtcgggatcctggctcatgtggtaaccaaggtattggcaggggcagctggccgctcacattgatgattggaattgggtggttgtatctaggattcccgttttgtttagctggtggagtttatgagatctggatatgaataaagcttgttcaaggcactgattctttca

SEQ ID NO: 75467 - DNA, 2695 bp, Zea Mays
ctctcacagtcacagcatccttccttgcttctcgtctcgtcgcctctcggagatcagaaagagaacaccggacacctagcctgcgcccttgccttccctccgcgcgcgcgtgctatctatggcgatggaagacgtcgcgggtgcctcctcctcctcggtggcggccgccgcctccgaccccacgcacggctggcagacggtgtcgtaccccaagcgccaccgcaagcaggcgcatcagccaccccgcgccatggctcccgatctggcgctgcaggccaacggcaaaggctccggtgtcttcgacgccgtcgagaagcgctcccaggagcgccaccgcgcgctgcagcagcagctcgcatccagggcggccgacctcgacgacgcgcggatcgccccggtcacaggcggcgcttactccgacgactccgactccgacgaggccaccgccccgcgccaggtgggggaggtgaagaagcctaagaagcctaaaaagcctaaggtgacggtcgccgaggctgccgccctgatcgacgccgagaacctcgcagcgcacctcgtcgagatctcgtcatcatacgagaatcaacaggacattcaactcatgaggtttgctgattactttggccgggcatttgtagctgtaagcgcatcccaatttgcatgggcaaagatgttcaaggaatcaacagtgtctaagatggttgacatcccactgtgccatattcctgaggctgtcatcaagactgcgagtgattggatcagtcaaagatcttatgatgccctgggagactttgttttgtggtgtatagatagcatcatgtctgaattgtcaggcccatcagcaggacctaagggttcaaagaaggttgcccaacagtctccaagggcccaggttgcaatctttgttgttcttgccatgactttaagaagaaagcctgatgtacttgtaaatgttatgccaaagataatgggaaacaataaatatcttggacaggaaaagcttcccatcattgtctggtttattgctcaggcatctcaaggtgacctagtgactggcatgttttgctgggctcattttctatttcccacgttatgtgcgaagccaagtgggaatccccttgcaagagatttggttttgcagttgcttgaaagaattttatctgtcaccaaagctcgttctatcttattgaatggtgctgttagaaagggggaacgcctagttccccctgtttcatttgacttgttcatgagagccacatttccggtttctggtgctcgggctacagaaaggtttgaagtagcttatcgaacaatcaaggagttggctcttgccggttctcctggctctaaaactgtgaaacaagcatcacagcaacttttacctttgtgtgcaaaagcaatgcaagaaaacaatgcagagctcaccagggaggctgttgatgtgttcatttggtgcttgacacaaaatgcagagtcctacaagcagtgggaaagaatttatcctgaaaatactgaagccagtgttgctgtcctgagcaaaattgtgattgattggaaggatgtgtctcctaagctcagttctgaagctctcaaggcaacagtgaagaacttgaaggctaagaatgaggcagcgctggagtcagcaacagatgctggaaagcaggcatctatcaagaagcagacaagcactgcaagacttgagcaggggtcagagcagctgctcggaggccggcctggccctgccctgggtgtgctcgccactgtcgcagagtgctcagtggaacccgcggcacaaactacaaagggacctgactcgaatggcagctcgtcacctctcccacctgtcctccccagcgtctgcttccctcctcggccccgagccatggcgccctgcgcgtccccgtccgccctcgcgctctccgccagcacgcgggtcagcagcttcccactgacgctgcgcccgcggccgcggccggaggcgcgtgtgccgcgcgcgcccggcggcgcccagctccgcccggcgaccgcgtgctcttggccgcgccccttgctgcccgagctcgcgccggcgttccctcgtgccggcgcccgcagcgccggcagaccgcagccgctgttccggccccgcgcaatgatgacgacgtctcagatcgccagctgcgccttcaccgtgggcacggtcgccgtcctccccttctacacgctcatggtcgtcgcccccaacgccgacatcaccaaacgcacggtggagagcagcgccccctacgtcgccctaggcctcctctacgcctacctgctctacctgtcttggacccccgacacccttcgcgccatgttcgcgagcaagtactggctccccgagctgccgggcatcgtcaggatgttcgcgagcgagatgaccgtcgcctccgcatggatccacctcctagcagtcgatctcttcgcggcgaggcaggtctaccacgacggtctcaagaacaacatcgagaccaggcattcggtctcgctgtgcctgctcttctgcccggtcgggatcctggctcatgtggtaaccaaggtattggcaggggcagctggccgctcacattgatgattggaattgggtggttgtatctaggattcccgttttgtttagctggtggagtttatgagatctggatatgaataaagcttgttcaaggcactgattctttca

SEQ ID NO: 75468 - DNA, 327 bp, Zea Mays
atgtcctcgtcgtacttgcggaacagcgtgtacgactcccagcgcgccgagctccggcgcgacgaggacgagaaggggtactccgtctccgagtccttggtcagcgtcgagctctgccactccaccgagctcttggacgtggactcgctcgtcagcgtcgacgacgcgccgaagcggctgctgtccccgccgttcctgtccttgccgctctcgtcctgcagccgcccgtgcgctcctcctccggccaccacgccttccagcaggagcttcctggtgtcggcgagcgcgcggctgttgacgaacagcctgacgtcatggcagccttga

SEQ ID NO: 75469 - DNA, 626 bp, Zea Mays
atcgattacaagatgtggatatcttgtttatttattgattactacttaataaagatatatatgcatgtatgtgcctttttacagtaacatcatctctgatctactagacgagaggctaagtgccatgcacattctcatgtctatatatgcaaatgcaactttgcctttggttctcttctcccactacacatatcttggacaaaagaacatgcgaagaaagaaagtagaaaagaaaagaaaaagaaaacaaaagagctacgtactagaagatcagtatcacacaagactgttgtccagcaccagcagcagcagcaacaggagccagcaggtccctgtcagtgtgcagggtagaagagaggggcagggtccctctgcatcttgccctccggatcgacccggaccctgttcatcttctcctcgcaccagtgcagctgccggtcggtgacctccggcgcgcgcagcacccgcgccaccaccttgaggtcgatgaggcccagcaggacggacagctcctcctcctccctcagcctcgtcctcctcaggcaccgccgcggccgcgtcaggtccttgagccgcctcttcttctgaacagtcgccggccggccaccacatcccatccatcatac

SEQ ID NO: 75470 - DNA, 1846 bp, Zea Mays
tgcaagatatagtagtattgcttacagcatttcaaaatatgattacagatcctccccttgtttggcagaaatacttctaacctttgctatgtttctcatctcaccaaaatgtgtcaaactaactgaaacaaatatcacgaacgaagggcctcgtccgttgtttgtctggatgaagcaagcaactctttgaactgtgctaatgccttctctgttatttgcttaaacggtatgcgctttatcacatgggctccaaagaagtataacagggcatctgttgcagtttccgtgttgatgcctctagcctggaagtagaagagctcgtttggatcaagctcaccactgatggcggcaccatgagtacacttcacatcatcagcaataatctgaaggttcggcttgacattaacaagtgcctttggtgataggataaggcacttggtttcttgccccgcatcagtttgctgtgcatacctgtgaatcaagactaccacatcattaggacacaaatatagaattgcagcttcagatatagctgtgtgtcatgactcatgagtaaaacatagattttggacatcctaggaattatataattgcatctatgtatcaccgatatgcgatacggtgacacactgatacaggtacggtatgtgatacatcgtttgtaaaaaacaaagatacactgatacttccaatatataaaatgtatagttaaaatgattgcatttacatgtccttagagagagaaccaaaatgatcgaatcaatttcaacaaaacataaggaaagcgacgatctaaatgaccaagcagccaggaactgaccggtcagcatagctagagtgcacctatctcagaaccttcagcagctgcgcaagatgatctcccaagtcccagagttcagatccaagcggtagcactcaatcatgaggattgaggacatcagcacacccagtggtgacgtgcctcccagcgaggcagtggcactagcttcttacggcatgcgctactagtagttggcagcgctagatccgggtggcatgtgctccatgtgaggtggtgacactccctgactccctgtccatggtggcgccaagaagcaagaggtgggagttggagacgaggcaccgtttgttcttgggtgaggcttgagaatggatggtgatgggctaatgatgttgggcttgcattgggctgtaaaatgaggtactattgggctggcatgcatcggcacagcgtattgcaccgtatcgtgagctaaaccattcagtttttttatctcgtttccctaatacttcgcgacatgcgtatcgggatgtatcaccgtatccgatatgggtgcggcaccctccctggtgtattggtgatacatagaactgctactgcataacaacataactatgagtgaaacaaaattcaacagttgagtaacagctaaatgtttctgtggctttctgttaactttctctcaattattttatatcatgtaacaccaaacatcttatacaactatcaatactatattatagacttcaagttcacttaaatatatcctagacaaatatttaatcttaggatgtcatatattcagttactgtgaaaagcgagcaatagaaatatttctggcacatgctaacaataaatatttttatgccatgaacacatcaaatgtgttatgcaattcagttaaaatttaaatctatcctagacaaacatataacaccaggatgccatatattcacctactgcgaaatactgagcaataaaaaagtgtatggcagaggcatgaaactagaaatctatgcaatgctgaccaggtaaatggctggaagcctggaatagacaacattt

SEQ ID NO: 75471 - DNA, 186 bp, Zea Mays
atggtctatattccatgttttacatcaaaatcaaatgccttatcatcaacttacataaaaaatgaatatttttacagagccttggtcacaattaaactactctatattccaccttcagtcaataatatattttattgggaaaaatatagagaatactaccgtatgtacacactaatgagtacttaa

SEQ ID NO: 75472 - DNA, 186 bp, Zea Mays
ctctttatgttctccttaagtgcttttgggccaccacaggataataaagaatagcttaccataataattgaggggaacaagtttgaaagctagttaacagatccaagcaatgtgagcaaggaccataaactatattatattctccgtgacattacctactgcataaaaacgaacacttgagattgg

SEQ ID NO: 75473 - DNA, 4355 bp, Zea Mays
ccgaccaagtccagtaaataatgcacacaaaggctgcgatgctaacgttgaccaactacagaaccatatttcctggagccaagaatgtataactaaaacgcaaaagtcatctttagatatcagtaaaattttacaactatagtaaggttctgatgcgggattctgagccgcaagggaagcctgctttcgcaggcatcatgctctggatctcctcgtgcactcccagcagaacatcccgcgactgctgccacgccacgactgtgcttcaattctggcgttgaggaggagcctcctcctgccgagactgctggagacgaccacctcctcctggcggccgtgggcctgccagcgccgcagtccgtcgcatagagctggaccgggcggcgcagcaggacgtcagcgtcggcgagggcaggggcggtgcgttgcgttgcaggagcgttgtcgtcagcgggagagaggcagtggagggggctggggcggcgaatggcgcaagaggtccaagtcccagacttgtgcactgggtgatgtagcagcgtgcgcgcccgaggcggcggcggccggcccagcgcgggtcttgcctgcgctcgctccggcgtcgttctcgccagagtggtcggggcggcggcggccaggcatcccgcggcgcactcgcaccaccgagctctgccttgccggatggtggctggtgctgcggccaggttccgcgccctcgaggtggcagcggcggcgttgccgcgttggcggcctagacccgggtgatttggagcggaatctgcggacgaaatctcggcagttgttccctctttcgcgtgcgtgtgggagcgcccgacggaatttctcccacggaattctgtcgtaggtgggtttggttggaggtggcattcatggatgcgcctggaaaaaaggcccaaaagtttacattgggctttttctagattttgcgcgacaacctggcccggtggtgtttatctaccaaagtagcccgtggaactgtagatatggggcacggcgtccctccggcccgcgccccgtggtcatttcggcgttaacgccgccgcagcgccgagtcctacggctccccgccccgcaaggccgcaaccgcagtccgcagacggcctaggtcgagaggagggcgattccattcgaccacatcctaggaggccaggagagaccggcggcaacctgcctgcgcgctagtctgacagcgcgcgaggcggcgataacccgccgcggcggtggcgtcgcacgagctgccgcctcgttctggcgggacggctggttgtctcctgttcagccagcaaacggcgtgcctcgccgcagagagcttacgtgctcctctcccccacgccgccgtcggcgtgttgtaccgcccctccatctcccccgccgccgccgccgccgtacagagcttcgagcacctcggccacaccactccctcccaccgccgccgcagatatctcctgcccgcggtgccgggatggagaacgacatcaccgccgccgagatcttcggcgtggtcgggatggagaacgacatcgccgccgccgagttctccggcatggtcgggatggaggacactgctgctacgccggtgtgccacggctcggcttgtccggttgtctgccacagcgaagaacctggaggatcaaaggattcgcaagataagcaactaactagtgaaccatcaaaagaaattgtttggggtgctttacaatttgaggacaggtggaaggaggaagggatgcaattaattgcctgtgaagattctatatatgctcaacttggtttggtagaagaggatgagagggagatgagagaaaaggaccaagcttgttatgcaggggttggaactaggatttctaatgagcttgatgatgatggcgccaccatgccatgtgaggattctttaccacaagagaggaggatattatatgaccaagataatcctgttatggagcctggcagcttatacccatcaatgaaggaatttaggattgcaatgagacaatatgccataaacaataaatttgagttaggtattgaggctactagcacgacaagatatagaggctattgtcgtggtttggattgtcgttggagtatatatgcacgaacggagatgaaaggatcgccaaccataatcgtgtggtagtggtgaacgatgtccacacttgtacttctagtggtaggaagaagactaccactccttctagtgcttgggtggctgcaaaagctctttctatccttatgaagaaaccccaaatgggtgctaaggagttgcagactattttgcaggacagattcacatgtgctatttcatatgacactatttggaaggggaaggagaaagcattgagagagttgttcgagagttgggaggagagctttcaactcttgttttcctggaaggaagcagtcttgcagaagtcacctgacagtgtaatagagattgacctccgagttgaagatgacaaactttttttcagcaagttcttctgtgcatttggtccatgcatttctgggtttaaagaagcctgtagaccgtatcttagtgtcgactctactgctttaaatggtatatgggacggtcacttagcttctgctacaagtgtagatggactgaattggatgtacccagtggcatttggtttttttagttctgaaactgaagagaactggacttggtttatgactaaattgcaccaagcagtaggagatcttccagttcttgctatctgttctgatgcttgcaaaggtttgacaaatgctgtgaagtcagtttttcctaatgctgaaaaaagagtgtgtttcaggcatctaatgaacaactatgtgaagagttatacaggctcagaatacatgtatccagcagctagggcatacaggagggatgtgtttgagcatcacattggtaatgtgagctgtgatcctgttatagccagttggctagatcaatatcatgatttattatggtaccgaagtggtttcaacacagctattaagtgtgactatatcacaaacaatatcgctgagttgttcaataattggattaaggattataaaggtcttccagtgtgtgatcttgccgataagatcagggaaatgataatgcatttgtttcacaagaggaggcggataagtcagaggttccatgggaacattttaccgtcaatcatacatgtcttgacgacgaggactagaggaataggtcacttggagtttataaagggtgatgactatgctgctgagatctatgacaatagtaactactgtgctccacatgtggtcaaagcatatttgaaagaatgctcatgtcaagagtggcaacacaccggtaaaccttgccaacatgcattgtgctttatcactgcccaacagatgagaaatgtcaggatggaggactttgttgaccattattactcagttgagaaatttagacaagcttattgtaggatggtggagcctcttgaggacaaatctttttggccaaaagtggacattgcaagtgaggttggtgcacctcttgatagaagatgtgttgggagacaaagggaaaatagtattaagagtagcctcgaaggtgtaagcggtaaggaagcaagtgaaaaaggcaagaaaatgatccgaaggaggttcaagtgtccgaactgtggagaattggggcacagaaaaaatagctccaaatgcccactaaatgggacaaagaagaggaaaagagcgccaaggaagaatacaactaaaggttggtttcctaaagaagtgcctacatcatcacaggcagcacccaatattactcctccaagtgatgatgtgcctgcatcttcagagattgtgctcacaatgcctcctccgccaggagaggatgtgcttgcgtcttcacagatagtgcaaccaatgtctcctccaagcgaggttgtgcctacagaaccaatctctcctccaaaagacgcgtgaagaaggttgttcgttaaattacacctaggaagagctagacatatatgtattcttagggtgcatgttagttaggacagttatctgcaaaactgctaatgttagattaatgtatgtcagtttatttgattgtcagtttggacagttaactgcaaaactggtaatgtcatcagctattgggtgcatttgtctccaaaactggtaatgtcatcagctattgggtgcattatctgaaatatatagttgatgccttgatggcgtgcaatatagtttgagagaaaggagtgctatttcttctgttattgacatactggtaggagaggaagtctgctcttccttgctgagctctggtaacattgagagaaaggctgcttttgtaacagtttgagagaaaggagtgc

SEQ ID NO: 75474 - DNA, 3508 bp, Zea Mays
ccgaccaagtccagtaaataatgcacacaaaggctgcgatgctaacgttgaccaactacagaaccatatttcctggagccaagaatgtataactaaaacgcaaaagtcatctttagatatcagtaaaattttacaactatagtaaggttctgatgcgggattctgagccgcaagggaagcctgctttcgcaggcatcatgctctggatctcctcgtgcactcccagcagaacatcccgcgactgctgccacgccacgactgtgcttcaattctggcgttgaggaggagcctcctcctgccgagactgctggagacgaccacctcctcctggcggccgtgggcctgccagcgccgcagtccgtcgcatagagctggaccgggcggcgcagcaggacgtcagcgtcggcgagggcaggggcggtgcgttgcgttgcaggagcgttgtcgtcagcgggagagaggcagtggagggggctggggcggcgaatggcgcaagaggtccaagtcccagacttgtgcactgggtgatgtagcagcgtgcgcgcccgaggcggcggcggccggcccagcgcgggtcttgcctgcgctcgctccggcgtcgttctcgccagagtggtcggggcggcggcggccaggcatcccgcggcgcactcgcaccaccgagctctgccttgccggatggtggctggtgctgcggccaggttccgcgccctcgaggtggcagcggcggcgttgccgcgttggcggcctagacccgggtgatttggagcggaatctgcggacgaaatctcggcagttgttccctctttcgcgtgcgtgtgggagcgcccgacggaatttctcccacggaattctgtcgtaggtgggtttggttggaggtggcattcatggatgcgcctggaaaaaaggcccaaaagtttacattgggctttttctagattttgcgcgacaacctggcccggtggtgtttatctaccaaagtagcccgtggaactgtagatatggggcacggcgtccctccggcccgcgccccgtggtcatttcggcgttaacgccgccgcagcgccgagtcctacggctccccgccccgcaaggccgcaaccgcagtccgcagacggcctaggtcgagaggagggcgattccattcgaccacatcctaggaggccaggagagaccggcggcaacctgcctgcgcgctagtctgacagcgcgcgaggcggcgataacccgccgcggcggtggcgtcgcacgagctgccgcctcgttctggcgggacggctggttgtctcctgttcagccaggtggtagtggtgaacgatgtccacacttgtacttctagtggtaggaagaagactaccactccttctagtgcttgggtggctgcaaaagctctttctatccttatgaagaaaccccaaatgggtgctaaggagttgcagactattttgcaggacagattcacatgtgctatttcatatgacactatttggaaggggaaggagaaagcattgagagagttgttcgagagttgggaggagagctttcaactcttgttttcctggaaggaagcagtcttgcagaagtcacctgacagtgtaatagagattgacctccgagttgaagatgacaaactttttttcagcaagttcttctgtgcatttggtccatgcatttctgggtttaaagaagcctgtagaccgtatcttagtgtcgactctactgctttaaatggtatatgggacggtcacttagcttctgctacaagtgtagatggactgaattggatgtacccagtggcatttggtttttttagttctgaaactgaagagaactggacttggtttatgactaaattgcaccaagcagtaggagatcttccagttcttgctatctgttctgatgcttgcaaaggtttgacaaatgctgtgaagtcagtttttcctaatgctgaaaaaagagtgtgtttcaggcatctaatgaacaactatgtgaagagttatacaggctcagaatacatgtatccagcagctagggcatacaggagggatgtgtttgagcatcacattggtaatgtgagctgtgatcctgttatagccagttggctagatcaatatcatgatttattatggtaccgaagtggtttcaacacagctattaagtgtgactatatcacaaacaatatcgctgagttgttcaataattggattaaggattataaaggtcttccagtgtgtgatcttgccgataagatcagggaaatgataatgcatttgtttcacaagaggaggcggataagtcagaggttccatgggaacattttaccgtcaatcatacatgtcttgacgacgaggactagaggaataggtcacttggagtttataaagggtgatgactatgctgctgagatctatgacaatagtaactactgtgctccacatgtggtcaaagcatatttgaaagaatgctcatgtcaagagtggcaacacaccggtaaaccttgccaacatgcattgtgctttatcactgcccaacagatgagaaatgtcaggatggaggactttgttgaccattattactcagttgagaaatttagacaagcttattgtaggatggtggagcctcttgaggacaaatctttttggccaaaagtggacattgcaagtgaggttggtgcacctcttgatagaagatgtgttgggagacaaagggaaaatagtattaagagtagcctcgaaggtgtaagcggtaaggaagcaagtgaaaaaggcaagaaaatgatccgaaggaggttcaagtgtccgaactgtggagaattggggcacagaaaaaatagctccaaatgcccactaaatgggacaaagaagaggaaaagagcgccaaggaagaatacaactaaaggttggtttcctaaagaagtgcctacatcatcacaggcagcacccaatattactcctccaagtgatgatgtgcctgcatcttcagagattgtgctcacaatgcctcctccgccaggagaggatgtgcttgcgtcttcacagatagtgcaaccaatgtctcctccaagcgaggttgtgcctacagaaccaatctctcctccaaaagacgcgtgaagaaggttgttcgttaaattacacctaggaagagctagacatatatgtattcttagggtgcatgttagttaggacagttatctgcaaaactgctaatgttagattaatgtatgtcagtttatttgattgtcagtttggacagttaactgcaaaactggtaatgtcatcagctattgggtgcatttgtctccaaaactggtaatgtcatcagctattgggtgcattatctgaaatatatagttgatgccttgatggcgtgcaatatagtttgagagaaaggagtgctatttcttctgttattgacatactggtaggagaggaagtctgctcttccttgctgagctctggtaacattgagagaaaggctgcttttgtaacagtttgagagaaaggagtgc

SEQ ID NO: 75475 - DNA, 4238 bp, Zea Mays
ccgaccaagtccagtaaataatgcacacaaaggctgcgatgctaacgttgaccaactacagaaccatatttcctggagccaagaatgtataactaaaacgcaaaagtcatctttagatatcagtaaaattttacaactatagtaaggttctgatgcgggattctgagccgcaagggaagcctgctttcgcaggcatcatgctctggatctcctcgtgcactcccagcagaacatcccgcgactgctgccacgccacgactgtgcttcaattctggcgttgaggaggagcctcctcctgccgagactgctggagacgaccacctcctcctggcggccgtgggcctgccagcgccgcagtccgtcgcatagagctggaccgggcggcgcagcaggacgtcagcgtcggcgagggcaggggcggtgcgttgcgttgcaggagcgttgtcgtcagcgggagagaggcagtggagggggctggggcggcgaatggcgcaagaggtccaagtcccagacttgtgcactgggtgatgtagcagcgtgcgcgcccgaggcggcggcggccggcccagcgcgggtcttgcctgcgctcgctccggcgtcgttctcgccagagtggtcggggcggcggcggccaggcatcccgcggcgcactcgcaccaccgagctctgccttgccggatggtggctggtgctgcggccaggttccgcgccctcgaggtggcagcggcggcgttgccgcgttggcggcctagacccgggtgatttggagcggaatctgcggacgaaatctcggcagttgttccctctttcgcgtgcgtgtgggagcgcccgacggaatttctcccacggaattctgtcgtaggtgggtttggttggaggtggcattcatggatgcgcctggaaaaaaggcccaaaagtttacattgggctttttctagattttgcgcgacaacctggcccggtggtgtttatctaccaaagtagcccgtggaactgtagatatggggcacggcgtccctccggcccgcgccccgtggtcatttcggcgttaacgccgccgcagcgccgagtcctacggctccccgccccgcaaggccgcaaccgcagtccgcagacggcctaggtcgagaggagggcgattccattcgaccacatcctaggaggccaggagagaccggcggcaacctgcctgcgcgctagtctgacagcgcgcgaggcggcgataacccgccgcggcggtggcgtcgcacgagctgccgcctcgttctggcgggacggctggttgtctcctgttcagccagcaaacggcgtgcctcgccgcagagagcttacgtgctcctctcccccacgccgccgtcggcgtgttgtaccgcccctccatctcccccgccgccgccgccgccgtacagagcttcgagcacctcggccacaccactccctcccaccgccgccgcagatatctcctgcccgcggtgccgggatggagaacgacatcaccgccgccgagatcttcggcgtggtcgggatggagaacgacatcgccgccgccgagttctccggcatggtcgggatggaggacactgctgctacgccggtgtgccacggctcggcttgtccggttgtctgccacagcgaagaacctggaggatcaaaggattcgcaagataagcaactaactagtgaaccatcaaaagaaattgtttggggtgctttacaatttgaggacaggtggaaggaggaagggatgcaattaattgcctgtgaagattctatatatgctcaacttggtttggtagaagaggatgagagggagatgagagaaaaggaccaagcttgttatgcaggggttggaactaggatttctaatgagcttgatgatgatggcgccaccatgccatgtgaggattctttaccacaagagaggaggatattatatgaccaagataatcctgttatggagcctggcagcttatacccatcaatgaaggaatttaggattgcaatgagacaatatgccataaacaataaatttgagttaggtattgaggctactagcacgacaagatatagaggctattgtcgtggtttggattgtcgttggagtatatatgcacgaacggagatgaaaggatcgccaaccataatcgtggtagtggtgaacgatgtccacacttgtacttctagtgattcacatgtgctatttcatatgacactatttggaaggggaaggagaaagcattgagagagttgttcgagagttgggaggagagctttcaactcttgttttcctggaaggaagcagtcttgcagaagtcacctgacagtgtaatagagattgacctccgagttgaagatgacaaactttttttcagcaagttcttctgtgcatttggtccatgcatttctgggtttaaagaagcctgtagaccgtatcttagtgtcgactctactgctttaaatggtatatgggacggtcacttagcttctgctacaagtgtagatggactgaattggatgtacccagtggcatttggtttttttagttctgaaactgaagagaactggacttggtttatgactaaattgcaccaagcagtaggagatcttccagttcttgctatctgttctgatgcttgcaaaggtttgacaaatgctgtgaagtcagtttttcctaatgctgaaaaaagagtgtgtttcaggcatctaatgaacaactatgtgaagagttatacaggctcagaatacatgtatccagcagctagggcatacaggagggatgtgtttgagcatcacattggtaatgtgagctgtgatcctgttatagccagttggctagatcaatatcatgatttattatggtaccgaagtggtttcaacacagctattaagtgtgactatatcacaaacaatatcgctgagttgttcaataattggattaaggattataaaggtcttccagtgtgtgatcttgccgataagatcagggaaatgataatgcatttgtttcacaagaggaggcggataagtcagaggttccatgggaacattttaccgtcaatcatacatgtcttgacgacgaggactagaggaataggtcacttggagtttataaagggtgatgactatgctgctgagatctatgacaatagtaactactgtgctccacatgtggtcaaagcatatttgaaagaatgctcatgtcaagagtggcaacacaccggtaaaccttgccaacatgcattgtgctttatcactgcccaacagatgagaaatgtcaggatggaggactttgttgaccattattactcagttgagaaatttagacaagcttattgtaggatggtggagcctcttgaggacaaatctttttggccaaaagtggacattgcaagtgaggttggtgcacctcttgatagaagatgtgttgggagacaaagggaaaatagtattaagagtagcctcgaaggtgtaagcggtaaggaagcaagtgaaaaaggcaagaaaatgatccgaaggaggttcaagtgtccgaactgtggagaattggggcacagaaaaaatagctccaaatgcccactaaatgggacaaagaagaggaaaagagcgccaaggaagaatacaactaaaggttggtttcctaaagaagtgcctacatcatcacaggcagcacccaatattactcctccaagtgatgatgtgcctgcatcttcagagattgtgctcacaatgcctcctccgccaggagaggatgtgcttgcgtcttcacagatagtgcaaccaatgtctcctccaagcgaggttgtgcctacagaaccaatctctcctccaaaagacgcgtgaagaaggttgttcgttaaattacacctaggaagagctagacatatatgtattcttagggtgcatgttagttaggacagttatctgcaaaactgctaatgttagattaatgtatgtcagtttatttgattgtcagtttggacagttaactgcaaaactggtaatgtcatcagctattgggtgcatttgtctccaaaactggtaatgtcatcagctattgggtgcattatctgaaatatatagttgatgccttgatggcgtgcaatatagtttgagagaaaggagtgctatttcttctgttattgacatactggtaggagaggaagtctgctcttccttgctgagctctggtaacattgagagaaaggctgcttttgtaacagtttgagagaaaggagtgc

SEQ ID NO: 75476 - DNA, 3861 bp, Zea Mays
ccgaccaagtccagtaaataatgcacacaaaggctgcgatgctaacgttgaccaactacagaaccatatttcctggagccaagaatgtataactaaaacgcaaaagtcatctttagatatcagtaaaattttacaactatagtaaggttctgatgcgggattctgagccgcaagggaagcctgctttcgcaggcatcatgctctggatctcctcgtgcactcccagcagaacatcccgcgactgctgccacgccacgactgtgcttcaattctggcgttgaggaggagcctcctcctgccgagactgctggagacgaccacctcctcctggcggccgtgggcctgccagcgccgcagtccgtcgcatagagctggaccgggcggcgcagcaggacgtcagcgtcggcgagggcaggggcggtgcgttgcgttgcaggagcgttgtcgtcagcgggagagaggcagtggagggggctggggcggcgaatggcgcaagaggtccaagtcccagacttgtgcactgggtgatgtagcagcgtgcgcgcccgaggcggcggcggccggcccagcgcgggtcttgcctgcgctcgctccggcgtcgttctcgccagagtggtcggggcggcggcggccaggcatcccgcggcgcactcgcaccaccgagctctgccttgccggatggtggctggtgctgcggccaggttccgcgccctcgaggtggcagcggcggcgttgccgcgttggcggcctagacccgggtgatttggagcggaatctgcggacgaaatctcggcagttgttccctctttcgcgtgcgtgtgggagcgcccgacggaatttctcccacggaattctgtcgtaggtgggtttggttggaggtggcattcatggatgcgcctggaaaaaaggcccaaaagtttacattgggctttttctagattttgcgcgacaacctggcccggtggtgtttatctaccaaagtagcccgtggaactgtagatatggggcacggcgtccctccggcccgcgccccgtggtcatttcggcgttaacgccgccgcagcgccgagtcctacggctccccgccccgcaaggccgcaaccgcagtccgcagacggcctaggtcgagaggagggcgattccattcgaccacatcctaggaggccaggagagaccggcggcaacctgcctgcgcgctagtctgacagcgcgcgaggcggcgataacccgccgcggcggtggcgtcgcacgagctgccgcctcgttctggcgggacggctggttgtctcctgttcagccagcaaacggcgtgcctcgccgcagagagcttacgtgctcctctcccccacgccgccgtcggcgtgttgtaccgcccctccatctcccccgccgccgccgccgccgtacagagcttcgagcacctcggccacaccactccctcccaccgccgccgcagatatctcctgcccgcggtgccgggatggagaacgacatcaccgccgccgagatcttcggcgtggtcgggatggagaacgacatcgccgccgccgagttctccggcatggtcgggatggaggacactgctgctacgccggtgtgccacggctcggcttgtccggttgtctgccacagcgaagaacctggaggatcaaaggtggtagtggtgaacgatgtccacacttgtacttctagtggtaggaagaagactaccactccttctagtgcttgggtggctgcaaaagctctttctatccttatgaagaaaccccaaatgggtgctaaggagttgcagactattttgcaggacagattcacatgtgctatttcatatgacactatttggaaggggaaggagaaagcattgagagagttgttcgagagttgggaggagagctttcaactcttgttttcctggaaggaagcagtcttgcagaagtcacctgacagtgtaatagagattgacctccgagttgaagatgacaaactttttttcagcaagttcttctgtgcatttggtccatgcatttctgggtttaaagaagcctgtagaccgtatcttagtgtcgactctactgctttaaatggtatatgggacggtcacttagcttctgctacaagtgtagatggactgaattggatgtacccagtggcatttggtttttttagttctgaaactgaagagaactggacttggtttatgactaaattgcaccaagcagtaggagatcttccagttcttgctatctgttctgatgcttgcaaaggtttgacaaatgctgtgaagtcagtttttcctaatgctgaaaaaagagtgtgtttcaggcatctaatgaacaactatgtgaagagttatacaggctcagaatacatgtatccagcagctagggcatacaggagggatgtgtttgagcatcacattggtaatgtgagctgtgatcctgttatagccagttggctagatcaatatcatgatttattatggtaccgaagtggtttcaacacagctattaagtgtgactatatcacaaacaatatcgctgagttgttcaataattggattaaggattataaaggtcttccagtgtgtgatcttgccgataagatcagggaaatgataatgcatttgtttcacaagaggaggcggataagtcagaggttccatgggaacattttaccgtcaatcatacatgtcttgacgacgaggactagaggaataggtcacttggagtttataaagggtgatgactatgctgctgagatctatgacaatagtaactactgtgctccacatgtggtcaaagcatatttgaaagaatgctcatgtcaagagtggcaacacaccggtaaaccttgccaacatgcattgtgctttatcactgcccaacagatgagaaatgtcaggatggaggactttgttgaccattattactcagttgagaaatttagacaagcttattgtaggatggtggagcctcttgaggacaaatctttttggccaaaagtggacattgcaagtgaggttggtgcacctcttgatagaagatgtgttgggagacaaagggaaaatagtattaagagtagcctcgaaggtgtaagcggtaaggaagcaagtgaaaaaggcaagaaaatgatccgaaggaggttcaagtgtccgaactgtggagaattggggcacagaaaaaatagctccaaatgcccactaaatgggacaaagaagaggaaaagagcgccaaggaagaatacaactaaaggttggtttcctaaagaagtgcctacatcatcacaggcagcacccaatattactcctccaagtgatgatgtgcctgcatcttcagagattgtgctcacaatgcctcctccgccaggagaggatgtgcttgcgtcttcacagatagtgcaaccaatgtctcctccaagcgaggttgtgcctacagaaccaatctctcctccaaaagacgcgtgaagaaggttgttcgttaaattacacctaggaagagctagacatatatgtattcttagggtgcatgttagttaggacagttatctgcaaaactgctaatgttagattaatgtatgtcagtttatttgattgtcagtttggacagttaactgcaaaactggtaatgtcatcagctattgggtgcatttgtctccaaaactggtaatgtcatcagctattgggtgcattatctgaaatatatagttgatgccttgatggcgtgcaatatagtttgagagaaaggagtgctatttcttctgttattgacatactggtaggagaggaagtctgctcttccttgctgagctctggtaacattgagagaaaggctgcttttgtaacagtttgagagaaaggagtgc

SEQ ID NO: 75477 - DNA, 1359 bp, Zea Mays
gtgctttgtctcgtcccactgctgccagagcaggagtggagatggcgctgattgacgcggttgctaatagcattcgcatacctctatggagattatttggaggagcatcagatagcgtgacaactgacatcacgattccaatcgtgaccccaaatgaagctgctcaattggctgcaaaataccgcggacaagggtttcaaactctaaagctcaaggttgggaagaacttgaattcagatatagaagttctgaaagctatacggcttgtccatccagattgctcgtttattttggatgccaatgagggatacacagcaaatcaagcaattgaggttctcgatagactaaatgaaatgggagtgacccctgtgctcttcgagcaaccagttcacagagatgattgggaaggtctccgagatgtcagcgctgtggccatggagaaatacaaggtcgctgttgctgctgatgagagctgtcggagtttgcttgatgctcagaaaataatacaagggaatattgcccatgttattaacatcaagttggcaaagttaggggttcttggagcccttgaaataattaatgctgcaagaaaatccaatactgctctgatgatcggtggcatggtcgagactaggattgctatgggctttgctggtcatttagctgctggccttggttgctttagtttcgttgacctggacacacctcttttactgtctgaagaccctgtgtatggtggctatgaagcctttggacctctgtacaagttcacaaatgcccgtggccatggtggtttccttcacttggacaacaatgatgcctcgaaatgaagctggttaatgattttgtctgtccttctggagcttcaccgaagcattgcagtgcattccacacaaatgcagtgttccactggacaaccatgacataaccaaaaatcaaacaagcgattgcaagcatatagccatacaggtacagcctgctgttgcgagtccagtcgggcctggaaccctggactgaattggtcagccagcctgtagatagatagatattcgtatggctgttcccgtcggctctgttgttttattttacccagatagatacagtattttagtgacttctgtgcaataaacgcatatggttgtaaatgtcactacatgcagccgtgccgtcccaagcttttgttgttctatcgttcggctttccttgattacgctgaagtgaacgaagtttcagtcgagactcggccactcgggagtcgaaaatagcgttcagttgtgcgagcttttgccgatatttataggagcatgatttgaacaagtgctgcggcagcgctgtggctctgtgcgactgtgccacctt

SEQ ID NO: 75478 - DNA, 2655 bp, Zea Mays
cttcctcgcttcctctttgctttccccctcatatcatatattcccctttcccccaaaatctaaataaaaatccccacccaaaaacccacggaggagacaagcacagcaagccaccctcccgcccgttcgtttcactcatggagccgctgccgtcggcaacggccgccggcgtgggggcccccggccctggtcccgggtaccccgagtccacggagtcttctccgcgcagccggggtggggattcgtgggacgagccctttccgtcctctgcagcggcggctgccggcggcgggggccggctccgcctgatgtgcagcttcgggggccggatcgtcccgcgcccgaccgataagtcgctctgctacctgggcggggagacccggatcgtggccgtggaccggcacgcgtcgctcgccgacgtccacgcgcgcctctcgcggtcgctgctgggcggtcgccccttcacgctcaagtaccagctacctaacgaggacctcgactccctcatctccgtctctacggacgaggacctcgacaacctcgtcgacgagtacgaccgcatcgccgcgacctcctccggcagcggatcctcgcgcacctcccggatccgcctcttcctcttccccgccacccccgagtcctcgtcctcgctcggctccctgctggacgactcttcgaagtccgagaactggttcgtcgacgccctcaacagcgccatctctggctccctcgacggcatcccgagagggatctccaccgactcagcttctgtcaactgccttctcggcctagaggacgactcctccgtgcactcccgcagcggcgtgaccaactcggctcccgcggaggaccagcgcgccagccagccgaagctcccggcgggcgccaccgccgtcgctgccgccgccggtgccgggaggcacccgcacgacgtccagtccgtgccagactcgccgatgctggataagaactcttcgttcgggtccacctcctcggccccgtcgctatcgaaccttccgcctatacgcgtgcggccggaggaccgcccgtcggacgcccgcatcatgcaacctaccgccgtggaggaccacttcgcgcagatggggatctccgagcagcgtccagcagagtgttctctgacgatgataagtccgatcacggtggcggaggtcggaaagcacaacttctcaagcaggaggttccggcaattgttgatcccaccaacagagccgtctactataatgacagatctcctccggccgacttgaaacgagacatgccggtgggaacggaagctgccagctaccgcctccctgtatcagctccggacgctgcagctgccgctgcaacacaggtcccagctggatatgtccttgcccagatgcacgcgccacagcaacatccaccaccgcagcaacatttaccaccgcagcagccacagcaaccagctcctcagcagcagattgtttctgccggaaaccagcatttcatccacaacccggccactggcaccttcattccaatccagtcctattaccaccaccaccctgttccacagcaggcaccccagaccgtgccgaggcagcagcaggcacccgcattcgacccaaacacggggatgtactaccttcctatgcagcagaacgcacaccagccatacagcatgcctcctggcgcccaggccaccttgccaccacctcctcctacccttgttgacacagcgccaaagccgaccgtgccaatccctcagatggctgtaaggcctgaactgcaacaacagcctggcgtctatcgaacaacagctgccgccacgcctgctccagcgcccagcgcagctcctcctggatatgctgggatggcataccaccacatcattcagtcgcaccaccacccctcgccacagcctgtctcaaacatgatggctggcaactttggttacgagtacgctgatcctacgcgcccacaggtctactactcgcaggcggctgcagcacctccaacgttgccaccgcagtatcagcccatcgtctctcctgatgccggacaggccgaaaaacattgagcagaaccctgccccccccccccccccccccccccgcggtggtctatgttgcaaaatcctagaggcgtatttatatccatctgtcatcatttgctgttgcttactgcatgctgctacatgactccgcggcggagagtcgaaggtttgggatcgaaaaagagtatgcatccgaggtccgaggatgggttggaaacaagattttcaatcggatggttcttgtgttggtgaggcggtgaccatgctggatttagattggtgggggggggggggggagccaagtgtctggatccctgttccagtgtttttttttccttctccctctcttgttgttttgaataaaatatatataagtgtccaaaagaacctggcgaaaacgaagagctcgtcgtcatttgtgtagccatctgtatatttgatgtgatttgatctcatggatgtcattcaggttgaggtgcagataagtgtgttgttagcttgcgtgcagaaaccttgttcaagctaaataatatatatactccctacatcggtcccgttctgtactacttggatgtcgatgttgatatgtttattttttttgttttaatacattgact

SEQ ID NO: 75479 - DNA, 3989 bp, Zea Mays
gtttcaattcaaattccaagaaaaaaagatgcatcattcaataatgatcgagcatgtaaattagaattttgtactatttattcatttatcttattcacttatccaaatacttttaaatatatagttcatatacacaaacaatatatacaaacgcaataccacattgcgtgtggtccaattaaaagtgcaccaatattcattacttatttattttaatagaagatactttttaaggaataatctctattaagagactttaaactaaacgtttttagaacatttatgaatatcttaactcatacaaggatgttcttatttatttcttgaaactcacagactgacattattttaatattactatttatttttagaaggggtgaactcctaagtgtaaatattcatcagggtcactttactttggtttagaaagattttactaatcccaaaatcagaatattgggtgctacaaattctaccccccttaacagaaatctcgtcctcgagatttgtaagaaaaagggatacataaggatctgtttgtaatttagcttttaatctataattggttcaaaaatctagagtttcatttttttatagtcaataggggttgattaggagagcataggtatccggctacttattatgtggatataagctggacaggttgtggtaagaaagattatggcaaggagaagacttcatccgaaatatttgaatcttgattcatctcgagattcgctttgactgttatatccttccttatcgatgtcgatcttttcttctccagtcttggtctcattgattcctgattagtgtatatcatccgaaattggatttttcctgtttccagcacttagacacaataaattagtccataaaacaatgtactaagtctgagaaacatacctttatccttgatttgtactttgtccacctctttacacttaggcacttgtgttggacactaaatcaccaaaatacttagaaatggcccaagggcacatttccctttcagatgtgtgctcatgcaggaaggtcatgtgattgcatatgcttctcgttagttgcggaaacatgaattgaactaccccactcatgacttggaattagcagccgttgtgcatgcgctcaagatttggagacattatatcatggggaccaagtgccaagtatatacggatcataagagtttgaagtatatattcactcagaaggatctcaaccttaggcaacgtcgttggttggagcttattaaggattatgatttggagattcactatcacccgggcaaggcaaatttggttgcagatgccttgagtcgcaaggagcatgttcatttagctattgttgcccagctacccgatgagattgttgaggatttcaggagacttaacctagggatagttgctcatactgaaggcgtcactattgatgtggaacctaccttggagcaagaagtccgcaaaggtcaacttgaggatgctaaaataaaagagattaaggatctgattactgaaggtcgagttccggaatttacgaaagatgagcaaggcactgtatggttcaagaacaggatgtgtgttcctgatattaaaagccttcgagagactattttaaaggaggctcatgattcggattattctattcatcctggtagtactaagatgtatcaggatttgaagcggaagtattggtggtatggattgaagagagatgtggctgcacatgtggctatgtgcaatatatgtcaaagagttcaggctgaacaccagaggccagctggactattgcatccactgaagatacccgagtggaaatgggaagagattggtatggatttcattactggattgcctcgcacccagaaaggatatgatgctatatgggtgattgtggatagattgactaaagtggctcactttactcctgtgaagactacttataaaggttctcagctagcagagttatatatggctcggattgtgtgtttgcatggagtaccaaagaagatcgtgtctgatcgaggttcgcagtttacctcaagattttggagaagatttcatgagaacatgagtacgaagttgaatttcagtacagcttatcaccctcagactgatggacagactgaaaggacaaatcaagttttggaggatatgttgagagcttgtgcccttcaacatggaggaagttgggataaaagtctaccgtatgctgagttctcatataataatagttaccaggccagtctgaagatgtcaccttttgaagctttatatgggaggaagtgcaggactcctttgtattgggatcagactggagaaagacagttctttgggcctgaattgattcaagaagcagaagaacaagtccgtataattcgagagaatttgagagtggctcaaaccaggcaaaagagttatgctgataatagaagaagaccactggaatttgaagaaggagattatgtgtacctcaaggtgtcaccacttcgtggaatgaggagatttaaagtcaagggcaaattgtcccctcgctacattggaccattcttgatctttagaagagttggggagatggcataccaactcgagttaccggatagtttatcggatgtgcataacgtgttccacgtatctcaactaaagaagtgtctccgtgtccctgaggaacagttaccaatggaggagctcagtgttcaaggtgatttgacttacacggagtacccgatcaagattttggatatattgactcgagtgacaagaaataaggtgataaagatgtgcaaggtgcaatggagtcaccacggtgaagatgaagcaacttcggaaagagaagaagagcttcgcgtagattttccccatcttttccctagatcttcttaaatctcgaggacgagattatttttaaggggggtaggatttgtaacacccactttgtaattgctaggaataataccagtagaggaacaatatctctttatgtgagtttgatctctatgcattatcttatgtgagcatcatgcccaaaaacaattaataaaaacatatactaccaaattatgcatcatgctcgattttattctgtgtgcattttgtattaacatataataatgtgaaaaatgttaaatatccaaatggggaattaaatcctaaaagaaattttaaaatttggaaagaaagaaagaaaaatactatgcaatacaaaaataaaacttataaatagataaacttattccaaaatgatttatccaaatcatatactcagaaaatttgagtacaagttcatcaaattcgaaattcaaacttagattcaaaaataagagaaaaaaaagaaaagaaaataggaaatataaaaaggaaaaagagtataaccctaattgggccaccaggcgccaattcggcccaaccccgaatcacgcccgcgcggcccaggcggctcctccaccgcgcgctcgcgctctctgcacccggggcccgctggccatacacacaccgcatcacgcgctccgtgtgtcgctgctacgtggggccggcgggtcagtctctgttcaatcctaccgtttgcgcgcgcacactcactgccgcgtggggccgccttgtcagtctccacctcaaccgaacgcagctctgtcttccccggcgcaaccgaaccgcgcgggattgccgtcgagcgccgcggaacagggtgaagacctccctctcctccccggcttggactttgggggttaaataggaatccccgtgaccccctcgcacctgtgctcgcccgcgtcgtccccaaatccctcaccgggagctgcctggaggaagaattccaccgtcgcggggtcctcaccgtcgctacctcgtggtcggccatccccgatacctcaagtcggctggtgagtccctccattaacctctctaggtgtactctttcttttgcgctcgtcttagctccgaatcgaactcctgtgctccgttaattgttcaccgggggctagaaatccg

SEQ ID NO: 75480 - DNA, 1257 bp, Zea Mays
aaaactccgaaagttgtcgcttgaaagtatatcttcttcagatctggtttcaaagtggatgggtgaaagcgagaaattagtcgcaaatcttttccaaatggctcgtgaaaatgccccttccattatctttattgatgaaattgattctttatgcggtcaacgtggagaaggtaatgaaagtgaagcatctaggaggattaagactgaacttcttgtgcaaatgcagggtgttggtcataatgatgataaagttcttgttcttgctgccacgaatacgccatatgctctggaccaggctgtgcggcgaagatttgacaagcgtatctacattccgctacctgacacgaaagcaaggcagcatatgtttaaggtccatctcggggatacaccacacagtttaactgaaagcgatttcgagagcttggcccgtcgaacagatggattttctggttctgatgttgctgtttgtgttaaggatgtcttatttgaacctgtgcgcaaaacacaggatgccatgttcttcttcaaggcagacggtgacatgtggatgccatgtggaccaaaacaaccggggtctgtacagaccacaatgcaggagcttgcatccaagggcctcgctgcaaagattcttccaccacctatctcaaggacggattttgagaaggtcttgtcgaggcagaggccgacagttagcaagaaggatctggaggtgcatgagaggttcactaaggagttcggcgaggagggctgatacaccgcgcgcggacacacacccatgcacagctgcaccacagaaatgtatattgtttatcacttcgattgttctgcttggaagttgcattcacaggattgtacatttggtagcccaactatgagtaatcatggcagctgctttaccgtgttgggctaccgatgggcctctgttgtcaacttatttcaatttttatttatgcacatgaaaattttccgcaggtgtattattgaataataattcttaacgtggagcccttgtggttgctagtttctttttctaacgttccttagttttcacgccgagtttcttttccttcagtttggtttacttgcagggccattttattagacgctacatactgaaggtgaacttcttgttctcaggcgttttatttgaggtatctagctctggtagaatctggccatgtcagtaatggtttacatttttatagtttgtatgtatctaccacaaacttcatcagttttgaatgatctgaatctaca

SEQ ID NO: 75481 - DNA, 2066 bp, Zea Mays
aatgaatgccacctattcttttttctccgcagccaaaacacgcttctcccttcccatcttttcctttcctctccctcgtctcgtctcgtcttcgttcccctttcctcctgcgcaccccgtcttctcctcaccgcgtcaaaccccagcacaaatcaaccgcccgccgcctccgctcccctcccgtcccgaatcagccgctgcggtgcccaatccggccgatcccccctcctatccgccgcagaggcggcgcctctgggcctaccccgatgtatagcaacttcaaggagcaggcgatcgagtacgtcaagcaggcggtccaggaggacaatgccggcaactacgtcaaggcgttccctctctacatgaacgcgctcgagtacttcaagacccatctcaagtacgagaagaaccccaagatcaaggaggccatcaccgccaagttcaccgagtacctccgccgcgccgaggagatccgggccgtcctcgacgagggcggcgcggggccgggggccaacggaggtgacgcagccgtcgccacgcgccccaagaccaagggcaaggacggcgacgggggcaacggaggggatgactccgagcagtccaagctcagggcggggctcaactctgccatcatcaccgagaagcccaacgtcaagtggaacgacgttgctggcctcgagagcgccaagcaagctctgcaggaggccgtcatattgccggtcaagttcccacagttcttcacgggcaagcggaggccttggagggcgtttcttttatatggccctcctggaacaggaaagtcttacttggcaaaagccgtcgcaaccgaggctgattcaacatttttcagatctggtttcaaagtggatgggtgaaagcgagaaattagtcgcaaatcttttccaaatggctcgtgaaaatgccccttccattatctttattgatgaaattgattctttatgcggtcaacgtggagaaggtaatgaaagtgaagcatctaggaggattaagactgaacttcttgtgcaaatgcagggtgttggtcataatgatgataaagttcttgttcttgctgccacgaatacgccatatgctctggaccaggctgtgcggcgaagatttgacaagcgtatctacattccgctacctgacacgaaagcaaggcagcatatgtttaaggtccatctcggggatacaccacacagtttaactgaaagcgatttcgagagcttggcccgtcgaacagatggattttctggttctgatgttgctgtttgtgttaaggatgtcttatttgaacctgtgcgcaaaacacaggatgccatgttcttcttcaaggcagacggtgacatgtggatgccatgtggaccaaaacaaccggggtctgtacagaccacaatgcaggagcttgcatccaagggcctcgctgcaaagattcttccaccacctatctcaaggacggattttgagaaggtcttgtcgaggcagaggccgacagttagcaagaaggatctggaggtgcatgagaggttcactaaggagttcggcgaggagggctgatacaccgcgcgcggacacacacccatgcacagctgcaccacagaaatgtatattgtttatcacttcgattgttctgcttggaagttgcattcacaggattgtacatttggtagcccaactatgagtaatcatggcagctgctttaccgtgttgggctaccgatgggcctctgttgtcaacttatttcaatttttatttatgcacatgaaaattttccgcaggtgtattattgaataataattcttaacgtggagcccttgtggttgctagtttctttttctaacgttccttagttttcacgccgagtttcttttccttcagtttggtttacttgcagggccattttattagacgctacatactgaaggtgaacttcttgttctcaggcgttttatttgaggtatctagctctggtagaatctggccatgtcagtaatggtttacatttttatagtttgtatgtatctaccacaaacttcatcagttttgaatgatctgaatctaca

SEQ ID NO: 75482 - DNA, 1906 bp, Zea Mays
aatgaatgccacctattcttttttctccgcagccaaaacacgcttctcccttcccatcttttcctttcctctccctcgtctcgtctcgtcttcgttcccctttcctcctgcgcaccccgtcttctcctcaccgcgtcaaaccccagcacaaatcaaccgcccgccgcctccgctcccctcccgtcccgaatcagccgctgcggtgcccaatccggccgatcccccctcctatccgccgcagaggcggcgcctctgggcctaccccgatgtatagcaacttcaaggagcaggcgatcgagtacgtcaagcaggcggtccaggaggacaatgccggcaactacgtcaaggcgttccctctctacatgaacgcgctcgagtacttcaagacccatctcaagtacgagaagaaccccaagatcaaggaggccatcaccgccaagttcaccgagtacctccgccgcgccgaggagatccgggccgtcctcgacgagggcggcgcggggccgggggccaacggaggtgacgcagccgtcgccacgcgccccaagaccaagggcaaggacggcgacgggggcaacggaggggatgactccgagcagtccaagctcagggcggggctcaactctgccatcatcaccgagaagcccaacgtcaagtggaacgacgttgctggcctcgagagcgccaagcaagctctgcaggaggccgtcatattgccggtcaagttcccacagttcttcacgggcaagcggaggccttggagggcgtttcttttatatggccctcctggaacaggaaagtcttacttggcaaaagccgtcgcaaccgaggctgattcaacatttttcagtatatcttcttcagatctggtttcaaagtggatgggtgaaagcgagaaattagtcgcaaatcttttccaaatggctcgtgaaaatgccccttccattatctttattgatgaaattgattctttatgcggtcaacgtggagaaggtaatgaaagtgaagcatctaggaggattaagactgaacttcttgtgcaaatgcagggtgttggtcataatgatgataaagttcttgttcttgctgccacgaatacgccatatgctctggaccaggctgtgcggcgaagatttgacaagcgtatctacattccgctacctgacacgaaagcaaggcagcatatgtttaaggtccatctcggggatacaccacacagtttaactgaaagcgatttcgagagcttggcccgtcgaacagatggattttctggttctgatgttgctgtttgtgttaaggatgtcttatttgaacctgtgcgcaaaacacaggatgccatgttcttcttcaaggcagacggtgacatgtggatgccatgtggaccaaaacaaccggggtctgtacagaccacaatgcaggagcttgcatccaagggcctcgctgcaaagattcttccaccacctatctcaaggacggattttgagaaggtcttgtcgaggcagaggccgacagttagcaagaaggatctggaggtgcatgagaggttcactaaggagttcggcgaggagggctgatacaccgcgcgcggacacacacccatgcacagctgcaccacagaaatgtgtattattgaataataattcttaacgtggagcccttgtggttgctagtttctttttctaacgttccttagttttcacgccgagtttcttttccttcagtttggtttacttgcagggccattttattagacgctacatactgaaggtgaacttcttgttctcaggcgttttatttgaggtatctagctctggtagaatctggccatgtcagtaatggtttacatttttatagtttgtatgtatctaccacaaacttcatcagttttgaatgatctgaatctaca
